United States Patent Application Publication US 2013/0096032 A1 - sequence listing, part 17

SEQ ID NO: 549 - DNA, 91226 bp, Arabidopsis thaliana
cttttagcatgttgaacaactaaactgttgagaagaatgtcagctcgtggaggtggaccttcaaggtatagtattactctcgatggcgaaccatggattacaaatttacccttcaactccacccagttcttatctgttgcttgaacactaatatgattcattgacataccaaactctatcagtataatgaatttatatcaagatacttatgtaatggagaagatgaaaaaaggtgaaacctacttggcaatgactatgtattgttcacgtttgtttgcgtttaagacccagagagtcgcttgtactgttgcacttgtgacattgttgccaaatattcgaactaccgctgttacttcatacacacgcttcctcctgaatcttcctgaaatctcttgttgaatcccattccatgtgtctttacgctgcgttgctgctgcgaaaacttttcccgagagcggtacgatcttcccactgtccatggattcgtgtaagacaatcttgcacgctcttccagtccagttgtttaggccatcctcaaaattagggtttaagatgatcttctcctgctcttcgttagtgtgattctgccagacgtaaatacaaaataactctagttagctagcttgtagaaacattagcgcactattgttaagaagaagcttaaatatcgacaaccttatcattattatcatcacttgtatggttcgtatttgtattcttctccatagcaagttccaagcgaagaagattaagtacacacaaaaagaagataattgttaaaaagcttttgaggttttagtttttttggttgggttgaggaacttgctctgatatatatatatatataatatatgcttctatgtcaaagacagaacatagagagtttcaagtgaactccaagacaagcaagagctagacacaatactttgaaaaaaataacattattgattttgtgatttgaagaagaaaaagagaaactacaattgctttgtcttaaacccaggaaagtgtagtttgcttgaattaaaatagaaggcttcaattgttgtcatagacaaccatgtgaaagaacgaaagaattcaaagctgaagctcaggtttcgttttcctacttgtgtttattaaaccttacaatgcaagtaaacctattttttaaggtttcaaaatggtttctatcctcagaaggttcacattgatctaaccaaattgttgtactagataaggtttaaaagctactttatataaaagagtcaataatcaacaatttgtgatgtaaattttgtaagattactcataaaagagtgcatccaaaactgatccaaactataaactccaagtttcaaacaaactaacaaggacatgatcaaaagataagagcagattaaaaccaaaagaaatgacatttatggtcaaaatagtacaaagccaaccaaatcaaaagatagaagcagtcacaaagtgaagccatgcccatatgagtagtgtgtgacataaggtctattcactttttgatatggtgacattgtagtgagattcagacaattctctatccttaaatctctaaaggtcccaaggattttcttttaaatgcaatcttccattgttcttttgtacagcacaatgaagctaaagaacaacatcgagggaaatcggtgctttgtcctgtacagaaataaattgcatagactactaatcttctttttttctttggggaggaacaatggtctctccgttgagtttagtattgatctgccaaagctcgtttcttacattggctttgtaccacactcagtaagaaatcagtgaatacatgctcatactctggcattttcccgtaccctgcgcaagttcttttgttcttaaaccacatgtttgtgatagtctattgcaaaaaatgtgtggaaatcaaacttgcctgggaaatagttgatgtcgatcacataaaaccgatctcttgtcccgtgctctctaattatgtctaaattgaacagccttagaccctgcaacaaattagagatcagtagagtttgatataatactcctgcttggatatatagtagagaggactgaaacataccaatccacgacggagttcctttgccagtctctccaacagaggacgtggtggaagctctgcaacgagaatgaggatattgttaggtcctcatcaaaggaaaaatgcagacgatttttactgatgatgaagaggattttaccggcaatgctcgggtccagatctgcatcatcagctgaagctgcagcacaagagacccgtgggaagcggaatacaccagctgatttggggagttctcgtctagagacatcaggtagggagaagcgccggacaactctaatagcctccccaacaatgtaaaccttgaaaagaacacctcctgcgaaagccaagcatttagataggtaatcaaattatctaagttctagtacaggcaatgataaccactaaaatctcataccatggttaacaaactcctgaagaacaagaggaggctcgagcttcagaagggagtgttgatcgtaagccagcgaaagctcatgtgactttgcacttccatcagcaaccaatggctttgcaactacgattttaaacatcaaattaaataatttacttatagatccattaataatgcacaactaaaacttcagccacccaccaattgaacaaacacaggccatggtggcttttgtgatagacaacaagatgccacatgaagctaaacgaaagtcattaacagaacataaggagggaatcataccaagaggtagtctcagaccagcattattgacagcctccggaattgaagatgcatcctttttaattaccaattgcttgggcacaccaacgcgtcctgcacaatcagagcaacttctactactcagatacacagaactctactaataaaatctttaaccttagcgtccctaacagcaaatagcaagtgattacacatgaatatttaccattactatcagacagattcatgtccgcaacacactgaagcattgactgacgattacggagatgtagtattgcatctggaggatcaagaactgtgacatctggatgtgctagcctaaattcctgaaattattagaaacagttatgctcacacatagtctacttttcaacacccaaaagtgcatccctgctaatggtcataaacagaaaacttctatctctgtattgctgagatctcctgagatattgatctacattgatattattattaacacagcgacagtgtcagtctaaaaactgtatccccaacgttgaactcttcactatcctgcaactaagattaagaattaaactaatctactgatgaaacttgcactttgcaactaaagtttcattgtagacacttttctatatcatcagtatatactatctgaagagtataaatctagcattcaactatactcagaagttggcattctaatgattcatagtctgatctcctgagatctgaatagctctaggatctaaacacacagaaacgccgattactttctacaccaaacagcatactttcatttctattcttctagcaattatgagatgtgaaatgtcttgttccccaacgagaaatcagatgatggctcttatatatgtagacaagagagcattacattctacttaaagatgaaatgattttgcattcaactattaccaggaacatgtaaacccaatattcaaaaaacattactagtatctaactctagaaaacctgaagaggttacagttctatgcctctggaagtagaaatattctcacttgcagtagtctcaacctcaatttgtatcaactaatgactcacgacaaggaaagagtaaaagctctggaaaaaaatttccattgagaaacaagatttagaaattaaaaggaactagttgctaacttgtgcaatttaccaccatctctcatctaacaaaggcttatataacataactacatcaacatggtactcatcaccacagaatgacagacatacatgatctaataatcttaggctatagaatgtgccacagcaaatacaaaaacggaaacaatcgtaagactaacctcgagaattcgacgccattcttttccaatttgctgccagtacatgtaaaaacaaacaccaaataagaataatcaggcatcaatgaaaagaagctaagcaagaagacgcaaaacaaggttagtttctaacaacctgagcaggggatgttcccaagacatatcttctgacaaaccataggcaaaaataagatgaatgtatcagaaaaccaacagggttaacaaagatccaataaaactaaccttatgcaacacaatatcaaacggaccctgctctgaaagtggcttattctgatctattgccacaaataatatccccttattcctgcacaaaacacataactacagtaactaaactttatagtaacaccatttcatcaatagaaggtcaaagattccaaaagaaaaatcaaacaattaaatagtgaagagaatattcttatgaaaattaattttaaaaaattgagaatttgttcattaacaatatgcatgaaagcaaatgatatcaaagcggactatttgacacacaaaaaattcgtgcggaaccgctacatatcacttttgtaaacaattttcctctaaattggctcatttgagtcctaaataatatcaaagccgactatttgacacaaaaaattcgtgccgaacaggtacatatcacttttgtaaacagttttcctcaaaattggctcgattaagtcctaaataatatctgatagcacaaacaataaaattagggttaaaaatcagaatcacaaacctagctaaaccttcgagttttggttgtaaaaagctcttaatcttctttgatgtaagagcgtaacctacaataatggatttcttcaccggaaaagcttcgattactaacgaacacggcgacgatgtctcttgctctgtcgtctccatttctcgagttccgttcatggtgatctcttcgttgtccgttagcttcatcttgtggaaaaatcaacgaaacaattttggggattatggaagtggagaatgcgagatcggaggaagaaattttctgggtttgatgcgttcacaacggagtaaaatttgggattggttttaccgggtcgggtttagatccgaattgttttagtcggtgcttgtgatattttgggtgggttatgagagagtagggagaggtctgaaatatttatagcggcgtgagggacatgtgtacacatgtatgtgtctaacggttgttttttttttttttttggtaaagaaacatgttttaattatgagaaatgtatattgcaatttgaacatattcttggaactgcactgttttatttttgtctgagccaagccgatatatagctagttgtgatttgttgttgtttaagaacgtgaatgatctaggttggaattttttaaaatgttagatagatcgatctggtttgagtttggagagtttattgttggtcgggatttgaaatcaatgtattgacaagtttgagagacgattaaattttttagatataattcgcaaaatgaatgttttaggagaaaatcatgtagctaattttctttcaaataatatagttagcaaaaaaacaaattaatatttttgtataattttattaggtaaaataattttttatcaatttatcaaaactcaacaactatttatatgaccaaaacggttgtataaatgatattagtgaatgtttgtgaataaaacttaggtagaatttcattaaaaagaatatatattctatgtataaaaagacttaataaattattttatttcaaaaaagcagatctcacatacttttaaattttaaaattggtaactttcttcaaaattcctcttaaaatagtacgtctttccctttataaacggctaagttactacatcactttaactttgagctttttggtcctccgaatacgtcctcacattcttagtgacttaactagaactcatcttcccaactcatcttcccatgctttcgagaaaactttgttttggctttttgagaattgatgatcttaccatttcttcaaagagtcctataagattctcaacaaaaagccatactacttcaaccattggttctttgatttggagagatgcatgttgtagatgtgtttcttaataccatgatatcttggattcacatagaagtcatcccctcccaactctagatggaagagatcttttgcaactttggaaactcttgtcacaaactactttcgagtattcgagcagttaatgctccggtttcaagaatctaaattacaatttgagtagatgcattatcccttaaggtttaggaagaatacacaaatctcaactagtgagactgtgtggatctctttaacgtattagaaactctacttatgatgttctaaatggcataatatttttcatgaagatgattcttgctccttcaagtgagagtctcatagtgaaggtcgcattactagaaagtccctattgtgcaccgcaaggatttgttcacgaagttatagattagctggactattactctttcccgatttacaatgatacccatatacgtacacattcctcgtgttagagaccatatcttgccccatcaccacccgagccaatcatcccttctagagattatcgatcttaaaacgcagatggtaaactgcctctaaatattggggaagcgtagagacgaatgaattttaaacctcatacttttttgtcttcattctcgaacgaaataacattagatccctaatagtgcttgagatggtgttagggattattcggatgaagattaggagagaaaatcatcatgatgaaacatagctctctcattgggagacttctccacaccctcaaaagagtaaaagtttgataccattaaagcttgtgaaacgaacattaacaaccataatgaaaaaagcagataaaatattttaattttcattgaaaattttgaaaaatatgaaaataattcaatcgagtactatgcatatttttaataatcaagagaatcagctaagatataaagcattaatcaaatgtaatctcatctaataaattatcgaatcaatggtttaattaaagattttcgaaaataaatcaaatctaaatgattacaatctctccttaagatcacatttgaatagtgtttcatattaaatcaatcaacaaacgatgtatagaaaactagttattgttcttaaaattaattacattccttaaagtgacgtgcaaaatttccttattctaaaactgaaattaatgatttgcttaatttaacgagaatattattattaaatacttttaatatatttcattacaaaaaaaaaaaaaaaacttagtgcccatattcgattctcgccacgtcagcaaacaacacctcaacaacggcaccgatttttctgtcctcttcgttcaagtcattccaatattaataaaaaaacgaaattagtaaattaaaatttttaaacgaaaaaaaaaaaaactttggcctctccggtgactcttccttcttctgctaccgaacttttcgcttccttctctgaccaatttttttcaacaacctctcttcttcaacaaattctcttctcaaatcctccaaatcctctctgccatgaacgctactttcttcctcctctccaccaccgtctccaccgtcacaatcaccggattcaacggtctcgatttctcatcttagaaccacatgcatcccttctgttgcgttacaactgtctccgatcactctccttcgatgcctccgttacctgaaccacaaccgcctctaccgaattacgccgccgattttggttcggcgagatccgaaccgattataactcgatctgcttctcaaagttataatcattcaggtcaattcaataacaatcttattcatagtctctcgtttaatcatcaccagagtgatgtaacggatcgattggggcaacgcgttttagctttgccggcggcggttagagaaccaccggttgatgttaagattaacgatatcgttgggaatggaattgctgggattttgtataagtgggtgaattatggtagaggatggagacctaggtggtttgttttgcaagatggtgttctttcttattataagattcatggacctgataagatctttgttagtcctgaaactgagaaaggatctaaagtcattggagatgagtctgctcgtatgatctctaggcataatcgccgtggcggtagcagtagtagttgccagcttcgtcgcaagccattcggagaagtccatctcaaggttcgatacacgatcatgtctttcatagccatatgtgtggttctctggtttgaatgatttcattttgattgtatttggtttgtgtaggtttcttcagttagagagagtagatcagatgataagaggttttccatttttactggtaccaagaggcttcatttgcgtgcggagacgcgagaggaccgaacaacttgggttgaggctttacaagctgttaaagatatgtttccaaggatgtctaatagtgagttgatggctccgactaacaatttggctatgtcgacggagaagattaggttaaggttgattgaggaaggagtaagtgagttagctattcaggactgtgagcaaattatgaagtctgagttctcagcacttcagagccagctggtgcttcttaaacagaagcagtggcttctcattgatactcttaggcagttggaggtattacaactttaacaacaaaaagcttctcaaacttcttaatttagattttgtgttgactgctgtaatctgtgagggatggtaatgttgatttggagtgacctgttatgatctattggtgttgtactggagggaaaattgttcatttttcttatgtgtttatagtgctttagaaatcctgcaaactttacaatagagttcattagtattactagtttgtttattgttctctctccggctaaactctgctaagaagttgctctttctgcgttattctctagacagaaaaggtagatcttgagaacacagttgtagatgaaagtcaaagacaggctgataatggatgttccggtgaattaagacacgagaagttcagtggtgagttaccaagcctcccattcttgagcctagcattcctgcatataactgtttcattttacctgtattttgattcgagtttgcaattgacttggtttatatttatctcagaaggcactgccactgagtctgatgatgataatgaacgaggtgatgccgccgaggaggaatttgatgaggaagaaaataccttttttgatacacgtgattttctttcttcaagttctttcaagagtagtggttctggttttcgtacatcatcattttcgtccgatgaagatggctttgagtctgaagatgatattgatccttccatcaagtctattggatgcaattatcctcgcgtcaaaaggaggaagaatttacctgatccggttgaaaaagagaaaagtgttagcctttggtcaatgatcaaagacaatatagggaaggatctcacaaaagtctgtcttcctgtttacttcaacgagccactttcttctttacagaaatgttttgaggatttggaatattcgtaccttcttgaccgagcatttgaatatggcaaaagggtaaactatctgaacgcttgtcccatctgaaacccttatggtagcatcttgaatattgctcagtatgtgaaacgtttttcagggaaatagcctcatgaggatacttaatgtagctgcttttgctgtatctgggtatgcatcaactgaaggaagaatttgcaaaccttttaatccattgttaggtgaaacatacgaggcagactatccagacaaaggccttcgatttttttcagaaaaggtttcagttcacaacacacatatcttcttttctatgttttaattattatctatagctattcagacctcttatttcttttggtgtcaggtcagtcatcatcctatggttgtcgcatgccattgtgatggcaccggatggaaattctggggagacagcaatcttaggagcaaattctggggtcgatctattcagcttgatcctgttggtgtattgactttgcaatttgatgatggagaaatccttcagtggagtaaggtatcaatcaaatttttaccaagcaaataatcatttaatatgttcgttgttcactaatataccctttctttacacttgtaggtgactacatcaatatacaatctcatacttggtaaactatactgtgatcactatggtactatgcgtattgagggtagtgcagaatactcatgtaaacttaaattcaaggagcagtccatcatagaccgaaatcctcatcaggtacgtattaactttagtgatgtgttcatgtattgtgattaggagtggacattccgtttcgtatgaaattcatattctataggtatagtattatataaaccgtactttttgtgattaaagaacttcagtctgtgttgttcggtttggaataaggtattgttactgttctatttcaaaagtaaagattgctttcgattgagatactttgctaggttcttatgtccacctctagttgtgatggtccgagatctaccaagtaacttgtccttatcacaggttcatggtatagttcaaaacaagagtgggaagacagtggcaactatgtttgggaaatgggatgagagcatacactttgtgacgggtgattgttctggaaaagggaaattgagtgaagatatgtcaggagctcaacttctctggaaacggagcaaacctcctggaaacgcaacaaagtataatctaacacgttttgcaatcacattgaatgagcttacacctgggcttaaggtgaatgccgcagagaattctgtttaaatttcttaaattatgttttggagagacattctgaccagaaggagtgatggatgtaggagaggctgccaccaacggattcaaggctgcgaccggaccagaggtatctcgagaacggagagtttgaaatggccaacacagaaaagttgcggctggaacagcgacaacgtcaggtaatacaagtcaaactttttttattgtattgttcctctgtttcggttttcagaatgaattagaactcacatgctataaactgggctgtgtgatgagacaggcgaggaagatgcaggagagaggatggaagccgaggtggttcatgaaggagaaaggaagcgagtcttaccgatacaaaggaggttactgggaagcccgagaggatggatcatgggtagactgtccagacatcttcggccacatcgattccgatcaacaaatgatagagtaaaacgaaattaccattcacatcgattcttgaatcacgaagtattaaattcctcctatcttcctttctaattacgttttcgtttcttctattatttttcttcctttttcatctcattattctttactcgccatttcacgttacaggacctttacctttagtctctttttttcttttcttctttgtatatcatgaaatagtttcgcgtcatacccaaatttgtccaatccttgtaagtggaagaatgtgctccaaatcatacatggctatattgaataagcaaaaggaagaaagttacttatgtgaaagagatgtggctaccctttgttaagtgtacttatgcttctacctgtgagtcggttagtcattgcattcccaaataattactcgagtaaggatgccgaaaatgttgaggttccgaccatgcttattgtacagaatgaagcttcaagaacatactcaatcagttattggagcaaccaattgaagacgagactagttcatcaccacccttagccatgaacatcatcgatcaagcccatggatggaaaaatagcggatttatcataacttaatattcctagatgcacaatttgatatgcctcgttgtagagtaattggacaagattatcgtaacgttacaagcctatttatatgtaacatgttaacgaccagtcccaatggacatggaaaaggttgtgtttagtcgagtgagtaaataagtcatgcctcgtcagcattttttatggttagcactttagtaagaattcacgtaattaatttgaatttcgttactggttaagattgaaataagcactatctcattctatgggtaggaaaaagcatcgtcgaaattgtaggagttaaaatacgctctctaccctagatgtatactattaagagcatgtacattggttagtttcttaaaaggaatccttaacattttataatactaaattttgataattttttagtttaggattgttgatgaatctttagagtttttaatgtccaatggtagaatctttaaatgagtttcttaaaaattttaaaattttttttgatataattataatttgatataacttaataattcttacaaataaaaattatcaaagcttcagtagccaaagcttttttgctgatgaatctttgctaaaacagtttaaaatgctttctcgacattggtggcttcaagagcagatgtttccaagaaagagagactttctgtcttatgaccatcttcctcagctactgatctcaagtggtttagatcagctttgttcccagccatcatgatcacaatgttggaatctgcatggtctcttagttcacgtagccaccttaagacattatcaaaagtctgtcttttggtgatgtcatagacaagaagtgcttccaccgttgaagtcgttctttcattaagcttcttccatcttcctcttcatggttgctgctgctgcaactgccttcactactaccacacggctttcttaaacccaaagaagaagatatgatgctgtgtgggtacaacactgtgcttgaaaacatatgtgtactaactttactatttcgtgccaagtcctgcatttgaagtgacactattatcgtcaagcaaaacatcataatacatcaattcaaagtgtcgtcctcttagagattgaactacaatggttatatttcgccaaaagtaatagggaactcatgcacaagaacaagtgatagcaaaaaaaaatcagagaaagacagtctcgagttctcgattccatcacacattcttataaggaagcttcaaaggaatgtacactacaatggtgagcttaaggcatcatttccacatagaaaatcttaaagcaatgttacattgatcacattatcaaagaactcaaacacagtgagacatcactaaaacttctcagagattatcattctttcaagaatacattaactaacaagaaaaataaaactaattaagagggtttcagaacactttaacatgtgaccgtctcagaaccaaatcatcatccccacccaaatcattcaaaatctctttatcaacaatctcatcaaactcacctttctccattatcttaggcacgtgatctttaagtgaagacataggagcctcatctggtccattaaacacaccatctcctccattgccaagctgtaaaacagaacaaaatttagcttaacgaaatcgaagaaaaagagtagcgagtttgatgataaaatgtaggagaaatatacatgtgattcaacatcgtcatatctttccctcagaccttacatagctctcttccacatcctcatcatcaaaccgtagcaactaaaacgaaattgtatacttaagattcattctggaacaaaatttcagagtcaaacttgaacacatagtagaacaagtctcagatcaaaacagacttgtaatcgagtgaaatttgaagcatataaccacatatattaaccataaattgctgattagatgactcgaaatcgtaatgcgatcacatcaaataatcctcacatgaatacagagagatacttaccatgagaaagagattggagcaaagagactgtctcccaattttatgaccgatacaccatagtttcttatcaaatcgattcaaatcgcctgatttcgtcgtcagagtaaccaaagaaaagagataggagaaatggaaagagaaacacgcagagcatgatttttttttgttttgcctaaattttcactctcagaagcggccacgtctgagtttctaaacacttctaaaaaacctaaaattaggatccatcctaataattttgttgagtttttctttaattttgggcttttattccttaggatttcagataagaaacccattagaaacactgatggacatggtctaaatcagcattaaaatggaaatgtagaatactatttatatttttgtttagagatttcttaaactaaatctttattaatatccataatatcatttcattgatatctaaacttgtttcttttgcaaaaaattaagatttgcagaaatttaagaaaagctaacaaatttgattttgaaatattaccttattcgaaatggagatttgcaaaactaccctttttttactactcttttgcaacaatacctttttatattgttcatttttaaaaatattcattcccttgaacagaatgaccaaattaccctcatctaataagaacatctaattggaaactgaaagtttcccgccaaatttatttttcccgccaaaaaaaaatttccgccaaacttttttttccgccaaaaaaaaaatccagccaaaaaaaaatttccgccaaaatattttctcgtaaattttttttcctagccaaaaaaaatgcttttaaaaatccttgtaaattttttaaaaactcttttaaaaaaccttgtaaagttttttaaatgctttggtagttactaaaaacccttgtaaatcattttaaaaccttttaaaatctttataaagtctttaaaaacataggtaaaactttaaaacccctttttaaacctttgtaaatcattttaaaactttttacaatagttttacaagatttacaatcgtttttaagcataagtaagtggcattgaatgatttacaagggattttaaaagcttataaaagggtaaaacatgatttacaatcgttttaaagcataggtaagtgacatagaatgatttacaagggatttaaaaagggttagcatggtttacaatcgttttttagcatgtaaattttttaaaaactcttttaaaaaaccttgtaaagttttttaaaagctttggtagttactaaaaacccttgtaaatcattttaaaacctcttaaaatctttataaagtctttaaaaacataggtaaaactttaaaacccctttttaaacctttgtaaattattttaaaactttttacaatagttttacaagatttacaatcgtttttaagcataagtaagtggcattgaatgatttacaagggatttaaaagcttataaaagggtaaaacatgatttacaatcgttttaaagcatatgtaagtgacatagaatgatttacaagggatttaaaaagggttagcatggtttacaatcgtttttagcatgagtaagtggcattgaatgatttacaatggattttaaaagcttataaaagggtaaaacatgatttacaatcgtttttaaaacataagtaagtggcatagaatgatttacaaggatttttaaaaagggttagtggtttacaatgtttttttaagtataagtaagtggtattgaaatgatttacaagagattttaaaagcttataaaatgaatttacaagcattttttaactcttataaagtctttacaagcattttttaactcttagaaaaagaattgtaagtatttaaaacatttgcaactttttttgaaccattttaaaactcttctaaacctttacaaaatgttttaaaaagatttacaagagtttttaaagggttttcttataatttcttttaaaatctttaaaaactcttgtacatcttttaaaaccctttaaaaattccttgtaaatcttttaaaacactttcaaacccattaaaaatcttaaaaaaactcttgtaagtcttttaaaaccctttaaaatcccttgtaaatctttaaaaacccttttaaaatctcttataaatcttttaaacccttttaaaatctcttgtaaatcttttaaaatcccttgtaaatcttttaaaatcccttgtaaatctatctcccgccaaaaaaaaaattttacgggaaaattgttttttggcgggaaaatttttttcggaattttttggcggggaaaatgtttttgaaaaaacattttggcgggaattttctttttcgaaaatttttggcggaaaaattttggcgggaaattttattttgaaatattttaggcgaaaaatattaatatttcattttgttaacctaaatcaatttacaaataggggtaaaatggtcattgaaatttttaatagggtataaatgaaaatggtagaattgaaaaggggtagtgtgaaaagggcattagaaagaatttttctattcgaaaaataacgggtttgattggtgactaaaatgaaagctactagtcaaaagagtgttgctaaaagctatacaaataaaatcaataaaaataactatgtaatattaaataatttatgaattatatccggtctccactatcttcaagaaactctatttctcctcgatttaaaaaaaattattgatgttaaataaaaaagaaaacaatcattcacgttaaaagataacgcgcgagtcatacttgcgtaacgctattaactgctcaaattttcttttatctgaattattttttattaataaaataaatattataaagtataacattatttcctatataaagaaagcgaagcaaagtttataaaccaattgttccttctcacaaacgagtgattttcatttctcagcacaatctagaaaaacaaaagtagaagacactatttcattttcagttatatgcgatcaaggtaataattaatatttacaatttatttactgatacgatgtttttatgctcaattatcataaaacactaatcctgtcgttgtagtatttaaggtgtcaatctaaatgggtgtgatgcagacagatgagatatgatcagaagttgctaagtcaagccaagcaaaatttggttggttttctaacagtcctagtgttgatgcagaaaacagtaaaaagtcacaaaaatgactgatatactcgatcgcatggtcgattaccagaagggaccctgtgatcgagtacaacaggatgacagagagtgaaaatgcagaaatggaccagtttactctatcacgcagtctcactgttagtagactggtgtgatcgagtagaatggttgaaaacagaaaaataccaaaattcaatagcaagtgaatgaagcagataagtaaacagagaaatcaaatggatgagaaactcctaaggatgggggtaattgaatagtgtggtctccctaatcaattcagttggttaacaaatctcaattaagttatccctagacaacatgttcaacaacagattaattcactcccgtgatagaaatcctcaagcatagctagacactgacctaattcccattagcgatctctaactaagcaggcaataagaaccaactattaaagccaataaccgctctaaacggccaatcccttgggatagagacgattatcactggaattagtagatccaacgttccattaaacgccttctgggcgctggaacgtctgggatcggattccagttgatcagaaaggaataagcaataaacacaactaatccagaagggattcaataaatctacacttaaccaacagattcgaccaggggttccacaactactctatcccatcctcagaaatcctaatcactactcagacaacatgcttaaagacaataacatagaaatgattgaagattgcatacttaaaagattaaagggaatgaaacaaagatgaacaagcaaatgaaagcaaaatctgaataacttagaagaaaaatcgaaatacgaagttgcaggaatggaaagcggttgctgaataatagtgcgaaattcgtgtctctaaaagtgcatgtctcagggcgaaacccttagagacttatttatactaagataagaaagcgggcttcgagcccacttaacggcccatggacggtgtgatcaagagtgtcgactcaaagtgggcttcctaatgggcttcgaatgggccttctcttctcttctctttccaatgctcaggttgtctggttgagtgcggattgatcagagggtcgaggtggtggtcgagtaggttggttgacagaatggtctgggctgcttcttggcctctgtgatcgagtaagtgtgtcagctgtcaggatggactgattcttctcctctgcggtcgagtgtaactcgtggactggcaaagtggactacctggtcgcctctgcgatagagtagaattagagaatggactgcctcctctcctctgcgatcgagtatatctggcataatggactgcctgctctcctctgcgatcgagtagaagtgtctggatggactgctgagctgactgcttccttctctgctattggtgatcgagtatgttggtggaagtgtgactttctgttctgtttttcctctttctgagcaccaatagctccaaaacacctgaaacaactccagaatgcagaatgtatgcaagactagtcctacactcgactaaagatgcaaaatgtacaaaaatgatggtgaatgctatgaaagatggatgaaactagactcaaaatggtgataaaaggatgtgtaaaacatgcaaattatagacatatcatttacgttgctaatttacaactaaaataaaaaataattatatgaatataatttttatttatttacaatatagttgtcatatataacacattcaattttatttttcatacattcataatataatttttgtaatgatttacatttttgttgaaatgtaaaaataattatataagatcgcatttgtactatttttataattaaaattatttattattgttaaatataaattatgacaaaattgtattaaattgattttgtcataattaatattttgtttacagtatgcctaatgaagttcctacctcttcacgtcgacgaaagaatgtaagttaaataattttttaatatcccatttatacgattcatatgtatatacacaaagatatttttcattttttttagaaagaatattggttgccttctgaagagagtattatgcttgaactatatgaagttgagcttgttaaagtagactataatacatatggtctaaaaacacacatcaaaatcgtattagagcgaactattaaagagaacgggaaaacatcttgatagttggataaaggttaaaaacaagataaatacattgaagggaaattacaaagaatgggcagatatacgtaatcaaataacaaatttattatgagaaactcgtacttaatttaattatttatatgtttgtgtatgttcaaagtttatactaagtacgagacattatatttaacatgagaaaaattactaaaaccaatttagtaattcagttttactgtttttattttataataagtaaacaattatttttattggactattttttaacaacataattattggactcttaaattcatattctttgtcttaccaatcatatattgttcattatatataatctaatttttatcagaaccatttaattgtcataacataattttaaattttcatatacagttagttatatactaaagtacatttctatgtacaaaatttatttattttcatttttatattttctaaactcttgatattatttcttttatgaaccattataatatttcaattagagtaaaattttaaaagtagttctatcttatttttttgtacaactttcttataccattttttttatagctttgcactatttcctaatagctaacaactccagctaacaattaaaaaacttgtaaaactttcggttaccgatcagatccaacaaattcgagaatatacaaagataattaaatgccacgatttataaactattttgagaataagttaaaattaaagaatcaaagaaaaagaatacaaagagaacaactacgatactggaatagaaaaaacaaatggagcatgaacattatgggtatatgcaacttagacatgttctttacatatatataaatatatatgttggtgtacttggttatgcacatgatgcaaaggttctcgcattggccatgcaaggcgatccaaatttttcacacccacctataagtaaatattatcttgttgattcaggatatggtttacatcgtggatatctcatatcatataggcaatctcagtatcatcccagccattttcaaaatcaagcaccacccaacaattataaagaaaaatttaatcgacttcattcttcacttcgattagtcactgaaagaacatttagagtgtggaaaggaaaatggaagataatgcacaatcgagcaaggtatgatgtccgaacaacaaaaaaacttgtagtagaaactatggcactacataactttgtaagaaaatcaaatatactagatcccgattttgaagcaaattgggagcaagatgataatcatcaaccatcattgaaagaagaggtcgaagtacaagacgatggtcaaatatttgattctaggcaatatatggaaggaattcgagatgatattgcaatgaatttatggaataatcataggtaaaattagatttatcaagaattcataggactttttatttttataccatcataatatatttatttaaattagtaatacaaggcattttatttactataaaattttttttattaaaactattatatttactaatccattttctctaaatatttaaggtaaaaaacttacaacaataataagttactgctacagcaaagacaagtacaacaaaatctctagagcaaaaattatatagttacagctcaaccaatcactcacatataagccacaaatgcattggaaactaacaaatgatacacgaagttagaggaactttaaatttcatattttcaataaaatgagagagtttgtaaaagaatatacaatgatttgtttaaccagcattagaggtttttgaagtttttcatagccaactaaaaagaaaagggtaaacatatgttcaagaaccttaaagaatctttgacttggagtcatccagagagacatgaggtcgaagaagcttttcgaatatatttgggagagaatcacgtcacggcggttgctcatgaaataaacgtccggtggtgcaaaaaatttagtgacgaatcacatatactgtagctgcctgaagcaaaatgtatatggttggagcgactagtagcatcatctaatgtacaagcttcatctttgtctttagccactttttagcatcttatagtagggagttttatccacagaacctgtaaatgcgtgcgctgtagagacgtgaaattgcattatcaacattggtaaaaagggtacatagacttattagtaaggatgaaagatgtcaaagaaaccgaagaggccaagtattaaaacttcctccaggctttgatttcaagtcactggtgtaatgattgtttgtttgttcataaatagtcagagagttaaactaatttagctatttatatctgtgactgcgaaaccactttgcttctctttagtaagcgaagagatatggatcaaagttcaaacacgcttagaattcataccatcaattttctagacctggcaagtgataacttcctagtcctcacaaacctaattgttgcgctagcgatagttcaaaagcttgtggcataaatagctaaattatccaactcattccagattcttttgcccctagcttcttagcagcttctctcactttacttaactgatcccacatgcctaacgtagcataagcattcgaaagagatgtataaaccgatggatcatccggaaaccccttgagtaatttctcagcaattacagtaaccagtccggcattcttgtgagttccgcaagcagtgagcagagacgtccatattgttttgtcgggctccaacggcattttatttatcaattcgttagcctcttggaacagcccggcttgaccaagaagatcaactacacaataataatgctctagatacggttcaagaccatattcagatttcatcgtttcgagggttgatcttgcttcttcaagtagtccagaatgtcggcaagcagaaagaagccccaaaaaagttaccttatttggttcaattccaatatttatcatcttgtggaaataccgaaacgcttcttcgactcgtccgttttgtccgaatccaacaattatccctgtccaagagacaacatctctttctaacataccatcaaacaacactacaccattatctatctcaccacattttacatacatatctactagtgctgtcgctgtgacaggttctgattcataacctttctttatacacaacccatgaatttgcttaccccatccaagagatgctaaacttgaacaaactttaagaatatttgagacgatgaactggtcagcatcgagtcccaacttgattaattccctgaacagataaaatgctaaagaattgaaccctgatttcacacagcctcgtatcaagccagagaaagcgatgatatctttatttggaagcctatgaaacagtttatgtgcatcttgtatattcccaacatttgcatgtaaatcaacaagaatacttcctacgatgtaatccaactcataaccacttactacaactaaactatgtacttgaagcccgagtcttaagttgacatagttgatacatatctttaaggcaccacttagagtgtaggaatcaaaacacaaatctgactgatatatctgcaaaagcagccataatgctgcttcattctcctcatttatcaaaaatccagagagcatagaattccaaaccgcgacactactattaacggccagtttttcctgatgaaaaacatcagctgcatatattagagagccacagttcgagtacatatcaataagagcagatattgcgaacgggctagactctagacccgactttacgacacaacaatgcagctgtttacccattgttaataagccaccaaaactacaagctttaagaccacatggtaaagcaaaaccgtctaacacaagtccttctctctgcatcctaactaaaaactccaacgcacgaggactacccttatcgacaaatcccgatatcaaacagttccaagacacgacatttggctgcggcattcgatggaacaaagtaaccgcttcatccatcaaaccagctttacaataaccagaaataagagtgttccacgaagtcgaactaggccgtaaaatctccttaaaactgctattagcttcgataagtctcccattcttaacatacatatcaacaacactattcatcaaaacaacatcacctctcaaattctctttaccaattctttcataaaccaaaatccccagctgaatatcacccactaacccacaagctttcaaaaccgcagaatacataaactcgttcgccgcttcttcttcggagtctaacattcttctgtataactcaatagctttattgggttttccatcactcgtatacccagaaaccatcgttgtccaagttacaatatttctctcagacatttcatcgaacactttatgtgcatcactcaacaacctgaaatccacatacattgagatcacgttattcgctataaacacattttgagagatcccttgcttgattacatgagcttgaattgattctccacgcttaaaggcttgtactttcccacaatgacgtaatcctgctgctataagcttcaagtccataaccattctccagtaggaaaatttttgacaattccgttacatttacaaattgtatagtctccacgtaaaacggaaggtagttttatggaaaaactaaaaacggcacgctgtttagtacatgaattgatgaccgtaaaaacggtaggtagtttgtttggtaaagggaaaacggcacgctgttcaatacggtagtggctgctataagctgaattttcaataattcggtacttgacattgacaattacaaattgtaaggtcttaacgtaaaaagtaaaaacggaaggtagtttattttagaaaataaaaacgttacactgtttaatacaggagggaagatcgtaaaacgtcacgatgttcactataggaatacaagaacggtagatattatgttgtggaaattccggtaggtattatgttgtggaaattcaatacggcaggctgttcattgtaggaatatacaaacggtaggtattgtgttgtggaaattcaaaacggcacaatgttcaacattggtgtgaagaaaaatctcataatttaggatcaatggctgataaaaaaaaaatcagatctgaaactttctccgtcgtcgccgtcttccttcacgagctcctcctctcttcctaaacttcaatctccaggtactttttttctggtctttcattctgttattgtgtttgcgatggcttcaatttcagtttccaattttggtattgtattgttctttgtaatttatcagatgaaaatgaaagatagtcgttgcacaattatacgtttcgattacggaggatgttattcgaagaacggagatgatatacgatggaatccgaaagaagatcaaatctatactttagtgatgaaaggagcattcgaggagtttacttattccatgttggttgatagagtatgcaagaagattagtgtagatgaatccgcgacgatgttgaagttaagttacgttccgttgttagaggatccgaagaggcaaacgtatattttggatgatgaagatgttttaggatatttaatggaaggtgatagtaatcagcggaggaatgttatgcatgtggaagttgttattgagcaagtttcgggagacgatcgaagaagtggaattgcgaatgatgcggtgttggttaatggtgagaatgatttgagtgatggagttgcgtatatggataattatgagatgtttgttgatgatgtacaagtagatgaggaggttgtgaatgttgaatgggaagatgggattggtttgagtttaggtcaagagtttgagagtaagcaggaagttcaagatttagttgagaaagctgagcttctgaactattttgaggctgctataatcaagtcatcacctggattatacgtgttgaaatgtcgtggtggtagtggttgtaaatggtatctacgagttgcgcagggtaagaattcggatcgtttgtctgttagaacgtacaacaagatgcatacgtgctctcggataactactagtacacgaagatgtaaaagagtcgctacaccacaattagttgcatctgttttgcaagagaattttccagaggggttcgatacactaagaccgaaaaacctcatagatttggttcgagaaaaacatggcgttaaggtttcatacgctactgctttgagagggaaaaaacaagctgcaagagatttgcgggctaattcacatactccgtcagattgaagatcaagttaaacctttgcatttttttttatctcatgaaaccaaacgttgaggatttttgttgaaaagagtccagtttaggagtagtctcaaattgtgaactcttgcaaagttcaagagtctaaaaatgtctcatgctttggaatatcaatcttttgctggcatcattaaccttggattcttacaaaaaccaagcaaagaaattgtgtgatgactgacacagcatttatgctttattcacaggtttcgaattcgaattgacacatctattataggtgaatttcagacttcaaacgttctcagtatctaaatacaaaaagctttgattagacccaattacaaaatacaccagaatcattgttcctttgatttttcatattccaaaagcatcgttttcaacactaagtaatatgtaaatatatgatatatcccttcgtttattcttgggcgctccactgtccacacaaacaaggattagccacagcacgagccacatgcaggtagggaatctgaaaaacatcagatttgagtcaaaatcattcacaaggtctatgcgtgttttctatcatcaaatgaatcaaatatcaaactcatcgcgggtgacttactgtggtcagctccacggatatcattcaaaccacgaacattgtcgaggcccccacgaggaggtccaccacccctaccaccaccaccaccgccactgcctccgcctccaccaccaccgccacccatgccaccaccccacttcttattaggcttagagcctttcctgtatgcatctgatttctccatctgtccaataacactcttaggtcagtcaaagcttgagacagcttatggaacctaaatccaagaaacgaaagcagaatcataccgaaaacatggttacaaagaagacttgtattagattaatgatggacaagaagaaatctttgatcgtccttagtctccatattggcctcttcgctttaaccacacctggtacatgttccagtgtttttcaatgtcaaatacagttaatatatgcaccatctatctctgttttcagaatatatctccagctatcaattaaaaccccaaaaaaacaagatacacagatttgaagaagcttctacattccctataagacccaaaaatccctcctaaactccgacgacaaatctctacaatgctagaagaacgtgagacgtgaatatagaacacgaactcggttaatgcgcttattgcatttgtccaaaacgctgttgcttgtccacagtcatacattaatatcgaattgagcttctatgatcacaaactattgaacatgatctcgctttacgctaactttatagaaacaatgtcaccttacaattactcagccataatcaacactctttcactaacttttcccactataaatctcaaaagttttaacttcgtttaagcttagccatttagatattcaaagtctagaaatgtctcctgctatggaatgctcatcgagctttgtattcatatcagttttctgagaatcatataataatggaatgattattgaccttatctaatttccatcttccataaacctataaagtttcccataatggtgacacatcatcccgtataaaacctcaaaaccctctaaacattcatgctcaatccgaattctgacacataaaacctaacttcatagatatactaaagcaaaaattctgtagagacaatgaatatagcattactatagttatgaatctaattgacctaatttaaagattcatgatcaatccaaattcaggaatataaaacctaacttttacatatacatcaaattcacaaattctgtaacaatcaaagcttaatagttatgaatctatgttcaaggaaagaacaattacaggtttgattgaaaaacgaacaatcagatcgaatttaaccaaattgatgccaaaaaagaaatccagaaatcgaaaagaaacagagagagagaagagaatctcatacctccttcgacgtacgccattaaagtagaattctgggttcttcttcttattcgtcaacagcaaatctccagagatcaattaattatcctccaaatagcgattaaggtagattttatatcgtctcttttgactctttgacgtgtttgtgttagaagtttcgcgacgtctacgtggatttgtcacgtggcatactctcattggaaactgtgatccttctgttttcccattctttaaatttctgtttcattacgtgaataaattggcaggaagatgatttgattcgttttataatctaaatggtctggtctacaaaatattctttttttttttttgttaaagggtttgtctatcaaaaaattcaatccaaatgttttaataaatattgttcgtttccatttttggatattcaataaatttttgtttgtttgggtaatttttataaattttcatctctatttaaataattttaaccagaaaatgactaaaatatctatactttaatcaacttttaattttaattttagtcttagctatattaattgaattactgctttaaatatatttacaactaaatatttttcaaattattattttgaacatataaattatttttttgggttttgacaaaaaaatataattttgtggttttgccgaaaaatataagattttgtgtttcttacggaaaatatgatttggcagaaaatataattttacggtattggtggaaaatatgatattgtggttttggcgggaaaacatgattttacagttttggtaaggaaatatgattccgcaattttggtgaaaaaaatgtgattttacggttttgacaaaaacataattcgattttttgattttgatgagaaaagataattccataattttccgtgaaaatcatgattttatagttttggcagaattacggttttagcgaaatttacgacttgaaaggttttgacaaaaactttattctccaatttttctggtcatagtgaaaaacaattccgttatttttccgccaaaatcgtgatttttttgttttcgttgaaatgttattatgcaattttttcgcaaaaaacacaattttgacccaaaaaaattgttcggaaacaagctttttaagattttcgtaaaacgcaattttgcaattttaacggaaaattataatttgtgatttacgatattttggaagaaaattagtgcagatatagaatttttaaatataaaatgagaaattaacaatatttgatatataattataattgggaaaaatgtcatttaaattattagtttaccatttttgttggtttaaagcatgaactctggaccgggtgatttaaatcctcaattttatgttgactttgaatttaatcatgaattcttgttgactaagccaattgaggcacaaatcctctcgtttttacgccattagtcgatctagagacgataattactttgaattcaaagaagaagatgagagaatccgaagaaaaaaagagagaaaaaattgaaaactgattttggtgatttggggtttttgattaaggaatttctaacgatgtgcgttaattgacttagttaacgagagttcgtgattaaattgaaagtcaacataaaattaggaatttaaatcactatgtctagagttcatcctttaaaccaacgaaaatggtaaactgatgatttaaatgacatttttcccaattgtaattgagggaaatttgaatatttgcaatttttggaagaatcatctctatctgactacaccatttaaactcatccaaatttttggatgttttttggatgagtttgacaaatacatcctgatggctcatctcaatgatgtgtttaagtgcactaaacgaacataattttatgtcttcatctagatggtccatttggatgaacaaacgaataacaccttagtagttgaagtttgattactttatgaaaaaggacatcgaatagtttgatctttttttttttggtaaaaagtgaaattttatagcactttatatatttgacataataattagaaaaatttgaaactaactgtaaagctctacaattttttttaaaacaacacaaaatacaaaagtttgctgcttagtggttatggacaagtaacaagtagaattaccgatttcgggctcgtgaagcttggatatttgcgtggttgcagcaaaactgaagaattggaatcctcatcgtagttgccacaagcctaagtatccaagatccgtcttcaaaacctgaagatagaagcgtacagattttccgagaactaatggaaaaaagcataagcaatcgtggattttttacactagctcatcgaattagcgatagcaattagacttattcaccgcatcatttcaacacttggcaaccaagtcaatgcaccaagtaggtaacgttcacaacaagaaccttaaccgaaacaccttaacaacaaaactttaccttaatgtcaccgaaaatgaagcaatgaacgaagacaagcagtcatgaagaagccataaccacaaaaataacataagttgacaaaaaaagaaattattggactataagcaaaaaatttcaacttgtctcaccaaataaacatacaacatttggtaatcagaaattaggatcgatagatttagatcaatatgttttctctttctctaagaggttttgccaaaaaggaaaaacacaaccaattcttaaggttctaaaatttcttgtagacttttgacaaatatacaaacaaacatttgaaaccggactcgtattttgacatgtttcaaatgcatcccatgtcaaaacatttgctctcaaatggtaaactctttgagaaactaagagtaataatatagtttcttcattagtttccctcggacaagattaccaattgaaacaaaaaatgtgattcaaaatataatgatttttaaataattaatattatataatcgaatattaaataataaaaaataaacttaattggtcatatttattttaaagacttaaaaaaaatctgagattccacatagatattcaataatgacatgactcttaaatttctttttggttgacaaaaaaagatactaagatgataacccacttttgtaatctcaattaatatatatgtaggattttcaattaaaaagaaaagaaaaaaatacaattctaattttcaattttcgttgttcaaatgatatataagaattcttactttgaggacttcaatttgtgagctttcgtacgattgtttcttgatctctcttcataatttttcttatttccatatccttttttttacttttcataaatatcttagtatataaatttattaaaatttaaaaatttaaactaacataatggcaaaaaatggtaagtaatgacatgtccaactgcaattcgttgtttaaaatcctatgtggacgcctcaaaagcaaatagcttcaattttttctatagtatagattttttaatatataaagcaattttaaattttggtaatttaattaattatattaaattgcattaaattttatttttgaaatgaatttggttaaatatatattaatatgttaattaattagatttaaatatattaacttatgatgtgtctgttttggattagttgtgtaaaatcctataagggtaatattacataattataacttcttagcttccttttttataagtttaaatttaacatttgttattttaaaatagaaactaattactattttaaaaaatgttaattaattagatgttaaatatgttaattattgatgtgacaactcacgattcgttgttttaaatcccacgtgaacgcttttagaagcaaataatttcaacttttaagagatttgtgtagaatttataaatccaatgttattcaaacatgaattttaaaaattctcatgaaattcagtgttattgaactaatgatttcaaaatccaccttaaaatccattgtaattgaaaacaatttgtggatttgaattttaatgattttggaagatttgagaggatttcaaaaatacagaaatccaaatctcatggtttaaggtgagatttgaatggattttacaaaaatcatatgaattttcctcaaatcatcaaaatcatttaaaaactcaaggaaactcaaatcactttaaattctaatttgaatacacccccttatcttattatatgaagtacagttttgaaagttactaactcacaaaatcatgacacgtgtcaattttaacgattttagatttcgacatgtgttaattttttttttttacttttttctaaaataaaataaaagaatctaaaaaaaagaaacatatttacatatattaatttatatgtttatatctaaaaaaattaacttataattttcgtaaataaaaaaaaaactaacaataagatgtagtgtatagaattaaattatatttattaacgtaaaataaatttttaaattgcattgtaaaatcgagtttgtaagattgaaatttggtttaaggaaatactaaattaatgtgagttactatttaaacttcaaatatcatcaataagatagagtgtatagagagcagatagttaagattactcatgtgtatagaaaaactaatcacatagtgaatggattagcaaactatgcagtttagttaccgcttagtttgcatttatttgatgtttgtgtgatagttgtaagtctcacattgttagaggatacacatgagatgttgtttttacaaagtgttcgactgtacttttatgttatgaataaatcatagaatgctttttgttccatacacattataaaaaagaaagatggagtgtatagaataacaagatagtttattatgataaatatataattaaaatatattgaaaaatcgaatgtatatgattgaaattttattaaatacaaaagttactaaattaaatattagaaaaagtgtgtgaatcactatttactatttaaaatttaaatattattaataaatatttgaataaatttatatcttatacccgtctatttaggtggattttagctagtaatatagatttgatttaaagtaaataaatgaaataagtattttttatataataggggttaaatagaaattctttggaggataggggctgaggattaaaatcggagattgagagagcaatgagaggtgtcggaggtccgttgctgtcaatcggagatcttctcgccgatctcggtgatgaaactggccactccccgcaaaatcatccaaatcctgaagtttcatcaaaatcatactctgatgataccatctctggacccttggatctaacccgactctttcaggtcactttctgatccaaaatttgccttcagtttcattgattcaatggttttttgatcttttaggtgccatgaatcgttatcattgttcatccattatagtgaattgtgcgattattcgaaatcttcgttgtgttatgcaattttatatcaatgcattgttcaaattttatgcatcattgtgttatgagtctgaatcaaggtgtatctgattctcatgagaggaatgttgaaatattcttgtgaatttttgagtgatgcttttgttgaaattttgttctgtaatttcttacttagtacttgtaagcctctattgaaagaattgttgatttgtttcaggagaactatgataaacttaacgatgcgtttgctggttctgatcactcatggacctccctaacattagaggtaactatctcttgttatttttttttagtcaagtctttccatgccatggattttacaaatactgtgaatgaataagacgacatggtttatattgaaagagtttgatgtgttctttttgttttatttctgttccttttgatgaaagtccttggtcttttcatgtcggtacgaaatcaatatatgggattctctagatatgtttttctaagaagagggaaatgcaaatgaaatgtttctgtggctagtaacgtattcgtagattagtttcttacttgcttgcttcccattctatttcagctctgcacttccctagagactgctaacaagttggtccatgccacaaccacaaatgctagattgttgtcagagaaggttgaagaactcgagaaaatagtgaaacgaggagactcagcagtcgcagctgccagaacggttcacgccacggttaaccagaaaggattaccctctacgtgatcagttaggacatataacaaacatcatataatgctttaccaaggtacaaaccaacctgttgggtttctattactaaatctttgcaagtaggctccatgattttgttaaataacttgaagaaccttcatatattgaatcatttaaagatataaatgtataatcttttgacattaatggaagcgcaagcatatatttaattggattattggagaatgtagggtttggttctacggtctgataatatatatctgtgaaattacattgaatgtgactagtgaccatctgattttttgcttgtaatcaacttgtaaactacttaaattgcgtcactgcttgtgtcacttgtgacttgttccaacttctaaaccaaaacctgtcatagaggttagggagataagttctgctgtttgcttacttagtctagacaagactaatcaaagtggtcttaagattgtggggatgattcttagttaaattcttaattttggttttttgttgcgctgtcccttgaataatttgattagatgtgaaccaaatctcaataatgtcttgtctttttctgtttggcacttaggttctgtctgctcagcaaatatgtattttcatataaattatatagtccgtgcacttttattgtattttagattgtcactagttaggttatattagaggttcattagtatgattggtctaacaattcttacttgttttgttttaatttccctgttgatcatattgatacatataaacatggattaatattgttggacaattctcacttgtttttgtttattttcctgatcacagtggtcctgctgcttcttacaaggaccacaggttgttcgacctccctgaaaggggaccatatacttttagatttgacttcgaagatatatattttgttctttcaagtttcaacatttgacttcaaagatttacttataaatatggaactcgtactctcttgggtcctactacactatctatataattctgcattgcccgtttcttcatttttacctgcatgaccatgaattatccttacgaggacttcttggacctcttcttctctacccacactgacccgcttgccacggctgcaagcacctcttcgaatggttatagcttgaatgatcttgacattgattgggactgtgacttccgtgatgtcattgaatccattatgggtgatgaaggagccatgatggaaccggaatcggaagctgttccaatgcttcatgaccaggagggactttgtaactctgcgtcaacgggtttgtctgtggctgatggggttagttttggtgagcctaagactgatgaatcaaagggcttgaggttggttcacttacttgtggctgctgctgatgcgtcaactggtgcgaacaagtctagagagctaactcgggttatacttgcaaggcttaaagatttggtttctcctggtgaccgaactaacatggagaggttagctgctcacttcaccaacggactttcaaagttgctcgaacgagatagtgttctgtgtccccaacaacatcgtgatgatgtctatgatcaggcggatgtgatctcagcgttcgaactgctgcaaaacatgtctccatatgtcaactttggttacctcactgccacacaggctattcttgaagctgtgaagtatgaacgtcgaatccatatagtggattacgatatcaatgaaggcgttcagtgggcttcattgatgcaagccttggtgtctagaaatacaggcccgtcagcccaacatcttagaatcacggctttgtcacgagcaacaaacggtaaaaaatccgtggctgcagtccaagagactgggcggcgtctaactgcgtttgccgattctatcggccagccattttcatatcaacactgtaaacttgacaccaatgcattcagcacatcatctttgaaacttgtaagaggagaagcagtggtaatcaattgtatgttgcatcttcctcggtttagtcaccaaacacccagttcagtcatttcctttttgtcggaagctaaaactctaaacccgaaacttgttacgcttgttcacgaagaagttggtctgatgggaaaccaaggttttctatatcgttttatggacttgctacatcagttctcagccatattcgactctctagaggcaggcctttcaatcgctaacccggcccgtggctttgttgagcgtgtttttatcggtccttgggttgctaattggttgacgcgtatcaccgctaatgatgcagaagtcgagagctttgcttcgtggccacagtggttagagactaatgggttcaaacccttggaagtgagctttaccaaccgttgtcaagcaaaactccttttgagtttgtttaatgatggatttagagtggaagaattgggccaaaacgggctcgttttgggatggaaatctcggcgtcttgtgtcggcctccttttgggcctcgtgccagacgaatcagtaaattctcgtttttgcattctcgagtacattacataagatagtccctttttttccttttttgatataatggtttatgaagacatcaaattatgtgaatatcgaacgtgtaatttctcaaaaatgacagtttagtttaatatgacaagtaattgagccacgacattgcattgtatgttgaatctttaatcttctatataaattaaaatgagaaactcgacaatcgttttacacaagactatgtttgaatatacgtgttaatatgttgtagtaattttggtagcggaccaagccatacttgggtacaagcggaccaaggccatacttgtagccgcaaacaacataaataatatttttggtcaaagtttcatcattggaattggtaactctcttaattgaagtggtggaactagggttccaaccttcctcttttcataaagcttgtttaatttatttattttatctgcttgcagcctataatagtttaagctgcatagaagcggaaacggaaacgctcggaattgctcgaaatcgtctcagaatcgcgattcctaaaatgatgtgtttggaaacgtggaggaaacggacaattcagcttttgaagcgtcggtggttgagatcgacaatgtctctaccgtaaatcaaagatgaaacaagtcaaaaacatctttttgggcttataattgataaaaatacatcaagttatgtttgggccaaatagctcattttgtaaacaaagtaaaagttaaaacctaatctatatatacattattggagattttgtggccaaaagatcatttgcttatgcatttattacaattccctttgcattaaataatttgtgtctgcattaaatatacaaaatgggctaattatcaatattattatctacatatacatttttgcagtcattttagcaaataaatcctcaagttggaacttatttacaaagaatgccattagcattaatcattatcaattaattaatattcctaattattagtatttctttatctaatatttctccatcaattctaattacttttaaaaatgagaaatcttaggactttattaatatgatactttattaaagataaatattatggttatttaaagtttataaaatatttagagtatttaatgaaaaacgtttagaatatatataataaatacaatctataaaatcaaataaccatttcaaaagatttattttaaaattgatttgaattataaatcttttaataaaaatattattagaacaaaaaataataatgtttaattttaccgaactagattagatggtgggacgagtttagaatactatagtatatggatttttataacaattaaataaccatttgaaagaaaaaaataaattactttgaattatatatttttaaattaaagtattattaaaacaaaaataacaaaaaaaaaaatgtttaatttcactgaacattatagatatgtttaattgtaggacgggtttggtcgatagtaatacgagacggtataccacaggtgaaatctattagatatgtttaattttactgaacgagattagatggtatgacgggtttggattgatagtaatacgaaacgatatagtacggatgaaatcctaaatataacaattaaaatacaattatattatattaaacactaaacaaaacaaacaatattaataaaataaatataatttaaatttaaattatatagttataatctagattttaacttaataaactgtatgttattgtttccatattttttaaacagcaaaaatcaaacatattaattgtatactaaaaaaatagatataagagttgtacatttagaaaatacaaagcattaaatcatatatatctttaatctactaaacaaattaaatttttagtttcttaaaaaatcaccgaatggattaaaaccatatgtatttatttcataacggctaaatacatatactactcttacgacattccagagttcttgtatttttcacaaactatatagtctaaaatcaagtaaaataaattgaattttacataatatagtttatcgtgcttttattagatgcactatacattttaaccgtaatcccaactaacatactaagaaaacacatattataaatatatttgattcggatccttcattaatcttttgctaaaagccaaaaacaaataacgacattaaataatccaatatattccgagatttgcttcgtcaatatttttaagggaatgtgacacgtttacgcacttttagactatcttattcctttgggaatgttacactattaggcacttttagaaaatctttttacgtttgaggcactttccaaggttcaggcacttttccttgtttctggaagataaaaagacaattatatcctttccaaattaaaccataaattgtttaaccagttcgattggttttgttttctgtgttatctaataaaacacacgtgtaatacatgttccttctatttcgtgtcggttgagatcttgagatgagaaagagagttatctcacaattacagcaaataaatggatatttttaaaaaataaataatatatagtgtcgctcttcatctctaaaaccaaattcttatggaggatcggttctccgctatcaccaatcttcatggagatcataaacaggtaatttcaaacttcaaattcatttttcaatttaggtttagaattgaatcgaattggagattttgattcaattgattagcaattacagctcaaattaggatttagggattggattaataagctatctaaaattaggattcttcatgatgttgtttggggaaaattgaaattctaaatagaattagaagttttacagaatcatttgatacaattgtatagttattgatgaatctctatgtattgtgtattctaaacgttgttttgctttgtgataatttgcaggcaatatttggagtctatgttggtcatggaggagttaaagcggctgagtttgcagctaagaacttagataagaacattgtagaagaagtagttggtaaaagacacgagttggagatagctgaagcggtggaaacgtagttacttgactacagacgcaacgtttcttaaggaggaaggttttaagggtggttcatcctgtgtcacggctttggttagcgaagggagccttgttgtgtcaaacgccggtgactgtcgtgctgttatgagtgtaggaggtgtagctaaagttttattttctgatcattgtccgtctagagatgatgaacggaaaagaattgaaaccacgggaggatatgttgatacgtttcacgttgtggagaatccagggatccttagttgtgccaagaggaatcggagatgctcaacttaagaaatgggttatagctgaaccagagacaaagatctcgagagttgagcatgaccatgagttcttaatcttggcatcacatggtttatgggataaggtaagtaaccaagaagcagtagacattgctcgtcccttctgcttacgaaccgagaagccattgttgttagcagcttgtaagaagcttgttgatctctcggcttcacgaggctcgtttgatgatatcagtgtgatgttgatcccattgcgccagttcgtatagaaaagagaggcatcttagaagattttagatatatgacattagaatttctatgatttagtccttttgttttacttaattcactcattccaaggttttttcgagtcattttcaaggtttcatcctcaaaggcgaattcaatagaaagggacattgctataagtgtgacaagggatggtcgtttcagatcttatttagctagaggaggccctggatggttactttccagaattgaagaagacaagcgaagatgactttgtggaattttcttttctttacctttggaattttcttttctttacctttggttattgtttggagttttcatgctctgtttttttatggatgtatgctctatactttgttttgacttttcaattaatattataccagacggcaaaaaaaaaattgagtgaacaaagctaaactcaatgtggcttaagttgatcttgtcttgtataaacattgagctttatgatggtgctaagaatttgatcgagttggactccaatgttaatgttgaatgagcaaacaaaaaagtgttaattttatcgagctataaacacattcgcagcaaatcaaagacatacttgtccattaatgaatgtccaagaagtccagtccatatggttatctagtgactcacatggtagtttcatactaatacataagtttatacatgaacaagaaactatccaagcagtctagtccatatggtcatctaatgactcacatgatcgtttcatactaatacataagtttatacgaggaacaataaacgtcaatccaaagtacattatccattatgaccatttatccatatgtgtatagacagttaagtaacaatgatatgtaaccaagtttcttgatgtgcatctcaggtctcaaagtatactctaacactttacaagtagccatccacaagcgaccatttcgtgttgaccatatatagttatacttgtacggatcaattacaaattgaagaatagttatgatttataaggataagcaaaacccaaaattattaaatttaaatggacaccatcaattgaaaaaaagagattgaaaaaatagttatttgagttaatagtcgatggaaactattttgggtacaaaagaggaaaccaacatacaaaaatggtcaccaaacctgcaaaagtacattgttcatatggacaatacaaaatggataccacaaaattggaaatagaagcatataatgaattttttggtgttcaattaatctatattggatcatacacttgaaatggttcatttgatatgaatactttggcattgacgagacgttaaatactcaaaaagccatataatttgacagcaaacttagagacaagttcaagtaaagtacgagaggaaggtaaagagaaacgtgtccaaatatcgttgtccacaaagctctgttcatttaacactgctagatcttctcgattggattttaagttttaaatacaagtcaaagtttgattttaaataccaaacatctcaagatataacataaatgatcacaagttcaagggactaatctcttcaccggtgcgaaggtttaataaatacacaattatcaatagtcaatctcgtttcattatctttaatcatgttacgagaatggtgagtccataacacaatccgttacacaaccgtcaattacaatttcaaatactaatttgtctataacatatccatgataacaagtccacataaatttgttcacataaacgtctcccatgattctttcaaacaaaccatattcagatatgatagaagtcttaaatataatcctgaagtcacaaagctggtcctagatacctggaaagctgaccatcgtattacacataaatttcaaatactttttctctctctcccatgattcttacgcacactaaaaaatctctctctctctctctttcgagagagagagagagagagagagagagagagagagagagagagagagagagagagagagagagagagagagagagagagagagagagagagagagagagagagagtattttagttaagaggatattttagtaaaaaaacatagagaaagtgtctactcctttggaagtgcctaaacacggaaataatttttaaaaagtgtctaagagtgtaatattctttatttttaatatgatttgtctacaaaaaaaaaaaaaaaaacagtaaatatgtttatttcgaatataaatcaaaatattttgtatttttcaatttgttagagataaaacaaaaaattcaccataaatcgaatgccattaattgaaaaatacaaaatactttaacaataaaatataaatgaaaatattaatgttataaatatattccgatattttctcatttaccaaatataataaattaagtatatatccaaaaaaatattcgacatacattccatccaaatattttgtttttgtcatatcttaatatgtaaacaattaatagtataaatgtaaacgttaaattattagcaattatactaaaaccatctatttttgtttaataaatcaaatatatagtactgctctttcttcttcttctcccaccaaaacgagatatttgacataatagagaaataattgttcgagtattagggaaaaatttctctcccaagcacggtatccaaagaggatattatcagtatgtctcccgcttttaaccagatctattttacttttacatcccaaaagtagaaatttttaacggttattacccaaacatgatgaactccgttgagataatgggtgattccgacgtctcctccggcaagtatctcctcttggttacttttgcttccaatcctaacatctgtttcacctctgcgtcctcactacaagaatgcttctcaggtagcttttctcttcactgtgtttaggtgcctgtggtattctcttgtatgttaacctgcttaagcctccacaactttttaaaccttttaaaccttgttgctgctccgagagcatttattgagtcctctgaagatctgtttttacccatcctactaccccacaaccattactatactcaccagcttctagatacttctaagctcattgaagaaaatgagttaaccctcatgggtagactaaccaacccgcctgccgaaagactttggtctttattcctctttcttgctaatagatggaatctgagagggaaagccattggctcagatcttggaaaatgttgctttcagtttcgttttgactatgaagaagatttctagaaggtccttgacaatagaccctaccactatgatcaatggatggtcattttacagcgatgggagccaataatttctgactctttcccatcatgattcctttctggatagagcttcggggcctccctaaacactattggcagtatgagatgctgaattctatcggcgaagaacttggcaaaattatggatgtggacatcagcccctctgctgcaaaacttcgtgttctcattaatggtctggaaccattaacaaaagacactgtcgttgaattccagaatggaaatgaggctctggtaaccttggagtataaaaaccttaaaaaccactgtcaccattgcctaagactgtcccatgaaaccaaaaactgccctggagtactagcctcaaaagggaaacctctgttttccccccaggcggttagttctactgactcaaaaggagtatccagaaattactacacgtctaaggataacttcactgcccctagaaacgtcccattgatctctgcaagttcatgattatctcaggaagctacaaataatttgaagaggaacagggaaaacttaagtactggagggccttaccagtctgcagagagatctcagaggcatagggagactagaggatactttgatcgtccccgtcagtatgacagaccagtgcatagaactcaaacaccatcgagatcaggatcccacagggatagggctcatacacctgaaaatttccaatggagagaaaaatctctacgtgagaacagaacagtccctgcagtttctgacatttcccggccaaggagacctcctcttgaaagatctcctgtgcccctggagatccaaagtcagctcccagaccctttagggagacaagaatcccaggaagtcttcctaccaacccctgcaatcccctcaaaagatcagatacttggtgaactaagagatgttacagttcaatacatcacttgtgcagacccaactgagagtgctgttagaagacaaagagttctacagggtgaagcaaataaccttatgagtaccaaggctgataaaattattgaagcagttgtagcctctgcacctgcaaccccttcttcttcaacatcccctggctcaaagagtcccacttcacctgtggttactctaatcaaagatttggttaaacaaccaaaaagagggcgtgggaggccacctctttcaaaacaaatgggtaaaccacccatcaacctgaagggagcaaagtcccagaaaagaaactttgtgaaaggttcccccaaaaagccttatgttgccatccccaagtctaaaaatgctgcctccattgtaggccctagtaatcctaaagttggactagtctgtccaccctctgatacaagtcattctaacaagtatggctcatcaattagcagtaaaagaaatgcaccaaatatcgatcttatacctgcttcaaggaaaaccaaggtggattttcagaatccatctctccctcttccttgagaattgtgagatggaactgttgtgggttggggaaccccaggacttaactccactagaactggaccctggtttatcagtggtgattttaacgacatcatctgcaattctgaaaagactggaggcccggaccgctctaaggggtctttcactgacctgcattcctttatgtcttcatgcgatctttatgacttaaaacatacaggaaacttcttatcttggagagggaaaagacattctcactatgttcgatgtagactggatagagcaatggcaaatagtgattggataattgattatccttcaggccgcagtgaatacctaaggtttgaaggatctgatcatcgccctctggttacctcttttgatcttgtgcaaggaaaacaaaccatattcagatatgatagaagtcttaaatataatcctgaagtcacaaagctggtcctagatacctggaaagcaaaaccgcatgcgaagattgaccatcgtattcatctctgcagaactgcaattatcaagtggagcaaagaccatcatatcaacaaccaaaaagagattacttctctaagggaacaattggagaatgcaatgaatgatgtccacgttactattgaagctctaaaccaacaacttctagtgtcttacaagaaagaagaagaattctggaaacaaagaagtagacaattctggttggctcttgggacaagaattcaggcttcttccatgctgccaccaaaggcagaagagctattaataatatttcagtcttggaatcctcaacacggaaaagtgtttatgaggaagaggaaatcactaaagttatctcataatattttcaagacatttttacctcacaagctagcgagagaacaaatattgctctggaggctctctcaccttgtatcacgcctgatatgaatgattctcttacttgcttacctactgctctggaaatcaaacaggcttgtttttcaattcaccctgacaaagcaccaagccctgatgggttctcagcaagcttctttcaaaccaactggaatacgataagtgatgaggtaacttctgaaatccaagccttctttatctcaggcctattaccacaaaagataaaccacacccatgtcagacttatcccaaaaatccttgtcccacaaaaggtttctaattaccgtcccatagctctatgttctgtctattacaaaattattgtgaaacttttagctaagagactcaaaccggttctccacaagtgcatttctgaaaaccaatcggcctttgtcccccaacgtgctatttctgataatgtcctaataacacatgaagctcttcactatctaaaacactcaggtgcaacaaagaagtgtcattggaagttaaaacggacatgagtaaagcctatgatagactagaatgagacttcattaaagcaactttagagagaatgggttttcaccaggattttagagggtggctgatgcaatgcattactacagtctcctattctttcctacttaatggccaagcaaaaggattagttttacctgagaggggtgtccgacaaggtgaccctctttcaccctatcttttcatcatctgcagcgaagtcttgtcagggttaggtttgaaagcacaggcaaatggaagccttcctgggttaagagtagctattggcagtcctagactcaaccacctcctctttgtagacgataccatgttcttctgccggatagacaacaagagctgtctgaaacttaaagcaatcctccacaagtatgaactcgcctctggcaagcaaataaatcagtcaaaatcttcaatcactttttcagttaaaaccccattagactgccgagaaagagtcaagagaacattggctatacataaggagggtggttaaggaaagtatttaggacttcctcaactttttggtagagagaaaaaagatctgtttacctctattgttgaccggattaaacaacgagtcctgagttggtcctccagattcttatcttctgctggcaaactcacgatgctcaagtccgtcttggccaccatgcctacctacactatgtcttgcttccaacttcctacttcactttgcaaacgcattcaatccgcattaaccagattctggtcggatgcaaatcctgaaaaaaaaagatgagcaggatcttttggcaacgaatgacaaaatcttttaagtctggtggcttaggtttcagggatatacagacttttaacaaggctttattggccaagctgagttggagaatactcactaacccttcatgtctgttgagcaagattcttcttgggaaatactgcaaaaatcaatcccttctagactgccaaacaccaaaatcctcttcccatggccggagaggtgtatgtttgggcaaggaaattttaaaactccagctaggacgccttattggctcaggaattgaaactcctctttggcgaactccatggctatctctatctgccccgaaagctgtgatgggaccacttacagaagcatcacacaatcttttggtgtcggatttgatcattcctcgcactaggatctggaatacagaactcatcagagcgatcatccccgcttatgaaaacgacattcttctgctcaaaccaagctcgcttggtgctgtggattcctgggcttggctacccacaagttcagaagtttacactgctaagtccggttactttgaggcattaaagacatttactactcccgttatccctgatgacattattacaacagaagatttcaactggagatcgaacatatgggcactcaaaacatccccaaaaacaaaacttctcttacggaaggcgggatagaatgctttacttgtagggacaaacctcttgaatcgatatatcacggatagtggtaagtgtccacggtgtgacgaagatgaatcggttctccacctcctcttccaatgtatgtttgcccaaaatgtttggtctattgcccctcttaaagctgatctagattgtgtcggaatcacctctgtcttgaatggtatctctacagccaacaagcttacttgtctcctacccactggacttggtgctggccctattttctcttggatcttctggtcaatctggacttcatgcaaccaaatcatattcaacaagaagaggattacagaagaagaagttctgcaaattgctattgtgcgggcaaaggaatgacattcggctcaaccctccattccccattctcctgctaaccacaattatcccccaaaccttaactcgcgtcatgtggattttacgtgcttcaccgatgcttcctggaaagctaatggtacagccggattcggatggatctctcttgatgacactggtcatagactttttgatggatctacctctgctgcgaacatgggctcccctctgattgccgaatgaattgcaactctcatagccatggaagttgccatcgcgtcgggtctcaaatccatctctttcgcttctgactttctcacctttgtcaaagcaatcaacaagaagctccaagttaaggagcttcacgggatcatcttcgatatcctttctctattagcttttttctttgtttgttcctttaatttcattccccgtacccaaaatcttcgagctgatgctctggctaaagaggccttaagtctctgctttgtaccctaatttctttcgtaatgaaattataatttgcccaaaaaaaaaagacataatagacaaatatactctcttttctactaaaacacgtaaaactaatggctcttgaagactaatggttacgtcaccatagaggaacacgggaagtgtatcgatggcagtctggtctagacctgagtcatgttgggtacaaatcaaaggtcccacatcgaaagtttagaaaaatagtttctaatatataaggcaagttcaactccaactagtataaggccttggaaagaagtccaataacaaatccttgcgggattgagcatgtaagctcaaagaggacaatgtcatactaaatggaagttggaatggtcttagaaaagctattaaatggtatcagagcctaggttgaaaaaatggacctagggcttaggctatgatcagtgtgggagaatttatcaaacatgacacgataagaaggtgcctcaagaatttcacgaataagaaggtgccaagttaagggtgctaaagtttcgttgaagaggagacccaagctcgtggtctttggtttgaaggggagattgtttggtacaaagtaaagttctcatatcggaagtttagaaaaagagtttcttatatataatccaagtccaactccaactcgtatgaggccttgggaaggagcccaataacaaatccttgcatgcttgagcatgtaagcccaaaaaggacaatatcatactaaatggaagttggaatgggcttagaaagcccattaagtcatggaggaagaagaggtgatggagctgaggtgaggatgaagaaaaggggaacgggaaataaagtcgaagagaaattttgatatcaaatagaggataccgtggaagacaatatgataagagcaagaacaaagataactaaacataaaacagagactgtagagcttgaaaatggatctctctggttcataagtgttattgttgttgcagatgaagattttgctttctaagatgtaagagagaaatataagcagaacgatgaacattaaattcccatgtttctcttgctctctctgtttggttaaaaacagttcaactgtgtggctagagatgcagagaagctaactttagtcatcagcaaagattatccaaaaaacatcttaacataaaacatatgaatagccatgagattgtttgctgttacttagacccaaaaaaagatgcaatagatactaactaattagccgttccaaaagaagataaacctgaaagtcataaaggttccaacacaaaaccaaaaagaaaaacataggcaaatgcatctctaaatagataaagactaaacatatttagccatcaaagatctcgcttcatgcacaacgtcaatcttctcccacatcgttttgagctcatcagcttgcacggacttcaccttttcttctatcctcttcctcttcttcatcggtaccaacctccaattcttcttccatgtctcttcatcaacccccaaatccaattccttaaacgcaccaccaacaaacgacctctcgaaccaatcactttcttcatcaacttaagcttcttcctctttggcttcacaagagtagcgactcattctcagtctccaactcttaatctgaattttgatggacaacagcagtttctggagtcttcttaccaaaatcgtcttcctcctcctcctcagatgaagaacctgagttttcttcttcgtcgctagaagactccggcggtgtaattttaacctgttttcgttgattcttcgaagttgatgcgacgacttccaacggcttcttcgccagagatgcgaattcgatggagtaaccaaaggctgcgattgcttattcttcaccatcggaattattgaaacaagagataaatttgaaagcttttagaattttagggtttgttatgagaagttggagctgtagaatctgtcgatttaaattaaaaattgagaagttggtcggttttaagattttgcatcgaaaatatatatcgcaattggttttttccttaattacaattatcataaatcacattatttttgactaattttatgggatttatggtgtatatctaaaatttaaaaactaaatgctaataaatctgatttggtaactgaatttccgaatggtatttttagtatattaaaaaaattaaaactaactactaactaatctagtaatatcttcttttaattgtttaatgagattaatgattcagttaatcaataattaataatcgagtaatatcttctttccttaattacaattatcataaatcacattaattgttttgactaattttacggggtttatagtgtacatctaaaattcaaaaactaaatgctaataattccgattttggtaagtgaatttccgtttggtatttcagtctattaaaaatttaaaactaaatgctaactaatcgagtaatattttctttaattggttaatgagatcaaccatatatatggaaaatatactcaaacaggaaaatacaatatcatatatcaagattttaagaaattatctcaagattgcattaatctcacaactagagatgtattggtgtgagcaaatgtataatactactaaatcatgaccctcacatacgtgcgggatttcatattttaagaaatatgttgtaataattttttgttaaagatatgattattttgttgtttttgtgatatatattgtatttaataacttataatgtacacagattagtataaaatgttatttatgtttgcttacgacacaatagcaaccataagtcaatttttggagtttgaaactgaagagtagaatagaaaaaatattagatcaaaatataatataaattagattgatataaaataaatattatatagttatagtatctataacctaaactcagattagttggttgaaatatttgaaataataatatttttgtagtattttaaaatttgtaataattattttgatctcggtccgactgtttgattgttacaaattttaaaatactactttgccttttgtattttgaccgtttgaccgtttgaattcaaatctattttctgaatattagtctaattttactttgctttttgtataatttatggtgttgttagtattgtttgtaacgacaacttttttactctgtcaattgtttaactgttgtgctctgttttgtggttttgtttcatttttagcttaatatatatgtacttgttcgtagtttattattactgtttaaatgcatagaaggtatgaatttttcttttctagatatataaggaaatcgctagtatgtctcaaggtcaagatcctctaaatattgatgagtcatctactgtggatgataaagtacctatgtggatctatgtggaaaagattgagaagttgggaggagaaggatcatagagatttgaatgcaaaatttgcaataatttatacgttggatctcatagatagtagagttatgactcatttgttacaagagggagttaagggaattaaaggatgcttgaaagtcactcgtcaacaaaaaactcacctaagaaagtttgttgattgatgaatcgaaatatagccgttacaccaaaactaggcgcaaagaacgaatgtaagaagaggaaaaaatgagcagctccctaagaagtttcattgctttcgtcatcaagaaaatcatgtagttcttctcttgattatgatatgagctataaagttcctaacacaagcgagtctgatccaaagaaaagacaaggaaggggtcctttagataaagcatttcagatagaagttagggagcaatgcataaatctatccatcggggtcaaaatacttttcttctaacgcataaattttattagaaccataaaaacctcaacaaaaatagacatcttaaagatgccctcgatgctcactcataatttgaaattgttgtaccaccaattcatttataatagtgttaagtaaatattttagaattaaaaaaattagatactcacttaaaagcacatctatcaatacagttatgcaaggtcgtcttcctgaaagtcattgcagagaaacatctttcgacggttgctgtcgcaataggaagaatcaaagatagcttcatagccgttataccaaaggatgtgaaaaatgttttcttatctccaccatcacacaagtaagatcacctagactcttttaatttgtaatctttaatctttttgcataatatcaaaatagatgtcaagatgatgagcaagagatttatgctccataataccaaagttgtatggataaaactcagccaatctcatgagcaaacacttatcaaactgacaaaacgaatcaattggactcaagggtgatgtgcaaataagttgttcagaatttacctcatcaaactggtcattaaactcttagagttgcatatctaagactgtgtagaaacaatccatcttatagtgatgcgagttggttatggccgtccttttccttggtctttttggatcaacaaattcttcctccattatgagcattccaatgtcattttcctcacaaaaagaactaacttcagccataaaatcatcctgtccatcatctctaagcttttgcaattgacttttaatggattctaccaatgaaattgcattcaagatatcttggtttttccttttgtaaagcctttgataagttattagtaagacccaaaataaacagtatcaactatagatagaaaacaaagttaaaagtgtgataatacttgagaataccatacgcttgttgtcttttggtggagtctatgtgtttatcttgaatatactcgagaactttaactacagacgaaaacagctcaacaagtcgcagttaagtcttataatgtgaaccccaacaagtatttccaagtctttgaagataaatttattgattcgacccagttttagtctttatttcaccattgctaatcccttcttccactttttgccgatagatttctcggatcctatatgttcttttgcaaaaatctccaaccacattcaataaaagagaaatcatgtcaaaaaattctccaacttcttttttctaactgtcatgacaactaactgaagttgatgagcaaagcaatgaacgtaatatgcagaactatttcttcaaaattagtgacattagaccattgaattctcccttcatgttactagctccatcgtacccttgtcctctcaccttcttcaaactcaaaccatatttagcaaagaaataatcaatagcatactttagagataaagaagttgtatccttaacgtgaataatgccaacaaacctttctttgactttgctcattatctgatagatcagcagattcatctaccagcatgttgatccaaccctttattccaaccacaaaaactagttgataaaaagctatcacttccaccttgattttgagcttgatctctgaacaagtaaaaatacaagcaaaaattaattttctttctccacaatatattccacctagtcatacttataaaactattttagattaaaacgtcgtaacacccctccaattgctatttgcttaaaattgtgtaagaattttttattaatcagattaaatatttataatctctaaagtcaaataacacattaatacacaacacacacatttaaattataaagctatgttgtataatttgtaccgtattgatgaaacagggagaaaatagccaattatggacagctactctcatcatgcgtagtcaccaagtcatgattcatgaatcctttttcttattaaccaaaatcactatatgattccttactggtacgagactactaagagtctactactactagtactaatttactaaacgattaacatcggcaagaattagtaacaaaactaaaatcaaacacaagttctttaaatattagattgaattagttaatgaaatataatatacaaaataatataaaagtatcttaaattccaatgttaagtctttgttgagtctaatatctcacaagtcacgaactcacgattgaagattgaaagaaaaaaaaaacaaggaagaagaagctgaaacttttttaaataacaaaaaaatgttaaaataataggatagtttatcttaatgggcttaattatggtatatttacttttaaaacaaattttattgggcttaattctatatataagtacaatgttattgatgggcttaaatattataagtcttttaacgtaaacttttttagatgggcttaaatattataagtcttttaacgtaatctttttataagagtcaatactcttattggattaaaatcaatatatttaataagacttcagctatttttttaaatttccaccagcgtcaattgacctctatgactgtatacccctccactctagagcaatgtgatggcgagatagctagaatgttctacacagttggtttgtcttataacgttgcgagaatccttactatcgtaactcatttgtacgtgcatcacaaattctaggatatgttcctggttataattctctgagcactacccttcttcaaaaagaaagaaaaaacattgacatgcatttgcatcctttgaagaacacaaggaagcaaaaaggagttagtatatgtactgatggttggtcggatccacaaggaagaccaatatttaacttgattgctgcaaatgagagtggtcatatgatatgttaaggtcgatcaatagtcaaggtgaaacaaaaaacaatgaaatgattgcagatttgatcataggatgcataaaggaggttgaacatgagaatgtggttcaggtagtcaccaataatgcttcaaattatgtaaaatccggtgcacttatttcagccaagttttctactatcttttggacaccatgtgtggttcatactttgaaccttgcgttgaagaacacatgtgcaccatcattgagcacaagaaacaatgaagttgtatataaagcttgttattggataaagtttataagtgaaaatgtgacgtggatcaagaatagcattatgaactatggagtgaggcttgtaatgtttactgaacattgtgatcttaagctccttacaatatcttctagaaggtttgtaatatcttttgtttagtttaaatcttccgtacattgttaaatataaagtctactgaattttacttccacaggtttgcctctacagttgtgatgttgaaacaattcaaaaaaaaaagctggactacaacaaatgataataagtcttaaatgggatgattataaagaagatggtgtggatagagaatctgcagtttagaagaagatattagatgagctgttttgggatgagcttgaatatgctttatctttcacttttccatctatagtgtgattagagctgtagatattgataaccttctcttcatctagtgtatgaatggtgggaaattatgattcaagatgtaaagaagtatatctttaaaaaggagagaaacaactcgtcatcttgttatatattgatctacttaaaatacaccattaacacaaaaccaaaaacacttccttttgttctatcattctccttttaactccaaccacaaaactaggctatgaattcatatccatatagtaatgcatcaagctttgtggaactcttaactagtcaacaagatagctacactgaagaaaccaatatgtatgatgatgttcctatcatgacactagcacacaacatctacgacaacgactatggggttaagttcacctttgcgcatgcttggagagagcttcgccatgattagaaattgtgttcagctccctctactatagtaaggggaatgtcaaaaagaaggaagtgtgacgaggctgcagaatgttcaaacccccaaccactttctcatggaattgacgaagcaatgcatcgtcctattggtgtttacctgcaaagacgaaaaaagactataagcaagccaacaactactgaagacgaagagaaggcttcccagtctatgtgggagataaagaagaaggataacgaaatgaaagaggggttatctaagaacaagatgctggacagtctcctcttgaaaacagagccactttttgatacgaatgtgctctctatgacaaacaaataactcacatgtttttaaacacaaaatttaatttgtgtttctgttgcatttcaatttatgtctttctgtttcaagttatgtcttttatttgtatgaacttgtgtgtatgaatgaattagtgtttgtatgaatttttgtttgtttaattttggcaagacaaaatctgttaattggtttggtctattgaatgcttttcttgtttgtttttcaggtttggtttctctgttatctttcaaaggaaaaatacaaagcaagtatcataaaacttgtgtttgtttaattttggagagcatcggaaccaaagccaaagtgaaagtggcaatcttgtttcactttcgtctccgaattgttctatttctttctatgaatgcttgttgtgtgtatggttttttgtagtgaaaaacatctaaatacaaaaaaaaattaaatttttccccttaagaaccatacgagcgcttttttctttagatactcttcgggtacaaatggttgactaaaattaagaagttgaatgagcattcatccaaattgtttagcatttgaaatgaataagtttgaaaatgaagtaattataaagaattatttttttagcttgttcatctcctatttcacagaggaatgagatgtatattattcaaaaacattcaactagaagttttcaattttttcatccatatgcaaccatttgcatcctttatttgttcttaacttagaaacaggaaatatttaatagaaattattgttaaggtccaaggttaatggttcttaactattggggatgctctaaggaagaccaatatttattatttgcataaaacaattgattaagccaattactcttggtaatctggttctatttcttcctacggtttggtcatttggtttagagccaattatctcatcataagaattcttatataatattctttgaaaattaaaaaatatgacttttctgctttcataaattttagaaatacccaatagattaatattgtaatatagtaattttaaaactgaaatgtgtctaaaatttaaaataggatcaattggaagaagttgttactaaaattcaaattatgatattactaataacatattttgtaaaaacaaaatacaatattgatacatttgtatttaacttaaattttattcatcttaaatatcaataaatataaataattgaaacaaccggacccgttttttttattttaaaaaacataattaagtattctcataaatacttaattaaatcaaccaataaagcaacaattaaaccgcaagtcaaaaatactattttatgaataaataaataattcaaccaacaaaaccaagaataactaacaatcctaacacaatcctaaccggttccaataaccaaaacactaaaataaacaaatgagttcgtagatcatcctctcttccttgctatgattccacgatcacactttatctttacctgcaccaaaaagaaagagatgcgtaagtattatcataaatacttagtgaggcgatcctcccatctacgagctatacacacaagcaaataaaaggggtataaccacaaacataaacaaaccagtcactgaacacttcacccaaaaacacattcaccacatctacatatcatcacacaaaacaaatcatacaacccaatcgctcagataagctcatggtcacgcactcaccttaacaaattgattctaacaacaattaaacccaggagagactctccttgcgtctgaaacagtccagaaacgtcctacaacaagtcacaaccaaaagcaaccttgaagcaaactggacatgaaaaacagaaacaaacagtctcaaagacgaaaccctaaaatacaaaccaaccgttaactattaaatccctccggtgaaacgttagtcttagacatcacaaagcttcccacaaaaactcgtgccgatcggaaaccagatgagactacgatctcagttaaaatcctcgctggtcctaattcgcgtatgagaaaacgtgtctcacaaaactttgaccacgatttgatatgtcgaaaccgtttcctcccaaaccctaacgattctggttcttttccttctctctctttttctcctttataaaatgaaaagtggctaactaaagccctaattttgagttttcttcttttataggcacactctagggtttccaattaacccaaccgattaaaccggacgatttaaatacaaatcctaaccgattttccggttcacgggctttacaataattatttatcgaatgaacttttaaatatacttgaaatgttttaggtcaacgccataagaggagagaaaattttctaatacccaaaaagttaaataactattacagatttaagtagtcttagttaatacttatgatcggtcttgaaagtaggaagcatgtgtgatttcttctatatgcttggtaatctataaatattcaataaatatataaatacaacaacattgttaactttttttaatatatttattgttttattaatcttcaattaataaatatattcagtaaaaaaataagacacatataaaaaaaattgatgtgaatgctaaaatgatagagcaatgaaaaatggtatgccacttctgcatctttggagtcgagaggactgaagtgaaacgcacaaatataaaccactaaaacaaggtcatataacatgtatccatcctttcacatacaacgaggaaggtgatggtgataatagtatggaagaagacattgatatatccatatgactaattggtgtgcatctattgaagattaggatctggttatggagcttttgcctccgaaggtctgaattttattatttcagaagcaaataaagtgttagctttcaaatttgagtctaacaagctcacatcgaatatggcgtcttttcttccggtgaccacagagatagaatcgatacaagatgttatggatcttcaagatcttaaggtcatgatcgttaaagcttacaatacttctttaattgaattatgaagtccattcaaattagtgtgcatgtatagcttttgaagaatgatatctctgtattttacatgtttttagcatacatttcctttgcatttagattagttttgttcttgtgcattcatagtcatgttgcgttgttttttgttattttgataatcatgtattagcatagctttgagcatattttggaacaagagctttgagcatattttggaaccaaaggatgatggaggagaactagctcgatgaaaagaccaaagcaagacggatagagtggagctcgactaaggaactcgacatcaagtcgagcaaggaagaaagaagatcaaccgcgaagagttactccagctcgaccgaaaaacttgataacacgtccagcccatgttaagccgacttaatattttgtcgttttgtgttttagggacaccttagatcattgaccaaaaaagacttttatcctgtggacaataacttatctacaatttctaatccaaattcatgtggatctattgagtatttgcatttgtttccttcagtaatcttgtttatctctgtctaagctacaacatacttgagttttaacgactttttggtttttccatgttttatgggtttgtgttcttgagtatgtctgagtagttttagagttcttgaggattggattgagatttttagtggaatttttagtttctttaggtggttaaatagttatttgcatggtttccctttttgattaatagtccttcaagttatttcttttctgatcaattggaagttgagcctagacatttccatgcccacaaagtgtttcatgaaatctttgaaccaactaatttcaaagatttacattcctagcccaaaagattggatgttgaggatgtttattggctttaataggttggatcttaatgcttgtttagtaaaattttgtcaatgagagttgaatctgaaattttgtcaatgagagttgatttctatcatgagagtggattaatctgttaatgaacatgtcgtctagggatagtttgattgatttttttagccgtccaaatatattaaggattctaccataatcaataaccccatccttaggacttttatatgaatttcaattgttatcttcatactcgatttctagctcgacttatttgcttcactttattgcttttgcatcgctttttaccattgctaagttgtttagtttccttgttcaagcttatgcatgatagctcttggtatgtagtttccttgtttctttgcatgatcactttaggttgttagctactaaaaaatctatctgatcacatcttgtctcttaacatctcacctaattggattgacacctcaagtgatataaagactatgatagctatctaggggaattgaactgagtaaaatcatagtatcaatttggcgttgttgccgtttgggtgtttgttttttacattcaagattttggcatcattgagatcaagttctatttacattatcttggatactaatttctatttttatctacttgtctttgttgtgcaggtacaagctcgaccaaagagctcgacttctgatcgagtaagctcatcgttcttgcatgcacatttgatccaaaggatcagacaatctcatttgctacaacaacaacattaaccagttacctagcgaattgaaagatcaaagagccaataccattacagatcaccaggatcaagtagagatggcatatgctcataatgaaaatgagttgcaaaggaatattggtgatggtgatacaccaaagaatcatcaccaacgcactggaattgttccacctcatgtccaaaataacaattttgagatcaaaagtggattgatctcaatgattcaaggaaacaaatttcatggtttgccaatagaggatccactcaatcatttggatagttttgacaggctctacagcttaaccaagataaatggagtaagtgaggataacttcaagctggactgtttcctttctctctaggggacaaagcccacctttgagagaagactcttccacctcatttcattggttcttgggatgacaacaagaaagccttcctagccaagttcttctcaaattcaagaacagcgagactgataaatgaaatagcaggcgtccaccagaagaactttgaatcctgtcgtgaggcatgacagagatttaaatgcatcactactcagtgtccataccatggattcaagaaggcatcattactcagcaccctttacagaggagctcttccaaagatcaaaatcttgtttgacacaacctttaatgggaatttcctgaataaggaagttgaagaggttgggaattagtagagaatctggctcaatcagatgggaactataatgaggattttgagaagactgtaagaagctcgagaggttctgatgagaagccttggaaggagatcaatgctttgaatgataagttggagaagttgtatctaattcgacaaaagcaagttcattacatcaccaaggaagagcattatcaaatgtagaaggggtgaatagtcacattgaggatgtcagctataatatagaatcagggcggttacaataagggttacaataaggattacaacaactatattattgttatgtatgaaataatacgaaatgagcacatgtattttaatattatacatatatcatctcaggaaagaggcatgcgctcctataaacataaatatttcaagccttacatttatctattatttttatatttggtcaatttcttactctattatatatttatactagtcagaaataaatgaatatccaaaaactacaatctcaacccaaaagtacctttgttgatctaatcattgattttagttggatgatctacgaaagagaatattatttcattatgataagaaaagaaaaataggattgttttatgaaaaatgaaaggagagaagttaaaatccctaattttatgttttgaagtgaaaattgaactgttaaattattttcctatgaatactagaaaatgactcaagcattgtctaggttaagtattatattatgatttaattacatttttgttttcaaattttcgaacttatattctacttttattataactagaaattgagagtgattctttcaccaaaatcgaagctctgacgggaaagttgaagtcggttcacttttgactattcatctgacacgtgtttctacccacatttgacgacactagtttcataatcgagtcaaaatccaatttcttctcctgtgagcgagattagattctagatgaacctcaatggcttaaaactttctctaatcttttattgggcttttaggccatgtgtaattgtctttttttttaatacaatacttttcttgtgaaaaagaaaaaaacacatcaaaatacaaacagtaaaaagttcatatcagggcttaagcctcactagtttaaacgcaacgggtgcagttacggttgcgggagtttacggaaacgtgcggttgcggttttaagggttctggagcgttttgaacaactggtttagcgttttaatatgagtcaaattaccctaatgactactctctcaaataaagagattgttatagcacttagggatcgaattctacaaagttctcagatcacacaatagactaacagttttaaattaaactaaatataaaatattataaaataaaagacaagaaagcaataaaagagattgaagattcagatgattaatacgtcgggtttaggaaaattctcaggaaatatcagaataggaaatttagcagtaaattaagattattatcgaactattctagaactcaaatcactattatagagtaaccggtgatgtgccgtgttactcattatgcttaatagtattgatcccaactctcttgtaaatccctagacctaaacaagcattataatcaggtttgataagttcacataagtatctaaagttctaaaccgatgttagtccgcatctaattaaatactaggctcatctaagatagttctgataacaggtacctatggtaggtatacttattatcctaaaatcaagttctagttaattactctagaaatagcattaagaacaatcaaagatgaagaattctaaatatattatcctaacagggttttcgatttactaattcatccaaatccctaattgataatccctaaacccaacagaagaactactcagacatgatcataaaaaacaaaacatctttaaagtagaaatcaatgtaagaaacaataagagaatatagtttagaaagattctctcagaaggagctccacagggttttggctcccaaaaacaaaagagaaaaggagattagtctcttcaaccttaggtctaaacaatgaccttaaaatctatatatgtttgaaaacgtgtcggtattctttaaaaataagggaaagttcttggccaaatttggaaatcttcataacttcaattaaacgcgtctttgaactgccgtcagatattggtgtcgatcgacacctacgcggtttgtggtctccggatttcttttggagcataaaatctttgttttgctccagaatgctctattatctccaaatacgtaccaaacttgtaaaaacctgaaaaggactatagaagactctagaaataacaaaaggactctaaaactatacctaaattatagttaaaagcagtgacaatcgaggtatatcacgtttgaaaatgtgtgcgtttggggaagttttatgactggtaaaccagcgagtgcggttgcatttaaataaaaaatgatcaaattaaatataacatattactataaaaggtataaaacaccattatattattatgataatattagaaaaattaaacattcttaataaataaaaccataaataaagtactaaataattattcaaaaataaataaattttgttattagatgcttagtactttattcaatcaaactttagcctctagaatttccagcttgttttttagttttatcaattcttacaagaaatgagttatctctgtctaaccaaacgagtttcaacttgagaaaacaaattgaaacatgtattcaatcaaaaaggtcaaaacaatacaaaataaaaaacgataacatgaaaaatattcaaagagttacacgagctcacgaatgaataaaaagatagatgatacttatgtttgattcttgattatcatcagttagggtggaagacataatttgaataagattacagaatattaattagagctttctagaaacgtgatacaaggatgaaagaaatatatttacaggattatatatatcatattttaattacaaataatatttctttctttttttaatccaattgttatcgtatgcaaaagcaaaagcttgtcgaaaggagcttttgaattctagcgacttcgagggatccaaagttatattcaacggtttgtatgattgttgtcaatcactaacaaccgctacaatccacaaacgctgcgtttgcaggtggtagcgggagaactagtcaaaagaaataataatataaaattaagagaatgggaggttctaagatgaatagggttcttaacaaataataaaaaataaaatatggaaaaaagaagaaaacgaatgaaaaaagtctcttaaataagagaatgaagaggggttcttaatactcaactaaacacctaagccacatgtctttcatacattggttcactttttctaaattaaaaatttgattatataataatattacaataaaataattatttttgtgtctgttaagagtccttttattagggctggacacaaggcaagtacttgccaaattgaaggtacttgtgacccgacttgccttgtacaagtaattggattattggcttgttacttggctttttaaatcgagtacttggtctagcaagtacttgtctaaattttgattacttgcaagttacttgatccgctttgttacttgccaaaattaaatacttttacttgaacgtaaaatatttggaagagaaaaaacctatttcatacatctatactattaattgggaagcattgtgtgaactacaacattgtaagggtaattaaaaactaagtaaataatttttttacatgggtaattttgtaaattaacaattactccaactaaataaatatcttgaattttgcttaaaaaaaatgaattaaatcaataaattaatatctacacaatattttcggaaatcatttaaaaacatttccataacatatcaggctattttaatttgaattgtatatatgtaaacttatttattttggtaatatgttattagataattcggaaacttcaatctaatttaataacaaattatcatttagtttagattttatacattttccttaacaaaactatgttaattgtttctaattagtacacataaaatttaaactatgatttagcatattcaaaagagaatttttgaattttagatttgtaattatctataaaatggttcaaatatatatttaacattttaattagaatttaaatgatataaacgtttaaagtatctatactattaattgggaatcattgaaaataaacaaccttatgaaggataaaatattacatagaatgccattgattgttagtgtttttaattaaattcaattaaggatataaataatagtaatcacaaaattaatatatttaaatataaaaattggtaatattcttttaagtaattattagtttcccaaaattaaactcactttctctttcctattaattatgggcgaaaaaataaaatttatttcttaaaatttgttaaccaataaaaattaaaaaacttagatttgatatcaaattatacaatattattaaactaacattttggaagttaagttttattttaaaattttaaaaaatcataaaacttgcttgatatcatgaataaaaaaatcataatttgtgatagataaagaaattcaattttagaattttgggttaagtattttgaaatataaaacgaaaatttatttcaaaattttttaaaacgagataagatgttacaaagatttatatttactatgaattaaactaaaataattaatttaaaataattatcattatgccttacatttagaaatatctaaacaataaattgtacatactaattttgaaatattttgggttttcttttttctatttttcaaccggatcttttgttagaataaatctataatatattagtgcacaaacttttgaaataatataaactaattatacatttttcattcagaacaaattatctagcaaaataaattgcttttgtaggtgtatttcaaaattttaattatattccaaaaatcctattaattatgattaaacaagggaaagaagaatattgaaaatctaggtaaggaaataaacattattacatttgttataatgctattcatatttttgaatttgaagaaggaaaaaaaatcaagaaagggtatttttgtgttttaatttgtgatatatttgtaaactttaacatcctatatgttaatccgcaaaactcagtcatatataatatgatatttaaaggtaaacaaataagaattttggaacgtacttttaatggaatgaaatgaaaataggaattatgagacacaagcgacatgaaaaaaaacggaagcattatataaaataatttgaaaccaaactggacatcaaattaaatatccaactggtatgagtttgggttatgagcagtatataaaataaattaaccctgcatgtacgtattttgtgacacaaattctatttgtgatgggcgctggtagtatttttatttcacatatacagacgggttatgggacgaagaatttatgatagatacatcacattatgggttttccgttccaagaaatatacgtcaaatatacgttttaattttctaaactaatcaaagcattataatagtttgattactggtgtaaaataggatataaatttggttttagtttgagttatttcccagtgtgagtccagattttaaaatataactatacaagaacacaattgaattttggttgttactcttacctttataatatctatactattacaaagtttacttataacaaaatattatatatattttaaaaatctattacttttttatatattttgcacgtatattcgagtttagatatctaatacattatactataatatatatcacaaaataacaaaataatctacattgaactaaaaatatgaaatcccaaaaatatgaaatcccgcacgtatgtgcgggtcaggatctagtaatatttaaggttaatgagttttgttacaagaaattttgaatttttagcttttatagaccaaatcaaaattataaatctattataataatttaagcattagtattttagtaacaagtatacagtgctcaacaattaacaaggtaagtaatacgaaaaaaattatatccagatctaattgttagtgatcccacaagttacatgtacaaataacgagtaacaaagcaagtaataggataagcatcaaaataaggcaagtaacaagacaagtaacggggtaagcatcaaatcgagacaagtaacaaggcaagtatcaaacatttttatgactgagtatttgcaaataataaaataaaccgacaagttacttgacttgcctatgacgagtatttgaattttcaagatgaatacgagccgagtagcgaataactgccgagtaacaaatacttgagcccaggcctactttttataagagctgggatgccctttaagagtgctgaatcatatgataaattattatgaacattaaaatatatgggccgaaatcatctgataaagaataaaggcccaaaagcccattaagaataccaagaaattttggaaaatcgagaaaaatggtggaagacacaaagacacaaatggcagcagcgatatcagcgactttggtattcgctgcaagacgacgtccattgttctgtagcttatcatcatcgtcttcttcgaaaccaaacacgagaaagcttgttctatactccaaacctggttgttgcctctgcgatggtcttaaagagaagcttcacgctgccttcactctctccaccggtcctgattcactcaacgacgttactcttcaggtctcactaatctaatctcataattatgattcaaagctttttaaaattgtattagagacttgttggaatggaggattttggttggattaagtagatgcaattgaacatgaaccctcaaaattggagttgaattttgtggcattgttgtgattatgttattgttaggtttaggcctgggcgtttgggtattcgggtcgggttttttgggttcgggtatttcggatttagaaatctaagacctgttcgggtattttaagatttcgggtcaggtttggatcgggtattttaaatcactatgaaacctaaaattgtattagagccttgttgattacgatttcgttgtcttgtcttgtaacggacatgaccaatctactcattgtcaatgttcattgggaattgttaggtaagagatataactacgaatcccgagtgggaacgagcgtatcagtatgagataccagtgttggctaaagagaattctgatgggaaagaggtttgtgttgttctaaactcaagcaaaacctttcaagattcatatctaattactactctttatggcaggaagttttaccgaggttatctccacgtttaagtgcagaactcattcagaagaagctacttgctgcctttagttgatcaattacgtgcacgacaacgaaaaaaagagacaaaagcgtttgtaaggttgtactctcatctgcaagaaccgtgtttttgcttcatactttcgtttctttttcctttacaagtcagtggaaatatagttgctttataaacggcgatgctgatttgcttctgactatactttatctagttctatacccttaagaaagctattgctgcattttgcttctttgactaatccattaacttgagtgatttgatagaaatgtcgccgtatttgcgttttttccttttctctgtattgtcattgtaagcttttggttctgattgttgccaatactatgacgtctactagccacgtaacttgctcagtttctttatgtctagaagaagaaaaagatttgatgaactttctttagattatgaaagttgtggttgcggcaatttgattatgagatgtttttcttacattattaggttaatcattcttagtttgaaatcatttgaggacatctctattactttcacgtaactgcaagttcttcattaacgaatttgatttgtatatctttaagcgttatctactcttagtatagattacgattggtgcaagcaacacttcattattctttccataactttcatgactgaccatgacattttacgcagtgtcattcccgatagaggtgctgcgattcaacttgttggtaacaccttacaagttacaactcagaattctatttctctaagtttgctcatgtaagcactcattatctcggactaaaatatttcctagtcgtgcaatcattattgtcgatcactcggatcctttatcgctcttttcaacatatacattactacattcgtactatcgatttgtgcatattacgatgtaacttgtcggtaacacctcgcaactcagcaatctatttctctatctcaaactgaaagcaagtttgctcatgtaagcactcattatcttggtttaaaatatttcctagttgcacaatcatttagatctcttatgcttatatgattaaagtcatttgctcttcttaacattactacattcatactatgataacttattactatatcagacaaaacaagatggttcatttttgattagtgaaactattgaaggtcctgccttaaaatggtccctgcatcgacgacatattttcttcacttgtcaccgtccttgtaaatgtatctacctgataagtcttttacatattatataaattctttatcgatcaatcagtggttggatcttttagctatattattgagttgtgagagccataggattatagtttagtggaaagaatcagtcttgatcaaatactctcatcatgttctaatattcgctagaaacaaaaaatctttctgcttagttgaaccaaaagtttgatgatagtgtcgtatcttgaatgattcattctcttttttttttcttatcattctttatagggtgggtgataaagcaattagctagctttttgagcataccttcgtgtacctcttagttggtacaaataatatgcattttcgcataatctgtttctctttcgtcattggtgatggacagattaacctgattacacgtttagagtggattgatttatatctcttatgtataacctaataagttatcgatgtgggttcctaactcgtatcgaattcgaacttttgagactattggttaccttgcaccatagtgcattgtgaagtgagcaatggtttggtaagataagaaagcaaatgaagttctttgcaataagcaggataaacatatttagccaagttcttttttttttacctttgaccaagagttcaaatcatctttatttcctcctattgatgaggataaagttggccatcttttgttactgatatagaattctttagtcatgctttttatatatatgatattctttcttttaagtgtgccactaattatgtgattcattttttggatttttaaattaagctttttctgtctctctactttgatatatcgaattctgatgttttgcaagacctcttccaattattatacgtgcttctaattgtatcttttgaccttgttgaatgcttgcaagaacgccaatatcactatacaaacagccaaaaaaaaatatgattgtacaaattgtggcttatagttatttctataaagttgtctttacgccttaatttccttcatagccgatgaggttagactgcatggaagtctctaaggtttgtttttcgtttcgaaaacagaatgtcttagaaacatacactaaatatagacaccactaaaatgcgatttctagaaatctttatttgaaacgcgatagaaactcactttttattgggaaaaattaaagtcaaactaaactttgtgatttatatgacattttggaaagttcaagttttttcgtctcaaatttgaaagttaaagcatttttgacattttccccctattttattttgcattactttagtaactttaaaaacctaattaatttggtattaaatattttttttcttttctaaatatagttttgatgtttggcgtttcaatagtatttatatacatagctattttctaactaaaaagaaaataattttcacatttccgtttccatgcaatatactttacacttgccttcttttagtatcagaagttctatatatgcatgattcaaaattccatatctaagttccaagttattacaaattatcgatttaagcttacgaagtttcagtatgttgtatcttgaataatctgcggtgagcttgttatgtatattgtagtttgaatgatccatactcttagatcactaaatctcggctatggattatagattactgattgcaaaaggaaatagtaaaaatagattgttatattaatgcattgataatataatagataagaccaacatagaagaactagttctatacttctatttaacccctgattttgattatcctagatgacacattaagttcctaaaataatatttttagtttttgttccaaaataccatcactagacttttccaataataccacatattcaataataaaattaattaatcaaaatctcttttaaatggtggaaacataaaccctatattaaactatatagagagcccaaatataatattgttgattttatatgtcacaaattttggttaaaagaatattttatacaaaaagtggtattattggaaaaaaaaactactgatgatacttttgaaaataaaataaaattatagtgtagtattttagggtatttcttttctttatattccatgtaaattgttaatcacatcatttaacacccatattcacgctaataaactcttttcatttttaaaatatcgttaaaacaaaataaattaagattaataataactacattcttctaaatataatatgaaatatgactactgaaaaactcaataacaccaaaaacatttaaatatgtgaatatataaaaaacctctagtggtgtagtactctactagttatacgtaaaaacagaatggaaactttttcatgttaaaagaaaagtattgttgataaggatgtccatataatgcatgcttaatatgcagcaactacgaagaacactttgaagtgcccatttctttatgtctttgcatgactatctctctccacatatttcgaatattattcaaagatttcaaaaaacttagatacatttatttctttagatatgttatttgtgcgactcctattttctccttttcaattttcattttttagatttcttgaagtttccatccatatataacgtctacattatttgtttttaaagttttttttttccctatcggctgatccggtcagcttcggtagaaacgtactgaaatacttcagagtgaacttatccccgaaggactaccacattgtctgtcccgagtttagaatgctttccgactaatgccaggggtagtcaggtcgccttcctttctgattaccaggtaaaccaattgggcaaaaacccaactgacagacttcccaaacaaatgtgatttttgttttcagggaagatcaaactcaggtctggaagtttcacccttcccgaaatcttctcgtacgactggaccacaaatgcttgggatttttgtctttaaagtttgtatgatatataataaatacttgtcatccactccctctataaatacataattctgaaaaaaagatgaaggtacaataacatgataatagcccattaatccgaccaagaaatggtagataataatataacataatactagattacttgtctaattacaaatacaacactaatccatgtaaaccaatccaattgcatgtcagagtgctttttcgtatgaaagagtagtactgataaagtatctaatatatgaagcccatatcataattatcattagctgagagatacttaaaactataagaaacaaaaaaaaaaaaaaaaaaaagtgaaataatataaaaggagatatatgaaaattatgggttaatggtggtgagcatcaagaagtagtattcatacgtggttaagaaagagaagcaaatgaggagatgggatcaaacacatggaactccactctttcaaaattcaaatatttgtgattcatgcaagtaggtacccaactttttccttataattgaatactaagtcattcttcactttcaattttcattcatatactcataacttcttcttttttctttggctccaaattccaaaagatgtaaagtacccctttcacaacccaaaattaactaaaacaaattgaaaattgaaaaaaacttcaaaatcaatcccaatctacaaaaacgcaaagaagaagagtggaggagaggaattgaccattgtatctaggattgcataataaatataatggagattcgatgaggcatcaatgaatatgtctcaatgaaatagtatcaaggaaataagttagtcgtaatctgattccacactaagattaacatgtttaaaccaaaagaagaaaaaaaaaaacatgtttcaaatttgatcttttgtttatcctcaaatatgtgtttattggcatcatgatcattagtactttcatgttgagggttaagtttacataaatcacaactctggtttttacttacaatgatttgtgataagaactctaacttttgttacttaaataatttttcttttggaaaatgttagttcctttcctagatcaatgataaacacaaaagtaaatatgtttaatacgagctatcaaattactaaagcctaaggatctatcaaatgggtggacaattctatatgatttcaaagtggtggtttatattcctattaacttaaccagcaataagatcaaagttttatttgttaatcctattacaactcaggtttgggtcacagtccagtttgcagagatactctctaaacacagttcaagaatactttccttaacagacttccatgttttctaaaatatatttgttcctttgtcaggctaaccctagcatcaagtatgatgaaggaaaaacaaattgtgtatgatgaaggagagaaatccttacatacggcaagtatatatatatataggctatgaatggtaacatagaccgcactcaaaactgcatcgtaacagtgctgtaacaatatcaaaatctctacatatacatatgtatttatgtatttttgttactatttaaaccgcaccgaacttcttccgcaccgcaaaacgtagtcaccattcggacccataactttcaagggatagatctcgggattagcagtaattttgtgctagctcctactattagcattagcagatatatatatatatatatattaatacctaattaagtaaagcaggaagctgattcacatagaatttgggtattactcagcaaacatcataaaaactgaaaaactcaatacaagtttgaaaacccacactaatataagacatggcacgtttgcattatgcttcctatattaccgactaaattagtgattgtcacaagtagccgacaacttttggacttaattagcaacagacttattgcttcagtaagaaaccaacagataagcgatgggcataaatggtatgtggctttttcatcctgttttcacgttttgaacgtcaagaaaaaaaattaataagggatttttgaatccatcccgtacgttttatatttataaatagtttagataaaccttaattcctcaactaaatactagtttcttggcatcttataaagaaactatatgcatttttatccctaataatatagtctgtagcgtatttgcctccatatattatcgccatattatcatagactgcatctcatttagggcaaatgtaatcatagtttttgtaaagaattgaactacctcttcgccttttttttttatataagacaattctttagtttctatctatggtttaatttgtattttgacgtgtatgatactaattaagattatgctatgttttgagttttagttgaataaaatttaatttgtaataattctaaaacaataaaaagtttagtgtaattttttttaactagaacggattaagagttaggactgatgttagaatcgcagttttttttttatggaatgacgtaaaagaattctttaataatcttacttggcaatattaaatggaacaacttaaaaggactagacaatattattggcgtgatatccaaataattacggtttaacaaagaataaaatggggaaaccctttggtatattggttatctaagagttcattaatatttatatacattaagaggttagagtttcgaggtcaagatattatgtttatttaaaaatttgcagattaatagagacaagtgtgtaggagatctccaacgatattcaattataaccgttcgtcagaattctacgcagatagaacgtcgttaggtcatagatcattgaaagtgtctatcaaaagcatggagattaaaaaagaaaaaagatttggagaaagaagtgacttttgtcctggatctattaagagtcgaaagaaatcgtccgttatacaatcgtgtatataacaattctcataatttacaatttataataccgaaaaaatataaaacaaaaaaaaaatattttaaatagaacgaatcagcctcaacaaaaaccttttttgaaaatggaaaagcttaggctgctttaacacgcccaatctcacacatacatattctctgttttcttctttcctttttgtaaaagggtttgctaattctctgctttgttttttttttgtttattaattctttacatttcctacaaagaaaaagacaagcatgaataactaacagcggttatactggaaatccgaagtcttttccacgtgctttctgatgaacatttaacataaaacgttcggactcttcgtgacacttaaaccaaacatacacgtacgtagctaacaatagacgtgtagattttaggtttacgtgtttttcaagttgggcaagaacaaaaaaaaaaagagagcctatgacgtgtgcaacaggataatagtgttagcaaaagaaatcatcagagccattatatgatattgtttgcttttcaattccatgaacgaacccataccaatccaaaacagcaattatcatctttctttattgaacaaacgtatctcattggtcgtgtcctaataaataattatatttcatatacatgtatatactttatagtttttgtttttccttttgctactctacatgactctcgatcgagggaaaaaactagttctcatgtttatccaaaactctatatcacctttttgatgtttttatataagaagacttgttcatccatactctttcaataaccttgacagaaaaaaaaaataaacacaaaatttcaataaccatggagggtgttagtgcaactatgcataagttaaggccttatttgttaatgatctttttgcaatttggagcagcaggaacatatattgttattatggccactcttaaccaaggccagaaccgttacgtcgtaattgtgtatcgtaatcttgtggctgctcttgtccttgcaccttttgcactcatctttgaaaggtcagtctatgtttaaacaatatttataatgttcttcttttagacacagtactactatacatttcattgtttcttaattagcatgttgtggtctaatatgtttcttcctgttactaaaacataaaatcggattattttggttttggttttgtaggaaagtgaggccgaagatgacactatcggttttgtggaaaataatggcacttggtttcttagagtaaggactaagctttccatttcacattcttaagtcaaaacaataaacattatgttttggggaaaaaaaacaatgatatttcataaagttgcaagtaccttaatacatatatgtttttgtcccggcttgtgtgtaggccagtcttggatcagggttttggttacttggggatgaacatgacatcagcaacatatacatctgcgatcatgaacattcttccttctgtcacatttataatagcttggattttaaggtaatctatggtttaaactttgaacacatctttaaaaccgaattgattgtaataaacgggtgatatgtgaatagaatggagaaagttaacatagcggaggtacgaagcaaagcaaagatcattgggacattggtgggtcttggaggggcactagtaatgacattgtacaaaggtccgcttattcctttaccgtggtctaacccgaatatggatcaacaaaacggacatacaaataattcacaagaccataacaattgggttgttggaaccttgttgattctcctcggttgtgttgcttggtctggtttttatgttttacaggtacgctccttacttttttgatcatacgtaatatatacttatcaatccacaaaccaagtaatataaacttcgaaatttttgttaattggttgattcagtcgataacaataaagacgtaccctgccgatctttcattatcagccttaatatgcctagccggggctgtccaaagcttcgcggtagcgcttgtggtggagagacaccctagcggatgggcggttggttgggatgcaaggctttttgcacctctttatacagtaagattatatatattagttttaaccataatcaatcaattgagacaaatatcaacaaatttgatttaatgaagggaatagttagctcggggataacgtactatgttcaagggatggttatgaagacgagagggccagtttttgttactgcctttaaccctctctgcatgattcttgtagctctcattgcctcttttattcttcatgaacaaatccatttcggatggtacgttacataaatgtagacacattacattagtaaccatcaaaatacttattcttgatccttatattttggttatgtttcagtgtaataggaggggcagtgatcgccgcgggtttgtatatggttgtttggggaaaaggaaaagactatgaagtatccggattagatatccttgaaaagaatagcctccaagaattgcctatcacaactaaaagtgaggatgacaacaaattggtttcttctataagcgacaacagcaatgtgaccattcctggtggtgcgcatagtaacacatctggaatataagtgaagaaagcatttctcgagttataaatacatatttgtattcgactaaaataaatacatatgtatttgtatgcatttggtatgaaatacatgaaattatttttatgttttgatagttacataagttgtagttggtcaggtccaaatcacacaaaaacaaagcttcgtgactagttgtgtgagatgtctaactcaaaaattataatgaacaatagatcccaaaaatctgcggtcattattattattacttctcccaagtttcgtattttagagtctccatagaaatatgctatttgctaaaaccagtaatctcaaagctgaaacccaaagtaatttccaaggtcattagaaatcgagatcttcatgccacttaagacgtttatggatggccaaacgcatgtgtatatgataggatacgatcctgggatgggaatccgagttggggaaacgggtttccggttcgaatcactatttttacaggtttttttttttaaaattgatttcaaaatagcaaaaacacatcattgtagttgaagaataagctacgtcaatacatatgtgtcagctgagtcagcaatcattagtgttgactaacatttgttaacgtgaatttataaccaagcactatatcaatagttcaagtaggttttttaaatttttacgtgtttaagtataaattatatatcacttatcgtttgttcaggttgaaaaacgcactttttaaatagtccagattgaaaaatgcctttttttcgattagagttacccctatcgtgagttacaaaactcaaccaaagacaacaataactttactaaattacttcttttcttttggggtcgacctagaacatgtcctgtaaatcattgatatttccttggaattcatttatatgctcggtgggattaatatcattatgttggatctagcaatggatgatcgagctaagagcatcaaaattgctatggctagaatctccgtcattatgatcgtttatgtaatgagtatgcttcattcgcattaagatctctccagttagctccattacattttagttcacttacacttaaacgttacgagatgaataatttcatcatgagatttccgattatctgatcatggttaatgttcatgatacgtggtcacacatcccaaaaagccaagcaaagtatttattcttgtttgaggtacacttccgcttaaagtgagtttggagtgtcttcgtacttgcttcactaaccatagtggtatactgatactcgatgagttcactaatcataattgtggttctagctttgaggtgggttttagcaattcagtatcctaacttaactatgtaataactatttttcttttgagttttaacagttctagccttcttaaatttttgtttggttaatgctaagaactataatggatgtattgatgaaaagaagttagagtcttgaattatgaatcaaaggtgcttcatgaattctttcaatgtgattactcgaggaaagtttggaatggccttgtacgtgggctgctacgggacaaatactcagaaaaatggcaagatataatgctgatgcttgcaagaaaagacttcaacaccacgaagagcttcatccttggatatgttttgcagaactcgattcactcgatatggagggaaaggaacgatagaagacatggcgaggaatcgtcgcccacagagagactgatcaagttaatcgacaaaaacattaggaaccggttgagtacaatgtgaagagaaggtcaagagaagtatgaaaagggaattcaaatgtggtttggatcaagaagaacactttagagttctttaattttttttaacacaagtttacatgtatatgtataaacgtttatttttttcttaaatataatttaacactagattcaaaaaaaagaaaaaggtgtttcatgaagagatatcttaaacgaattcctctggataactgaagcaggcagatttttattctatgacatccaataaaatccttagttatgtttcttcaatcaagtttagtgggagattaagtggaattaattacgtcacgttagagcactgagacaagacatcattttggtgatcaatgaggaaaaccccaacttcttaatatgaaaagatataaataggaaaccaacaaaacatacccttagaataaataaatttaaatatgcaagataatgcattattcattgccaagaggtccacttgaattatccatttctcttcttttatgtactttggtttttgttattcgaaagatttgttttttttttctttctctttactaatatgcatatcatttaaacataatttaatcataccacttgaatctagcagcatattgaggaaagaggattctgattcgaaacatatcattaggtctggtatttcatcactaatggataagggtatctgatcttagttgttcaaataaaaagggttaataaaaagaaaataatatttgtatccaatgataaaagttagatgtaaagttaaaaatagcaatgcaaacataatataatagtggatctatttctaaaaacggttaaataattttcgttatgggactaattattttttgttacgggactaattatttttcgtaattattttttacgatagaggacaaaacttattctttgttacgggactaattctttttccgtaacatatatatttttttatatgggattgtccaaataattaagtggagattcgagtttaaatttttgattaagattttcataacaatttggaattatgaaatattgattttgtcttatttccattttcttaattttttcttcatgattgttgtttacctattttctcaacttttttttaatttacgtgactcaagaaaaaaaaaataactacgttgttatttctctagaatctaaaaaaaataacaaatatataaaaattcaagaaatgaacatgagtgtaggagacacatttcgattacaaatgaaactgaacttgaccaaagagaaaaaagtaaggcatgaagagtaagacataactaatatgattttgagttaacctctaaggtatttctaaacccaaaaggtaattatagacaagttacatggccttgttcatgttcaagggctaggcaaactagatttataagaccagtcatcagcaagtctcttctatatatatcagatttacgttgcaaactaaaggtggcattaaccatcgagtttttttgacctttttattgttcgacccaaataaatatacaatcggtgtaaaggaccttaaaagttaaataaaatgtttagtgtacacaattcacctgaactaagttacaaattgctaagtgattaagatttccctaacctaaaatacacgtggtgttaagatttatataagttttgcgtaggtttcaaattctatgtttgtaacctaaactttttttattatctatgaaatatttacaatttagcaaaaacaatcgaataagatacacgttgcattaagtgattcgcttagttgtgaatgataaatgtttttttctaacattgggctttggaaaattttattaataaatattaggggagagttaacttcactcattgcattttttttttcttttgggaaaagtcttcactcactgcataagatatatgtattggaagaaagagagcgagagttgaattgtacaaaatgtttttcgttttttggccgtaatgtgtaaaataaattgtcatcagttaaataaagaaaacaagaacaataaatgatccaaattttatcattgtttctacaaataaatgacaaacataaagccatttcgtgcacacactcttaaaattattatattccattaagcaaaattttccatacacatatatatgctttttttttttgttttgttactcgtatctttccattataatattcgagaagatacgtagacgtattattgagcgaacaaaataatgctatttttccttttataaatctaacttttgatgactataagaaggaccatttgccatttggttttgtatgctcaaacaagtaactcttagtcgttcacgaaacatctcatatatatctagagagagaaacaaaacaatatatagagaatctatatagaatcatataagtggtacatacctctcaaatcgaggaagaaaatgaaaggaggaaagatggataaattgaagccaataatagcaatcatatcactccaatttggatatgcaggcatgtacatcattactatggtctccttcaagcatggcatgaaccattggatccttgctacttaccgacatgtcgtcgccacaattgtcatagctccttttgctctcattctcgagaggtatgtatgttaaatgatgtgtatgcatgcttgtgttggttcttatatctagagccatggtagctatttataaatgtaagtgtctctgtattaattcatcgcatactttttcaggaaaataaggcctaagatgacatggccattgttccttaggattcttgcccttggattcctagagtaagctcctcatacatatatcttatccccttttcatgtccatatatatatgcaaacacacatacacacacacataaatatacgtgtatatatatatagatataaatttatacgatgttgggggttttctattttataaagaataattcttattttgcattccaaatatttgagggttttgaggacctaagatgaatgaaacaaaatgagactttgatacattttccctgataaaatgtgtcgtaaatttatgaaatgattagagataattaacgatttctttttaatttatgaaataaccaaaaataatcacacaaaagtacaaatttcaccaatataaaaattgaaagtttttagaaatcgattaataataaactattttttttttaataaaaaatttaaaatttattcgaaaaaactgtattacatcagatgcagcgtttgcgttaagaatttcttagatacaaacaaacaaggatcaaaataaagatttaatgtgtagagcttcattagcgggaaccaaaccagagtaataaactatttcgatataagaattaattcaataattttaacaaatcttttcatatcgatgaatccttaaatcatataaaggtaaaatataccatataaaagaatattatatacgaagaatctatacgaaaagattctagtcgtttggcaaaaataaaaaaagattctagtcgtgaatattcttgattagatcatcacccattgccgtcttctcatagctttgttttcctttatcttttaatttaacttgaagagaatgataacgaaaaaaaaagaaagaatatgattggttaagcagaagatgatgcaacattaaagcatatgattaataaatttgtaaatgttggttgtttgtctattcagaccacttttggaccagaacttgtactacataggaatgaaagccacgtcagcaacgtatagttctgcctttgttaatgcacttcccgccattaccttcataatggctgtcattttcaggtaagtttgcttctaattaccaaagaccaatcatattaatcattctctatattttttacgtcataattttatagttattaattcaaaaattgcttaaattttattaggatagaaactgtaaatttgaagaagacacgaagtcttgcaaaagtgattggaacagcaataactgtgggaggagcaatggttatgacgttgtacaaaggtccagccattgagctctttaagactgctcatagctctttacacggcggctcctcgggcacctcctccgagaccactgatcagaattgggttaccggaactctagcggttatgggtagtatcaccacttgggcaggtttcttcattctacaagtaagcaaacattagttacttatattccaaattggtgtgtttacattaattagtaaatgtgttataccatactattatagttattctgatcactataacataacaaagagtggtaccaaatctccattttgactaggcctaggcaaaatagccaaacccgaagaaccaaaccgaacccgacccgaaaaacccgatctgaattcgaacccaaaactttaaaatacccgaacggatcctaaacttcaaaacccgaacccgatccgaacctaaatactcgatcaagtacccgaacatatccgaaatatatatacatagaaaataattcattagtaataatcacatttacaacaacttaaatgtctaaaatatttggattctaaaatatatatacataaaacatttacaatagaaaattttgagttttggatactccgggtttacccgaatccgaacccgaaaaacccgatccgaatccgaaccgaacccgaagtcttaaaatacccgaacggatcttagatttctaaatccgaaaaacccgatccgaacccgaaccgaatacccgaacgcccatgcctaattttgactacaaagtggcaatagaaaaaaaacatatataatttacaaattagtctatgctttaagataagattttacatggtactaagattgaaatattttcagtcgttcacgttgaaaaaatatccggctgagctttcgctagtgatgtggatttgtgccatgggaacggtcttaaacaccatcgcttcgctcataatggtgcgcgacgtaagcgcatggaaagtcggtatggactcgggcacacttgcggctgtttactccgtaagtacttttgaccgtttactactaaaccaatctttttataatcatggtcataactcacaagtgttaagtacttaatatcagggagtggtttgttcgggtatggcgtattacatacaaagcattgtgattagggaacgaggtccggtttttacgacatcgtttagtcctatgtgcatgatcatcactgctttcctcggcgtgttagttttggctgaaaagattcaccttggaaggtaaatatacattatagaattaatgatattctaatcatatacaacttacacggctatgatcaatagtacaaacaactatattgcattcattaggtaactaattagttgtttaattttgtatattgcagtataatcggggcgatttttatcgtcttcgggctatatagcgttgtgtgggggaaagctaaggacgaagtgatatcggtggaagagaaaataggaatgcaggagctgccgatcaccaacacatcgacaaaagtggagggtggtggtattaccagtgaagtaaacgaaggtgtgactaacaatacccaagtgtaaccccaataaagcaattaagagaaatttttgaagaccaaatttccaagaaaggaaatttgtttgtctttcttgtttgttttatgctgtttacattttcaagttatctgtgttgattcaactatataacgaatgttgtatattttctgtaattgtcgaatatcacggaagttgaagaaatttcaatttggtaatttttgtttttgtttgaatttacaatatatgcaccaaaaaagacggttttacaataaatattgcaacattaagccgataaattttgaaaacataatagaccaaaacgtataacatataactagtttaatttgaaataaatgtcgatcgttagacgccaaatataagattattgttgataagtatctttcaaaacctatgaacatgaaaaagttagttgaaattgtgattacgaaatatttaggaagatttacaagttaaagttcaagaaatgttaggactagaacatattattcatgaaggtcaaatttaggttgagagagattaagaatttagtagccgaaatagtctatcaagaagcatttgttattcgatctatgttaacgattacgagtttcctcgttgtaactcaattttgtgtgtagttaatgtatgatatatttgtcgtgaattattcgatcaaagacggaattggaaaatgagttagggccaaatgaagcaaacatattggggaaaaaactgacaaaatcatatcccttctaaatttcagatgaaaactaattcagtgttataatgcaagccttaaaattcatatcctaatgtcataaatatgattagcacattaaaaaggtacaaaatatcaccactctacaacagtacatagtgaaactaggctacattacaaacaaccaacgatcttacaattattcgctttcttcttcaccaccatcctctgcaaccaaaccaaaataaccatcagtgtttaaaaacaccttctgctgaaatttgatgtaaacaatttacagaagacgagttagattcctaccagtttttagttctccttcgttttgacttccctctccgccatcttcactacctccctcgtcttcttcctcctcttcttcttctactactacttcttcatcctcatcctcttcattctcagaatcttctgaatcatcgctctcgctttcttctgcttttatcggctttggaggaggtacaaaacttgcgctggatcttctccttgaactcgacacaatgttgcttgtatcaataccctcaagctcctttgttctttcttttcttttcttgacttccttgatctctgtcaccaggtaaaaccatcaacaattttatcatccgcatatttttcgctctagaatatcttgaaggcgtctacgctttcctgcaggtagaggagacttcttaaatgtaaagcattacctttctctgaaggatttgcagacaacccttctttggcgagtaactccttaagttctttaatcagaatttcctcgcgtttctcctcaggagcctgcttggctttcctgtaaaccgatggagaaatactgccaagaaagacaaacaatcaagagcctggagtataaactaacgcagctttttaaagatctaccggtttgattaaaaaacctcattccacaagatttgatgatcgatttaaggtgctcaacacgcttcccatagccagtcgttggagtttccggtttctgcagttaaaagaacagaaaccaaacgatgtaaattgtgctgttttaaaaggattcgagataggaactaccaaaaagctgctatacctttacagatttttctgaagatggtgccttttctcctgcgtcactgtcgctctgtgaatctgtttgttttgtcttctttgcagaggcaggtttctccttttcacgtttccgctttccggttccctctgactttgataattttcttttctccgccatcttcttttttacagctacttccttgtcctcctcctcgtcttcaccatctgaatcaaacatttcttcactgtctgagtttttagctggtgtgctcttgaccttcttagatactggtttcctctgagccttagttgaagattgtgtagcttcatgagcttgtagtatctaattagccaagaaaagttataagaagactgtgccttacagttataacttataagatacatagtcaattataattactcacttcatctagttctccattaatgaatttcttgtaggggtcaagagaatacttctctaatttaagatcttgctccaaaagtcgacgaagtaaacccattgtaattttcctgaaacagaacaagcgatttttaaaccaagaaacttttatttcccaaactgaatcaaaacaaacaactaacacaaatcctaaacatatcgaaaaaggcatcgaagcaaggactttagaaaagaagacatagatttggcttactctgaattagccttaatataagaagaccttttacgaagggctttctttatatcactctgcaggacctctttgtcctcatcctttgtttgctcagcaacagatttggacgtgttttcttctgtcagaagtcccatcacaggagaatcttttgttttctcatcatcaccagtcatatcttccttaccatcttttttcgtcgtgtgctctttagataactctgctgcttctttcactggagttacatcatctttcttctcagtttctagagaattttctgaagtttcatcattctcagcacctgctaagcactgttatcaccaagaaaacatatcgaggcataattagtcagctgcaagtagtaacatattttctctatttcatgcaaaacttggcattaactatatagcaaaggatacctgaaccaaatgttgcttaacaaagctcttatgcacatccaaagcatgtttctccaatttcagatcctcctccagcaacctccgcacaccttcaaaggtgaagttgctgcaaaaagcaaattccagatgattctgctttccataaatctttctatgcaattatcagaaaacctttaaaccattaaccctacaaacattcttttctatgcaaatcttagtctcatatactaaatgaaacggaaccattacagccctcgtatctccacaaaatcaaactctgaatcatcaccaaaccaatcttatacaagcctagcctaccatggacagttaatactacacaaacattgcaatttacagacctagattattaattttcttcgtttcaaccctattttcgccaaatttaacaaacatcaaagactacaaaacctagtttctacacagaatccaattctaaatcatcaccaaaacaatcttatacaaacctagcacaccatagacactaaatgctactcaaacatctcaattcacagacctagattctcactttcttcgtttcaacaatatttcaccaaattcaacaaacatcacaaaccataaaacctagttttcccacagaatccaactctaaatcatcaccaaaccaatcttatacaaacctagccaagcataaacaatgaatactactcaaacatctcaattcgcaaacctaggttatcatttcttcgtttcaacaatatttcaccaaattcaacaaacaacacagaccataaaacctagttaatccacaaaatcaaactcttaatcatcatcaccaaacaattcttatacaaacctagccaaccatagacaatgaatactcctcgaaccactcaatttacagacctagaaattatcatttcttcgtttcgccaaattcaacttccgtgaaatcgaagcgaacagagatgaagaaagtaacgattcttactctgctttatctctgaggtaggttactcgggactgcatagccgcgagaatctgtgactcgatatctgtttttggtggtgttgttgcttcaccgtccttcaaatcaatcttgtcgccggagatctccatagccgaagtcgtcgtcgagtcgccgtcagacatttctctcagaagaagggcaagtccagtggtaatctctgtgatatacactcgtcagtgggatgggcattcgggtaagcgggtcgggttcggttaaaacccgatcggttacagatttttcgggtagaaaagtttagaacccaggtggataaatctaaaatatcggttcgatttcggttcgcatctaatcgggttcggattagtttgggtatagatttttgggccctattttggaacttcgggtaaatatccggatttttgagtaaaatttcaggttttaggtaaaatttagattttcaattaaaatattcgggtatttttagttttgggttcgggtttgatttttcggatagaagaatttaagacctaatagaataaatcttcgaattcagattcggttttagatccaacttttcgggccaatttcgattcgggttgttggtttcgggtttttttcccagccctactcatcacttcttcagtctgggacgcgaggacgtccaacaggctaaaattagcggaaccagatgaggacaaggacgtaaaattatatagtttatttgtttgttaatcagcttaatataactctatacccaaccagaactataataaccttgtatccagacagacttttcaattgcctccttcaacgaacactttcatcgcagagaagaagaaaccagattcttctccttctctctttctctcttcctccaatggcgaaactaacaacagactctcctctctgccggaaaatcgtccgttctttcttaaattttcttgattccggtaatcaccaccaatcacgtttctcgattttcatttctgttttgatttagagatatttagggtttttaaatcttcttctatgtattttgttgttgttattgtagttgaggttgctccaggtgttgacgaagaaggtcttgaggttgctagagaatgtttaagagaagcttttaaacttaattcagattcttcaagagatgatgatgatgatagctttaaacctatttcacttgttaatttgtttacttcattggacaacaatgaaacca

SEQ ID NO: 550 - DNA, 96256 bp, Arabidopsis thaliana
aagcttttaaacttaattcagattcttcaagagatgatgatgatgatagctttaaacctatttcacttgttaatttgtttacttcattggacaacaatgaaaccataccaccaccaccaccaccacctgttgctgctactactcaggatcctagttcctccggttctcatgtctccgtggatacgtgtaaagagcctagttttactggtaagtaatggtttgtttcgtgtttattggaccaatgtgagtggtggatagagtaatggaacttattattgtgggattgtgctggttttagggacttctagagatgaactgtttggtcaactctttggtgcgcttgagaaagtacggtattttaggaatacacctgatggagatgatgatcctgctcagctggagaaagctacaaggatatttcatgattgtgtcaatgtaggtttgattttctttgacggttttacttcttctgttggttatgagtttggttataagttttgtgtttgtgtatcaggaaatggaaaagtctggatgtcagacgtttgatgtgaatagcttggcggaaacactcaagtgtcaaggtacttgtgattgcttgtagtccctttcttcgaaatcgttggaacttcttccttgttctttagttgttacaagcctatgttagaatgagatcgatgaaggtttgttttttgggtgcttgtaacctctatgtgacattctctgccttttaggtaacaaagctatgcagtccaatctttatcttgaggcagtcgagctttattcttttgcaattgcactgacggataagaacgctgttttctactgcaacaggtgagtgataagtctgtaatttgattaatatcgaaactgagtttgtagctctttggtggtcttcctgcataatatgaatttgatgcgcttagttattttttcacttgttatcagggctgctgcatatacacagatcaacatgtgctcagaagcaatcaaggactgtcttaaatccattgagattgatccaaattatagtaaggcgtatagtcgtcttgggttagcatattatgctcaaggaaaatatgccgaggctatcgagaaaggtttcaagaaaggtatgtatatcttcttagaattagtcagaaattaccatattcctttatgaggattgattgcttaagaatagagctagaactttgcttcttcaagttagctagcatttattctgcctaacctttttcatcacactcatggcagctttgctgttggatccgcataacgaatctgtgaaagaaaatatcagggttggtatttttttatacatttctcctatttaaaggatcgttctgtaacttacatgagagtctgatattgacatggtgtgtatcacaggtggctgaacagaaaattagagaagaacaacaacgacagagacgtagccaggtattgaaatgtctgaccagtcatctcatgtagcgtaaataagtcgagagacgaaaggaactaatgttttgtggtgttgtgaacagcagaacacgagcacgttttacactcaagagccagaaatgggaggaggccagggaataccatctcagttctcaatgcctgtaaaccctgatttgatgagcatgttcatgaacatggcgggaaacacattcccgggaaatcattctcgcaataacgagggaggagcaggtggagatggtaccagaaatggtgcagatgagcctgagatacatgtaggcggaaatatcaacatagatctcggaggcacagagcaaatgccggaagatttatcgggtgcattacgatcaatgatgcagatgtttggaggatcaatgggaggcactggtaacaataatcctcaagattctaatggtgcacaaggaagaccatctgggaattaaccttggaatcattgttttattggtttttgagtttgtgccacaaaaactttgttaggttttgaattttaacgtgtagtgaaagtaacatgttattataaaatgatgatggaagactaatggcttcttgttgataaaatgttttacattacacttgaaatacagtatttgaattgttgtacacagcttttcgacaataaaattggtaaacaccaattatgaatttgagcaagaaacataaggcaaattgttgttactactatacaactgaaaagccaaaccaaccttatcaaaacagtaccaagccgataacaaacacttcatcgaagatctaaatccgaaactccgaagaagatttagaatatcggcgggtatatacagtagtagaagaagcactcacagcaaagcgaccgcagaagaaggttgaagcgagcggattctgatatcgtacttcgtaacactaccaatcctaggcgatgtcggatccgagttttgtgtaacaagtgcatactcaggagccttctcctgagaagcattgccgatataattattacatttgcgacatagaagcttcgttctgtgtcgaaacaaaccccaagagtatctagagaagtgaggcatgcattggaactcatcgacctgactgaatcttccctcgtcgatgttgaagaaagatatgatcccactcttcatggatttaccgtactttgatccgattgtcgatgtgattcgattcgtggagctcaggtttagttcatacccacaagatccacaactacaagaaagttcaaaagatatttgttcagtctaagttattatctaaaaagaacacaacaccaacaaactaaagatcaatcaacataacaatcctttatctaagtaacaaaactaatctaagtaacaaaacgagctctatgacaagacaagactacaaattagtcatcgaattatagacaagacaagacaacaactaagtataatcatcacctaccaattcacataacaataatcatcatcatcatcaacaaattaacaaattcatgattcacatgtgccttattaaaatgatgaaccaagctaaatacacaattactccaaaatcaactatcaaaaccctaaataaaaaaaacctagactacctttgagattcaatacaacaatcaaatcaaattgattactaattccttattcacatgattactctgcttccaaattagtcaccgaatgatgaaccaaactaaataaagaacaaagatttatcttttcacagttacacagaaacaagggttctgtctcaatacagatttttactaaattcagaaaaaaaaacaagaaccattagcttcattttcttactacaattactaaaataagaaccctaagccacaagattcagtaaattgacgtgtaagcaaaagatacctgtaattaacatgtctcatggaagaagaagaagaagaagaagagaaagatggcgaatagaattggttgccaccaaaacggccgtcgttaacacccaccgacgctgatctctccatagtcgcggagatcactcaacaacgccgcaaatggtaataataatttatcgatgttgggatcgaagagaggataaaagattcgattaggttgatgaagaagaacgtgtcccaatcgatgcgggtgactttgactacttcttccccaacgaggccacgaccaatgtcgtggtcgcagtttctagtaacgatcgaattcgaagcagtaagaggagatctctttttttttttttgggttagattcaaatgcatttatgacctaaatgtattttagtttttgacctttgactgctgacgtggattttttaagaataaaacatttcaacagttttcccgtaaacaataaaatgtataaaaatattaattgttggtaagatttttttaatattaggtatagtggaggagaattttcaaaaaaaaaaaaatatatatatgtatattataaaagagaattaaaaaaaagtaatgatgaatgatgtaagttatcatgattactttaaagctattttaatttctatgctcagtcgaaccgaaaataaaagaagtaagcatgataagttagaaattagcttctctcttgtgtgacatatttttgtaccaaaaatatccctataacccggagtaaacgataactaattgtagcgtagctgtttaagcatttaacgccgtagagatttacgaagattcactcgccgattttggaaacataaaatatattgggggaaaatattgtgatcattacaaatatatttcgagttgcgggaatatcagccatatacattgggttatcctatttattaccgttgtactaacttcaaccaacaaaaaactagcagactaacaacttaaatttccgataattttaatgcaagcaaaagctaggaacccagaaaattcaaagcagagacgtaaaagtaaaagatccaagtattttgtaactgatagttaaatgtttggaagctactttttttaccttagggtttgcaagattataatagaaaccgataactaacttgttatttctgaaactatttcaggtacaaatggcgttcgtggtgagattgatacctggggagtggaaaagagatgaaaacggaattttcgaacacatctcgcatgtagatgggtttgaattcggagtccgactgcgtgagagagatagttttgcgaagattgttatggcgggaaaagatagattagcgttagggccagatgacgatatcgagttaacgtaccagtggccacagtggatgctcggtcctgattggaaacgagcgaacccaattgacatattggatgacgaagatacgacactgttcgtggctattagggcatatctggatgaagtgcatctgctagtgaagattatacgaggtggaaatgttcgaaacgttaatagttaccgcagtaacatggatctaagcggtttgagttcgaaagaaatatcggataaatactaaaattgtgcggaaacaagagctgtatggggtaccgcgttaaccagaatgctgttgcgtaacctctcgggtaaacctcaaaaccacgttaatgataatatttaagttatcaaataagttggatatctgttaataatatttagatttcaggagacggacaagatatagcaaccatgggggacaccaacgacgtcggcatacgtaaagagattgaataacacaacccgtatggaggtgtcatcataagggaaaacacggagattgcagcggagactagcgagacgccatcgaaagtaccacaaccaggggcaattacaagtttgaaaggcaaagagaaggttatagatgacgatgagagagaaaaagatcgtttattcgaggtgtggagaacaaatcaacaagaagcaatgttgcgtgaaatgtgttcaagagaaatgtcgctaaaagggagtcaaccgagtgaaacaaacggatgcgataaagagaagacagcgagagcactagacttcggaagtacatatcatgcaaacgacaatgaaattgaaaatttgcatttgacccttgtaggggcagaatcgcaagctgttggaccacaaatagtcgcattgtcttcaagtgattcaaccttcgggacgccaacttcgatatcaacgagcgtttctttctgcagcgaagacctaatggatgatactgactcttccgacagccttagcgtatcggtgataggtttgttaacaaataacatgtttggtaactgataagtttttaaactgttactcgcatttatcgactaacgtgtttcgtaatgtaggtgatgagactctgtcccacttttattctgacgccgatggcccactcattgaaaatcctcaacccatcaccatgagggataaaggaaaagatatcatgatagagaatgccttaccgagtgaagttgttggattggtctccaatacctcaagagtattggagatgtagagaaatgcaatgaccgtaaaggatatagcggttgcgacggtcttgtatgaccgagatgctccgccatattttgacgatcaagggaaggaaggtaaaaaaaaaaatcaacttgctaaatatattgttagatagctacaactgttgttatcgtcaggaaagcaagaagttaaaagtatatctatatattatcatacatatagaagagtatgtgtttatcgttagcgacagataacaacattaataaaagaaaactttatcttcaactttctatatctctctagtaataatattatcgaatgcattaacatatcgttaacgcctgattcgttgattgacttgcagatgcccttcagcgagccctgaaggatgctgattacgaggggggtgacatttacatcagccgcatttttaagaataaagaggattgttcaactaagctcgctattcatgcgatccggaggaagttccatttcatttacgtaaagtccgggccaaatgttgtggcggctgtgtgcgtcagccatacatgtccatggtgggtttatgcaactaagctgccagatagtgatacgttcgaggttaggagcacgacttcaacacacacgtgtagcgtggatgctaaaggggacttccacaagcaagcatcaacggctgtgattgggaagttgatgggaactaaatacataggagtgggccgtggacctcgacctaatgagcttagaagaatgttacgccaagagtttaacctcaacgtctcttattggaaggcatggaggacaagagaaatagcgatggacaatgcaatggggtctgctatggggagttacgctctaaaccaaccatactttaagctgcttttggagacaaatcccaactcacttgtggcaatggaaactgaaaaggatgcttcaggggtagagagattcaagtacttgttttttacccttcatgcctgtgttctaggctatccttacatgaggaaggtgatagttatcgacggtacacacctacggggacgatatgggggatgtttagttgcagctagtgcgcaagacgccaatttccaaatattccccattgcatttggaatagtaaacagcgagaacgatgaggcgtggacttggttcatgactaagctgacggaagctattccagatgatcccgagttggtgtttatgtcagataggcattcctctatttatgccagcatccgcaaggtatggaattaatctctatgttatccgataatgtggggtttaccatcaggctttttatgtttacataagcctttttgtactgtaacaggtttaccccatgtcatcacatgctgcttgcatcgtccacctcaagagaaacattgaggcatactttaaagtcgaacagttaagtgccttggtatcaagtgcagctagagcttatcggctaactgacttcaacaagatttttgctgaaattaaggctacgcatggatcgtgcgctgagtacctggaaagtatagggttcgaacattggaccaggtcacattttgttgggaatcggtacaacttcatgacgagtaatattgtcgagtcgctaaacaatgttttaacggcagcccgagattatccggtaatctcaatcttagaatctatccagacaaccctcgtatcatggtttgcgtttcgtaggcaggcagcccagttagaagacaatatcttgccgcctaaagtacataacatggttatcgagaattttgagaagggggcgggttttgttgtgataaagattggggatggtctctatgaggttagagacaaaagaggcggagggtttgtagttaacctattggagagaacatgtacatgcagagagtttaagcttctaacgattccttgctctcacgcaatagtggcggccatacaagaaggactccgagtggacacactggttggggttcatcacaccacgccacagctacggttgtgttaccaagccctaataatgccggtgcctgacacggagactcttactccgtcaccaaacgatgtaggggggggagaactggctccaccgtatgtttcaaggcctccgggaagaccaaggaagcgatgtgaaagctttaaattattgaacgctaatcaggatatctgatatacaataactatacaataataacttctgttacttttgtaaaagacttcaaggaaaagatgttcgcgctgcaagtcgttgggccataacagggtaacctgcaatggaccaataacggtaagaattataatatcgcgattacatatatgttacttgatatttaaagggtggaattgtactgcaggagacataagagaaggggaggatcacgtttttttgcgctgaaagttgtgggatggatgttgccaggattaacagaatctggcatggcgatgtgaaataaataatacgggggaagggttcagaaaattttcattgtacatgcgtatgacatctgttccctaaatgtaaaattatcggtacgaatccaactatcatgaagtaatgtttcatataatggcagtatgtggtatgtttttgtttactgagttatctctgactttaacctactaactaaagaagataatactaaccggaaaaaatcgcatcgaaatgatatcgtgatacaaatcatgataatctattaactttagttgataagcctaatgtcgcgaaaataatgtaacgcctgtcattggtataatcacgatgttggtactcctaaaagaagacaaggacacctagtgggtcgagttattaaggacatcaatcagaataatcataacgcgtgttatctgataacaaaaaaaaaacataaatatgtacttgtccccataccgggatagattcactagtgaatattaacataaatttattgcccggctttgtaggagttgcaatcaaagcaataaacacccgagttgtttttacaaaaaagtaaaacagctatattgtataactgataataataacattacctatacgctgaatgttacatatcttcggaccgaatcaagtaaaaggttcgcttttttaaatatatatcagtatattcatgtatcggctaatttacgtatccgagttgataagaatatttataattgtcacaacgtctaattgtccccagatagatattacttcggtttggttcatgaagccgacaaagaaacagtgacccagtcacaatgaaaccaaaccaagccgtacagctacaaatataacccgataattgccgtgagtattccagggttataatcccccaaattaaaaacagaagaaccctaatttggaaccagaacccgaaatttggaaccaaaattcttcgacaaaggatgagcagtctatcatcaagttcgactggatctacagggccgcggggtaaaggtaaagttgtaggaataccgaaaatatgttggtgcggggaaggagtcgtgtcactcatttcaaaatcggttccgaatccttgccggacatattatcggtgtgattttgctgcaaaaaatagggtaaatgctgctaatcttgttcatctgattattctatttcttcaattgccatgtttaattcgctgttaatttggaaaatctatgttaatacctagctaagaaacgacgaccacacttttaaattggttgacgaagctttgctcaatgagatagagacattgacagcaaagacacgagacattgagcaagagctgaaagatcttcggggacagaggtccgagttcgaaaagatggtttacgagaacgtggaaatgaagatagaaaaagaagtgcttacgaaagtggaagaagctgtgtctcaaacgaaagcgagcagtaagaggttgatgattgtgatggtgttagggtgtatgatcatacttggatacaccaaacttaaaggggaagtagtgtagaataatatttacactttgttgtagtagtcagcgggataatattgtgtctgctaaccttcgctctagtagaataatatagggactatagtgtatctgctaacgctgcaatatagaccaacggttggagtgagataaaatctcgagaacttgttattaagataaacgttagtaattaaaatgtatttgaaatcgacgttgataatgtaagataacaacaaagttagctagtaacctttacgctgaaaagggataatatagtatctactaccgcaatcctaatgcaacgatccgagtctggtcaaaatccacgaattttaaaaacaatgagtaacaatgataacaacaatgttagcgagaaaatctctaatatggaataatattgggataatagttaatctgctaacgcgagtcgaatgcaacgatgataaatatcccacaatgcttaccgagatactgcaacactaaccatttaaatcggctaatctaatatcagataacttattattatctactaccgcaatcttaatgcaacgatccaaggctggtcaaaatccacgaattttaacaacaatgagaagcaatgataacaaaaacgttagcgaggaaaatctctaatatagattaatattggaataatagtatctctgctaacgcgagtcgaatgcaacgatgataaatatcccacaatgcaacgatactgcaaaactaaccatatattattaacttagtagataacttattattaagtaaatacaaacgttagctgctaacaatatcgaggtacacgacgtaaacaaaacagaatcggataactaggtgtaagacaaaagctaaacgcagttagaaaaacgctgggaaacaaaaaattgtaaagttgggtgacaaaaaagtttgctagtaaaacgttatttagtaattctgcgctaaatcaacaatccgagtctggtaaaatcctacaaaatggtaataatacataacaataatattttttaaaaagatattggataacgtgataacattatatctgatattattattagtgatacatgcgaagacaaaatcaacgaattgaaaaaactattaaaaacagagataaacgacaaacgttatctgataacaacgatgacaaatatacaacaatgcaacgagaatacaacattaagcatttaaaacggctaatcttatatcagataacgtaatattaggttaataacaaagttatatactaaacaatatcgaggtgctaaacgtacacaaacagattcggataactaagactacgacaaaagcttcacgcaattagaaaacggttggaaacaaacattgtaaagaagggtaacaacagagttagctagtaacccccaccaatattaaggccgacactagctttttaacttcacactgaagaccgtcgacctcaaattccacacattcagtgacaccacctgtggcgtgagtgtggataaggaatatagagaagatgcctgtatcgagtggggaagcaacctgcgggatgactagtggtcgctctatagaaaacggatccatcgaacagttcctcttagacgaattgaaagcagcctgttggaaaaggaatgacaacattaccgcgagtggcatgatctcgtcctgaatagcagaatctttgcgtcgttgaatgttcgaatccaagacagttatctttcgacagttcaaatcaacagctaaagccacccaatgcttcttgtcaaagttaaatggcaggtacaggaaatcagcctccgtgaataattcgatatgatcaggttctccacggccattaaagagatcaatcagatgaggtgggaactgaaaatcttgtttagaagagcatcgagaaaatttggggaatagacggaacaatagtgagacgaacttagaatcaaggacatcgacacgaagtttatgaccatcggcatcatcggttcttaacaaatgccgactaaacttgatgagagcatccattacctgggtgataaaggaaagagaaacacccaacatattacaaaacaatatgttaaatctttaagtattctaatatataatgacagaacgtaccttgcttgttagattcttcttccgatcagtcaaatccaaaatttctttattggtcaaagcaacacccccacaaatgctaattgacctattgcaaaccaatacgtcgataaaagattaccaattgcaaaaataacaatattttatgtgctaacaacaaacaaatgggataaagaataccttatcgccttaagtttcttcatggagttttgaaatcgttcttctgtgtcgacaaggtcgttgcctttattgacaacaagggatggatgacccactaaaatcttggttttcttaccatacgcgaagcgaccatctagcttggtagatagagtacggagacgcttacttcttctcccacaaattccatcagcgttgttagcattcatatcatcctgctactaactggcattattaataaaaggtggcaaatcatatttaggttacaaaaaaaaaattacagttgacgagatatgcatgggttaagatcttagcctcttttgaaggagggaggggtggtggtaaaatcctaaaagattaagcatattaaagtaaacatgtaaccaatattatatcagatatacaattaggggatatacctcggggatatacctcatctgaatccggtgcagaacgagtcaattgaataaaaagtaagaattagatagttatagcaattaggagataattaaaatattagtaggaaacaaaacccaaacaccttgaggatagaagacacaactgagggggtgcccctgccaacatcctgtcaaaacagttcaaaaatgagaattaccgataaaaaaacttatggaaataataacatacgatgtgtagttacacattaacctgttcataaaatctcttaatagggtcacgaccgtcgccggtataacaatcgttaccgccatattcctgatacaatacaacggttccacaaaatacaacttactgtaaaaggggagatgaaactttgaaatcaaaagtgttttgcgtaaccataacacgaccgcaacagaactagcatccaaatacaatgttataacactaatgatggcatgtagtaacttccaaacaataacaacacaacaacatgatagactctgagacaaattaaaactgagcataaattaaaaaaacgattaattttaattttatttgccggtggttggtttaccactcatggtttttattttaaaattataaacgatctactcagtaataaagcatttgcccaacttaaagactgaacataaatagaactcaaattccaaactaaaaaaaggtttacttaactcctaacatcgctatcattgaaaacttaatctttacaagtagaagagtaggtaaacgctggagaaaagcgtaaggaggtaacaacattatgggtgctagtttagctgctaaccaaaatatccggaaactccgcggtcacatcaacaccaaccattccatcatcagtcgcgggggcaacctaatcgacgatgagttcaaatagtgaagccagattcaaacacataaaaaccgtgctagtatgaaatagacgtgttacctggccatcttctccagcattcgtcaattggcttacagaaccacctgcaggctgggaacattgaacctagcgcatgaaacaacacaactttggataaaacaaccgacagagcaaaatacggcattatgaggataatatctacgccgctaacttccacgttatcgagagattcctctacgttatcgagagattcctctgggtttacaaccgtttcattggatgaaaccttgtaaccagacttttaaacatatgaaaaatatgtaatcaacaggattcaacaagggagtatgtaaagcagaattacaattaaaaagagaaattcagtttaatgtttctttataaaacaaacctcattacacaccactgcaggggggatgtcgtctaccacgaaatcagtattagcgtcctacaaagatattttttccaacattagggtcgggataatagagagaaatgcaattcgttgaaacactaatcacaatactaagatcttaactccttacctctggcgtatctttatccgcatcaacgttgactacgtcagcaacaactcgatttggtgcctacagcacaaatgaacacattaacagctacccaactcattatctgctatgttacattacctaatccataaaatgtttggagtaatcaaagtgtatttaaatataattaattgctatccaacacatctcattgccctccagattgggggggagtccgtcaacacatgaatctatgttatttggctaataacaaattacgacaacggttattgtcaaggcaacgtaatcgaaatacaattcgttaacaacccatttgacatgctaagagacatatcagctaacctcttgacttccaccgtcaccaaagtttgtaccaaaatcagctcctacaaagactgggccctacaaaaccaaaataacaacaaaattataatcccccagttgcgttagtggctaatataactgttaaacatgtaagtgacataatgattactataattactgactagtgacttcacttccgttggaaaaggtctcacctcggaatcgtgaatcacgtcagcctcggctagttgatcttccgctacagcatcagatgagacgttttcttctacctgtacccataagaaaaaaaaacgatgtgaaaagatgacaccgcaatgattgagtaaaccagaaacacctagagcagtttaagaaactgcaatccacaaaaataattatacactaaaaaaaagattatcgtcaattaccattttctcagtaggatcagaggcatctgtgacatcattaacgccctgcaaaacaattaaggcgattgtttgtaatattcataagcatcataatccacaaaaacaattataccaccaaaaaacgtaattatgattcctttatctcatgaatcaaaaaatcctatgatttcatctaaattaactaataaagttaaaaaataaattgtcagcacaattgaaacgaccgaaaaagatatatgagttaatatatgctctaaaattaaaaaaatcataaaaaatttgttaaaaattaataaattaatactaggttttacccgattttagaaaaaagtcgggtattattttgattataaaacttataatatctcttttaaaagatcttatgccgctactcggactcgaactcgaaccgagatgctctagcactgcttcctaagagcagcgtgtctaccaatttcaccatagcggcaacttgttcaaaacaatattaacaagttttgattcaatcgtcgagattaaaatttaaataaagaagccaatttattaaaatttccaattgatttttaaaattatttcaattgactttttgtcctttatattttttacactaaaaaatagattatcatcgattaccattttttcggtagggccagaggcatccgtaacatcgttagcgcccggcaaaacaattaaggcgattgtttgtaatatccatgagcatcacaatccaaacccctccccccaatggatatttaatagatatgggaacagttagtcactaaataaaataacgcctaacaatttaattaacttaaacaaactaaccaccaaaacccaagtttaagtaactacagtccacaaaaacaattatccattaaaaacgagattatacaccattaccactttatcggttggatcagagacatccgtaacgtccttggcgccctgaaaaaaaaaaataaagcgcacatgaatattttatagatatgctaacagttagtaactacataaaatgacgcttaagaagttaataaacttaaacaaaccaacccaccaatacgtgcgggctcaattggacctcggatcggatatggtcttccattggagcaacgttgtcacgctaagaaaaaacgaaaaaaattctcagaattataactcaaaacaatcattgccttgataacaatttgtaaaaaaagttaggtgaagtcatcaacgcaatcatggcagaaaaagacaacagataagacagtttaaaaagactacaatcaaaaaaaaagaaaaaagaaaaactcacgccagggttatcttcggattccattatatcaaaagtagcaggcccctctctaacattgttagcagcctgcacaacaatagaagataataattttcaactatttaaaataacaactaaaagatgagttaactgctacaaaaaaactaactgatgggtttggactcatgtcacctgaggatcgaacatcatctcccactggctcaacattgtcgcgctaataaccacaaataacacccgcttgatattatacatatattgtgccagttatgaactatttagaataacaccttagtagtaatttatcgggaaaaaaacctacctgcacgttcgggctcaagccgccagcagatcgaacatcgtcttccactagctctacaatatcgcgctaaaaacccaagaacaaaaataaactgaggacatatccagcaaaaaaatttcatatgttgtaagtgacttcccaaaattacctccgacacgttgagcccaacaccacttggaaccttgtctgtgtagtaagacaaaatctcatccacactagactgaacattcgaattcctttgacggccattagaaccaacattagaagatggccggcggagagcatcaaacccaaaatcatcattgggctcattccgacccacctcttcaggattagaaacacccccactagccggatctttggaaagtccaccttcaatgacaatgtttataatgaaccaatccataagcgcaacaatgattaatttcccctgcgcttcaagctttttgtccaacaaacgggaaatagaatccatagaaacggtccctgaactactaccttcctctggaacgggtctttgatgtttggtcctgaccctactagtgttctttgatggtttgcctttcctgttccgaccaccatttgacttaacacaccttttttgttttttggaagccaattgcatctgtgatgggaaacatccaccaccaaacatatcattcttgaaaataagaccctgctcagccaatattaaaatattatcgactctctcatcttcatcgtcttcagaccacgacaaatcttcctcagggtccagatcaaggtcagggcaaataatagtagcaacacgaacctgcaatagtgaatcccgataacaaaatcagtcagataacttgattaatggtgagcacgcttagtggttaactatgaagatgtcaccattgctaacagataacaaaataaccgacaatactattatcgagttttactaatagaccattgtatggtctcgcgtgttgaaaccaactactgtgttaaacaataacaagtttaatgaataatagtattaccgagcatttagcatccagctccttcgcatgccctagcttgaaagcgacggaatcacgaggggcctcttcgaaattgtcttcagcctcttctgatttttgactcaatggtctcaccaactacatgaccttcttgaatagatggggctgcttgtaataccaccaactgcaacgcgtacaacagaccctgaacaacaaaacaggtactagcaagttgttaaatttccctctctttaatcgactttatcatcatctcgaatgtgaaacggcttcatggataagagagaaatgcttcaacatcctcagccatttcagcgtgagccttaacaatcttgggatagtgcgaggtagggacaagaaagccgtcgacaatggccaaacaagcacatctgatcctcatgccgggatctgagataatccttctcttcaacattgtaatcacccggtcaacagttacatcttcttcaagcccaaacagcttattgtaaaatggtatcctcttccccgcagtgcctttcttcctcttcatcttcaagctcggatattttccacactgtaacccgataactatcttgaactctctcaacgaaaagcgaataggagtgccggcaaataaaacccatatctcattcggtttcgcaacttccaactgcctacccagaatgaaaattctaaagctcgcggaccacgcgagtagtttggggaattccaacaagcgaccgaacgaagatcgagcaatgaactgccgctctccatcgtctagggcattgataacacaccacataaggttttcattttctgatacacgttgaccctctcgtcgtgtggttcttcacgaaacgcaatcagtcggggagggagagggagaggcgccatcttcctacaaaagaaacaaacaaagccattagtcaacaaatgaaggactgatgacaaaaagaggggaaaaaatgaacttactataacgtttgtcaggaaaaatcccagatctgagagacgagttgatgatcgaaaataaaaactgccgaaaaagctaatttttgggaaagttgctctgatgatttcttccgcctccaaaccgtcattcatgatatataaacttgaaaagtagcgaccgttcgataacaagctaattaaaaaaaaacatcacacctccccaaaaaaatctagagagaatcaactcctacactctagcaataatatcgtctacgctctactcctctcgatatcgaaatcataggggtacatgcgtaatctttgagttaacagtagctggggaactgttaagaaaaatgcgacctaaataatgaatcctctgggcatacgcaatgatattatccatgattttattcaagttgcaaatgtattttagttggtgtaacgcccgtgaaccggaaaatcggttagggtttgtttttaaatcatccggtttaattggttgggttaattggaaaccctagagtgtgcctataaaagaaggaaactcgaaattagggctttagttagccacttttcgttttataaaggagaaaaagagagaaaaggagaaggagcaaaatcgttagggtttgggagaaatcagtttcgtcatatcaaatcgtggtaaaaggtaacgaaatttagtagagttattcccaattcctttatcgttattatccagtttacagaattggatttggattaaacttggttgagttattcgcagtttcgtgagacacgttttctcagacgcgaattaggaccagcagggtttgaaactgagatcgtggtatcgtctgttttccgatcgggacaatattgtgtgggacgcttcgtgacgtctagggctagcgtttcaccggagcgatttaatagttaacggttagtttgtattttagggtttcgtatttgaggttgtctgtttctgtttttcatgtccagtttgtttcaaggttgcttttggttgtgacttgttgtaggacgtttctggattgtttcagacgcaaggagagtctctcctgagtttaattgttattagaatcaatttgttaaggtgagtgcgtgaccatgagcttatctgagcgattgggttgtgtgatttgttttgtgtgatgatatgtagggtggtgaatgtgttttgggtgaattgttcaatgactggtttgtttgtattgtattcgtgattatacctttttatttgcttgtgtgtatagctcgtggatgggaggatcgcctcaataagtatttatgataatacttgcgcatctcattgtgttgttgatgcaggtaaagataaagtgtgatcgtggaatcatgacaaggaagagaggatgatatagaaactcgtttattttatttttggtgtttttggttattggaacccggttaggattgtcagttattcttggttttgttggtcgaataatttatttattcataaaataatatttttgacttgcggtttaattattatgttattggttggtttaattagatatttatgggaatatttaattatatttaaaaaaaaaaaaaaatgggtcgggttgtttcagttggcttgagtgatgttcatcttattatatagtatgagttgttaactttgattataaatttaagtttagtatgagctaagtaagaatttaaaatatatgataattatggataaatagcatattatagtaatattaaaataattgagaagaagaataaaatttattgataaatgaacaattatttattcttttgcattgttggataaaaccttggactcccatatatttattactttgttattaaaatatttatttttgtttgttcttataaacttatacaatatttaatatttaaaatttaaagtattttacaagtgataaactaaatttgttttcctaaaaattatatgagcttcaatctaaagctttaaaaagtaactaaatttattaaatattatctatgaatgatgatctttattagatattatcttatataatcataatgtgttggtcactttttttgtattttgggcaaaaaatatgttggtcactaaaatattacattttttttttgaaatacacaattttaaaatgtataaaaaatagtagtatttaagaatcaaatcttattaaaagaatcatgaatcaatcttgtttttcatattcaattggccgcaaagaccaatgtctttaggttgatgaagaagaaagtgtcttaatcgattcacgtgactttgactacttcttcctcattaggccacgaccaatgtcgtggtcacagtttctagtaatgattaaattcgaagaaataagagatctctttctttttttgttagtttcaaatgcatttatgacctaattgtattttcgtttttttttacttttgactgctgacgtggatttttgtaatgatttgtttctcaacagttttgccatttcgtataatttgtttttgttattttattatacataagctaaaatgtatgaaaatttgaaaatattacttttggtaagttcttttaatattaggtgaagagtttgcttagcttggttggttgcatatttttaagatgttaaatcattatccatacatgaaaagtagatattgtagaggagaatacaagaattattatctatatgatgatgaatgatctacatatacatttttggtagggtttttggccaaaaatccctcaccgatttactattttcaatattagtccttacaaatttaggaggggtcattggtttatagatttataaggaattgaaaatccaaacaaaaatcatatgttattcactcattgattttaaaattctaattaaaatcatgtgttattgattcgatgatttataaatactagttaaaatcctttgttattcgtttagtcatttgtttttggatttgagaatccaaattatgttttaaatggaattgaacggatttgaaagagaaaaatagaaggattcaaatccatgggtaaacacatgttatttcaaaatccatatatcttgatttaataattaatagagattttcaaattctatatagatttacaaatcaataaaccaataacacccccttaatttcaatcaaatactttataactaaaaacttacaattagttgaattaactatttcctaaatttttatccttaattaaatctttttttattgaactatattcgattaaggctaatttcctaaaatctatatcgactttaaatataaatatataattttctgtaactatatttgtttttatatatagttttttttactttatatatagaatacatatatttaataaaatattaaattttgttttttgcatcttatgaaattcaaatttttaaaaacaaacatataatactccatagatgaaaaaaataagttttaaaggtcccacattgcttaaaaaattgaaaaatcgttaagagtcatactattaaaaaagaccaaagtgattctgaatacgaatgagaaaaaagcttgatatattaaacatccaaaattaaaagtgttgttcggtttactccggttctttattttaagtaactacaagtttgaaagtattaaaatattatatatatttaaactttattagccgttaagtattacaattttttaaacttttttaaaagttaaactctataacataaatttaaatattaatgattttaaaattttatgaactttataagaagtttaaatattataaatattaaaaagatattaatattgaatgatatattacgggtgaaatcctagatgtaataatcaatatacaattatgaagtttggtccatattaaaacttttttgaagtttccaatattataaatattcgaacttcataagaaaatgataaaatgatgtttaattcacgggacgaggttatatggtgggatgggtttggatcgatattaatattggatgatatactatggatgaaatcctaaaattaacaatcaaaatacaattatacaattttacacaataaaaaagataaaattttcaaaaaaaacattagttataaaaatcataaagaggtgtatcatagtatcatacataaaaaaacaatagcatgtatctatagatcatcctaaaaacaaaaatactattttttatttaataaaaatataggcgtttgatttatctcttgaatatattatatataaacaaataatattaattaaaataaaaatatctaattttctaacaaaaaaatcaaccttcggtatagcgcggtcaatctctaaataatacaactttaaaaaaaaaaaaaataataataatacaatttttttatctttattacctctaaaaaatccaaactataaaaacaaatactgaatattaatattaaactaacaaatatgagaacataaaacataaattatccaagctttacatagataaaaattatatgttaaaaatatattatttatatacaaataataattcttataaaaaaatatctataactttttaatgaacataaccgcgggtcaatatctagtgtaagttacatttagaaaatatttatggtcaatgtgattttaataagtagtaaatgtattttggtagggttgaattatgttcttctagtttttaactttttatagtatgatttgctaactttaattttaaatttagtgggagctatgatgattttaagggggtgatttgcaaggactttcaaggctttaaaaaccttttaagtctttaaagttttaatttcaccaaccagatttttttttggtttttattagtttaaaagttcttaaatccttttccttttcattttgttctttgattttagtttttgatttcactttccccatttttttctccaccttatcttacatgaatttccattaaaatcactaaccaattaatttttaaataattttgattgatttacaatttatttttatgttcttttaagatcattttccctacatattcagtagttatttaaaatcgcaattttctaaagtcacaatttttaccaatcggttataaaaattttaaagtcaaagtctacctgccaaaagtcattacacccaaactctctacagtcaaaaataacaacttttaccaggcgacctttacagtcaaatgtaagttaattatggataaatacttctacttaacatttttgaagtatattttaagaaattgaatcgggtcaggtttattttaaagtttttgacccggaaattagtcttttggatccaaataatttgagactttccaaaaaaaaaatctctttgataaaccaaaaattttgagttcgaattttccttaattatcgtcaatcgttgttaatatatcttttggcaagatccctacaaaaaaggaaaccatattaaccattgcgttttgattttgtgtagatttgtaaactaataaaaagcatattctcaaaatattcgaatatcaaaatattgcctaaaccaaaatatctagaacattctaacgtaaatgtgttaacaagaatatatttattgttatataatgattcgcaatcttcgcttaaatatgtgagaatgattctattttttgattcgtatctataatttttctacttgctctccaagatattctaaaaccgacgcaaccaaaatcttaaattctcatctataaataaccatctcatatatcgaacaattaccataagaataatttgagtcagtctaaacgattcctgagaattctcatttagcaaaatattttttatgcatacctctagagatgttttgctatacaagactgcatggcgtattcagttgaggatccttcatagtgaaaacacaagatttgaagattttcttgacatggtatcgtggtcttaattaaacttcagcctttttttgtttactttgatgttcagcattcttagtaaaagtagaaaaaaagaaggatggtaagaaagagagaaggaaacaaacttgggatttgaacggcggtgacattgacggtgacaatgtatccacagaggagaaaaagcttgacaatccaaaacaaccggaagctccggtgaccctttctacatcgcccatctctcttcactttatctaattagtagaattagtatggttggtaggattcactattaaactgataaactaatgtcatatagtatgtttagttcgataaacatatcaaccgatgactcaagccatttgacttttcatttttgaagattatatgtaatctatgaaacaaaagacatgttgataacctatattacgaacattgtaataatatatgtttgataaatataactgatatcctatctttgtgtttgtgtacattatttagtttttattacattgcaaatcttgatttgtttaacttttacatgataaacacatatttctcttacctttgggtttaccgtattgtaatcggtaataagtcaaacataataagtcaaacatgataaacacatataaaaaatcacataaatatcttcgttattcaaattttaataattctttgaacatgttttcaaaaatatatcaaaaccaaatatattgaagataaaaatacaaataagaaatatattaatttaaaagataaaaatatttaacaagaaatgtttttatttttcaaagaattcgatataaaatcttcaaaacgaatccgatattgattcttaaataaaaaatatcaatatagtatacaatttttcttattagattgaaattgtaaattaatttgaagtatcttaaataaaacttttattaaaaaaaaggaaaaaattgagttttagttatcactggacgaatttatatggcggaatgtgtttatatgagacgggtttacatggtaggacgagtttggatgagacgagtttatatggtgctatgagtttagatgggacagatttggataccacgggtgtattcctagaattaacaatcaaattacaactatacaacaaacaataataacataacaaatgcaatttcaattttcgatttttagttacaaaaaaaaacattaatagtcaacattatcgtataagtgttattcttctttgatacatttaaatgtgtaattttaacgcaaagttactaaattaaatatgtttcacgagttaaatctaaaaacagtaaaagtaaattatataacttttttaaaacaaattgtgaataaattaaacattaatctaaaaacactaaaagtaaaaattatcacgtggtgtggtctagcacgagtcaaatcctaaaagataaaataacctattagacttactaatatcataagtacgactcaataaaaatatacacagttttatagataattattaataaacacaaataacaataaacaataaatttcgtttataaaaaagaaaaataaataaaatatttaacctgctgtgtcgtatcctagttattatagtattattaaaaaaaataagaagaaggaatgaattgtttttagtaattttgataaaagaacaattatttatttatcacgtaatttgataaaagtttttctttagtatttttgttgcatttgaggtctatgtatatatatatacgatttttctatattattatgatattcacgtatttattactatgatcttaaagtatttatttttgttagttcatataaacttatattgtcatacatatgaactaatgaactttaaactcatattgtcattaggggtgtcaaaatgggtaatccaactcaactcaactcataatcaaatgagtttaggattaaatgagttatgggttgacccaactcattttgttaaatgggttcggtcaacccataactcaattaatttgatggattgagttggtaaatgagttaacccatttaagtaataatttaattaattattattataaaaaataataaataataattattaattcattatcatcaaacttaggatatttacgttttgggcggaaaaatcaagggtttacgttttgggcgggaaaatcacgggtttacggttttggcgggaaaatcacgggtttatgttttttggtggaaaaattacgagtttactttttctcaattttatcgcttgtatatttaagaaatttggaaaaatattgattttattaaattggtttagatatgttggttaaacttaaattggcattggtttaaagattttagttggtttagttcaattttacaaaacttgatgagttaattgggtaaaccattgaaaccattaatcattacaacccaactcattttactcatcaaaccaattgactcaataactcatttgactcatcaacccatttgagtccaaatttttaactcattagggttcatgggttgagttgagttgagtttgacgcatgaattttgacatattttgacaccctaattgtcatactgtcataatctggtataaatagttaaaatttaaattattttgtaattaataaactaatttcctataaaatcatatgaactaaactctaagctttgaaaataatccccaaagatatttctattttatgatcttttttatattctactcaatacagattatggtgttatgttttattataatgatttaatctttgtaggatttaaattgctaggttggattatcaaattgttttaattaaattcttcttgttttagaaaacaattaaaaacacaaaacttatagaaaaagaataatgatctttatataattatcttttatattacaaaaactaaatgtaatgatgagggtattaaaattgttacaacaaattatttgagataaaaaaaaaagaagttcttttagagaaagtaaactttaaaaccacaaacattgaataacatatacattataattatctcctagatcacaaaaactaaatcatatatataaaagttggtcaactcagagagaataacatatacattataatttataacatatacattataatttttttgtgtgatgatgtgtcattcatatggagagagttggccaactttcatatatatgattttgagtctttaataaacctttaaaacattagacctaccaaataatttaatacacgatcatttctcttatctggatatatacaataacataagatttaaaagtattgacttaaatgatattttaatttttgctttctttttattctcttcatataattactcttgaaatcttgttcattttatctcaattatatatatatatatatatatttaattatgagcctataacaatgttgttggagtactatatcaagagaatacataatttcagaaatagtttatttataatcaagttagacaattttcaaatcattcaagacacgatattgatatatgcaatgacagaagatctagaagtgttgacttaaatgacattcaatttttgctatctttttattttttcatacgaatactctttagatcttgttcagttgatgttaatccaaactttaatcatgagtctatcacaatgttgttgaaatacataaaacaagaaattgatttatttataatcgagttagcaaattttaaaccatacaagtaacatagttatacataattgtataaaaatatcgtatattgttgttatatgtatttatgatagtgaaaaagtattaaaatcttataaataatcagctttatacatgaaaatatataaattgatatttcgagttataaataaatctaaccataaaaattgtaactatatattatggatctaattttatcaacaatacaagaataaacaaagaataagcatgtattagcaaaatgaacattcaatgtaaatattttttaacaattttcaaaataaacccacgcgtagcgtgggtactcatctagtaataaagaaataaaaaaacttaaaaccataaaccttgagtaaaataaaaattataatgatctttatataattatcttttcgatcacaaaaactaaaaaaaatgatgagtatattaaatatattacaaaaataagtggagataagaaaaaagtaaagaattattttatttgatatatgtgttacaatcatttagttaattataaagagtaaagacacatgaatatattagaaaacaatcaaacatctaaagtagagaagggagatggatattcaacttgaattataaaattgatattttttaaatttcatggataaatatgaaaattttgtcacagagttcaaaatttacattatactatatgagtttaaattagaaatatgaaattaaagaaagaataagtatattctagtaacttgtcagaattaaaataaaattgcaaaaaacaaattaagccatatagtctttagaaataaaaatagaaataaactcgtacgatgatgtcttataattgattattcaactcatgcaataacatatgaaaaaaacatttaggatttaagatatggtagatgtggatgagagaatggttatttataatatgagaaatcatggaagctaattgtttttaaaacaataatgggagttacaattttaatttattgtgtggtcgaatgacattgagtagaaaatattaccgtgggaaatccatgtcaaatatttaagatggtgtttgatcttggaagcagcatcttctaggttccttcaatatggtggtctcactctgggcaccccaaatttgatgtctcaccatcgaacacatacatttctaggggtattttttttttcctcctttgtctttttctagaaatcactttctaataatttcaacaagacgaaacctgctagtaagattttactcaacacaaaccaaaataataaaccaaatacatgatatgtacaataattacatagaatttcatattaatataagaaatacaaactaaatatacaactttttcattgaagataactaaatatgattatatcacaataaccaacataaaatacatcacacattcttaggatcttaactttgattatccattgttttttatatggcttgagagagttgatatcattgaaatatatggtattagagtttatgtgaatcattaatgagtttcgagatatatatgatgtttcgaagaccatgtttatataaaaagaattaactattagcttggagaagaataaaaaatccctaatgatgtaatatgaatttatttaaagaaacgattatgtataaaatgattgaattttaagaatattcgactgttgttcaaatagtgcacatacttggcatcaaaaataatttttattatctaatttagttagaatctgaatttcttactaacttttaattagtaattgttaacataattgaatttcggttgtaaccattgcttctttgtgtcttgaatacaaactgaaattgttttttttttttttgcttatagcatatgcaaaatctttaacaatataatatgtagttatcccaatagcatattatggaagaatggttagattttacgaatattatattgttatgttgatatgtggagagttggaatatactgtatatagaattataataaaaactagacttaagtttacatatgttagttgttatacatctgtactattatttgagcagtattttatggagtatccatacatatcaaatcatagctcaaagtttaagcgaggtcactacatattttagaaagattatgcgttctccttaatatatatgagattaataaaacaattttttttgttaaagagaatgaaaagaaaatataaatataaaataaagtaaattaaaataagaatattttttctgattcttcataaatctcaacaatattgttttatataacaatttttgagatttatgcgtattaaaaatgtaaatttattatatatatccgacaaaaaaaaaaatatatatacctctataatatatcaagttgtatagttttatgattattgtgccccgcacaagatgcagataatcatctagtttggtatgagcgtaaacccaaatgtgttggctcaaatgataaatatatgatacatatacttttgatagttaatattttataaaaaaactattttagttgcgtaaacaaagttaatatatgagaaccatatttaaccaaattcatgttagcttcttatgcatgtaattgttattaattaattgatgaagcaaacaatgaattagtgatatgattatggagaattatataattttcgtgaatgacgatgtaagaattaaagataatgatctatgcatatacatggttatatataaaatttgagttatattgttttttttagtaggataagatgagaacaatttgaattataatggtgaggcagaggttcaatatttatttgattataaagaagctaacatttgcaaatacaataaacaaataacaaaatctaactctttgactatttaattgattagaaagaacactaaaaattaaaatcatataatttaaatgtaggattatatatcggtaaatatatagtcacaatattttataaacataaattatcatgcagtgtattcagggctggtccgacatgtttaaatgccttacgcaaataaaaacaaattatgccatataatattttttttacaaaataacaaatgatatatagtaatatatgaaggtcctactaaaattgtagagagatttgcaaaagttcaatttttctactaccttttgcaataataccctttctttttgaccatttttaaaaatatccttttatttgaacaaaatgaccaaattacctatcatctaatgagaacatgtaatttgaaactgaaattttcccgcaaaaaaaagaatgagaattttttttcgaatttattttggcggaaaaattatatttggaatattttaggtgggaaaaatcaatagttcactttgtaaacctaaaacattttcaaaatagggataacatgttcattaaaagttaaaagagggtataaatgaaaatggtcaagaggaagaggcataattaaaacaggacagtcttgaaagagcattcttattaatttctcaaaattctatacaacatattttaatttcataaaaagtctatgagtaaaaacattagtttttaaatatagctctattttagatttttgcctgcaaaatcattgatcagactcatgtaatcgagcttttcaactataatttttttaatggatagcaaagccaacacatttacttgattaattattttttattttaaatcaaaatctaggcaccataccttacaatgtcttctatttgcaagcaatttaatgtttaacttttagaaaacacaatatatcactaaactatatccattaacaatatatttaattaacttttttattaatttaaaggcttaaattccacaaaatatggtgaaaagaaagctcaacaaaaaataaatttattgtaaagacctataatatttttattaaaatataaaagacttaaaagaaattctaaaatatacttttttttttgatgtcctaaaccatgacttcactaaatgaagttgatttgctgacggtgcaaaaaaggaaccatggctctttaacaactggtttgttgctactcatagatgggaggctgctcctattttgacttttgtcactactattgatctttgggtgcagattcgtggagttcctcttctatatgtgtgtgaagagactactttggagatagctcaagaattgggagagatcatcatgatggattatcatgatgctacctcaactcaaatagtctatattagagtaagggttcgttttggtatcactcacaaactcagatttttccagaggatcatctttgaatatggtgaaactgcaatcataagattccagtatgaacgtctcaagcgaatatgtagcatgtgtttctggtttactcagagactattgtccctatcgtcagtgtcctcacaacatagcaagagaaagggctctcttccgagatagtgttttcagatcaagtttgaattctcagtctcatatgacttagactttgtttccagctcccttgacaccgcctccaagagtagctcctcctccgctgaatcatgaagaattggcggctgcaattccatattttgccacaacaagagatgctcataacatatatggtgggagtctagtactacaagacaacaagggtcatcaaactctaacaacactccaccacgagaagcggcaaacttatctggtagtagcagagtctatgaagttggtcaatcatcaagaaggaatgaagctggagaagtacgaagagctgtaggggatccacgacttcagactcatcaacaaggtgctccaaggatgggaggaattctgaaacctccgaagaaaagataatcactctaaaaagaattatgtcataactttttgtttaaagactgcagtggaacaagtatcgtagcttcaaggcttgaataacaacacatagtttcagtatggtttttgtttaggacatacccttggcttggttatgtttgatgtttggtgtttcagtttaaatttctactaaacaatgttttttgttctgtttaccttaatcttgtaagtggaaagtccactgttacactttttgtaagatcacagtggtatgaaaaacaacttttcaggaaaaaagaccatgactttacttaaattttaattgttttataatttaaaaattaaatatattgctaattaccatttacccactcccgttcaagttctctttctttttgacacttattttttctacaccaaccagttagccacccaggttcataggcgaagcatcatgaaatttgatttaaaccattaaaccggtaattgcaaaactttccggtttagttctttcttacagaccaaaaacaaatcaattaaccgtaattgcaaaccaatccggttaaaatccaaaaacaacaccaccctcttcgaaaatcgttgagagtcctttttcacttcttcagatttctagggttcgctcaaacaaacgaagagaaactcaaattctgtaatctatagattttggaaatttccagatcggaaccctaaacgatgccgcgaagcagagacgaagacgatgaattagacggtgactacgaagcattagatttagaggaagaagaggaagaagacgaagaagaagaagaagagagaggaagaggtggcggcggttctagacggaagagaggaagatcgaattttatcgatgattatgctgaggaagattctcaggaagaagatgatgacgatgaagattatggtagtagccgtggaggtaaaggagctgctagtaagagaaagaagccatctgcttctattttcttagaccgagaagctcatcaagttgatgatgaagacgaagaggaagaagatgaagcagaagatggtaagtactcttgaattttcggaattcgtttttgttctttccatcgattcatttccattaggttaagattcgtgttgttttgtgattgagattggttctcagaagtcaccattgataagaattggttacttagtcactggaaatgttcactagttgaaggatttttttatgaaatgcagattttattgtggataatggaacggaccttccggatgagcgtggtgatagacggtacgaacggaggtttcttcctcgagacgaaaatgatgaggatgtggaagatctcgagagaagaattcaagagcggttctcctctaggcatcatgaagaatatgatgaagaagctacagaagttgagcaacaagcgcttttgccatcagtccgtgatccgaaattgtggatggtgaaatgtgcggtatgtgttttatcttggaagttagaagtcttacttctgtgatacttggaactgattcgttatgattttctcattgcaatgtcagattggccgtgaaagggaggttgctgtttgtcttatgcaaaaatttatagatcgaggagctgatttgcagattagatctgttgttgcccttgaccatcttaagaattttatatatgttgaagcagacaaggaagctcatgtgaaagaggtatttgatggttaccctgttatatgatatagatttttttttttattttctgccagtgatagtgttcgttagtgtttgtgactggttgtgaagaaagtacttttgctgttttttaacttgtgttaggcaatcaagggcatgaggaatatatatgctaatcagaagatcttacttgtcccgataagagaaatgacagatgttctttctgttgagagcaaagccattgatctatcacgggatacctgggttagaatgaaaatcgggacgtataaaggtgatcttgcaaaggtatgattcattttcatgtgtagtcattgataaaagtacccacaggctgctgaagtgcaactcctttgcaggtagttgatgttgataatgtgcgtcagagggtcacagtcaagttaatcccaagaattgatctgcaggcactagccagtaagctggtatggattctgtccatgcataagataaagatggtgctttttatgtttggtaaagatttctgatagagtaatagcaaaacttagcctgttagagaaaattacgaagactgtcctggcattctaaggtttttgagtgtgttctagtcattcaaacgatacaattatttagacacactttgcttgactaattgcaggacggaagagaagtttcaaagaaaaaagcctttgttccacctccacgtttcatgaacattgatgaagcgaggtactccttttagatactgtacgttgcactataatattataaagcctgttatggagaagggtttaccacagtgctgaattttcaaaaattgtcacatgcctttagggaactgcacatacgtgttgagcgtcggcgtgatcacatgactggtgattactttgaaaatattggtggcatgcttttcaaagatgggtttcattacaaacaagtatcattgaagtccatcactgttcagaatgttacaccaacttttgacgaacttgaaaaattcaataaaccaagtgaaaatggagagggcgactttggtggtctgtcaacattatttgcaaacagaaagaaaggtcatttcatgaagggtgatgcagttattgttatcaagggggatctgaaaaacttgaagggttgggttgagaaagtagatgaagaaaatgtccttatcagatcagaagtgaaaggtctccctgtaagcatccttactctttggctgttcgtaactgcttgcatgtttttaaaatgatccagccaagaataactgccgagattgactcttgtgttgcaggatcctcttgctgtaaatgagagagagctttgcaagtactttgaacctggaaatcatgtgaaggttgtctctgggacccatgaaggagcaacaggcatggttgtcaaagttgatcaacacgtgcttatcattctgtctgacacgaccaaagaacatgtaaaccaactttgtataatggtttgagcgtatgtctgcctagtagggttactaaatcccaagagaatatacttgtaggtccgagtgtttgctgatcatgttgttgagagttcagaagtgacaactggtgttaccaaaattggggactatgaacttcatgatcttgtgcttctggagtaagtggaatacctaatcaccttgaagtaatgcatctttcctgtttacacgtgtatgaaagccttatatatttgatgcagtaacctgagctttggagtaattatacgactagagaatgaagcttttcaggtaaattgtcaattttccgagaataccactagttaagtctacgcttaacagctagaatttgaaacttttttcttgtgggatacttttcaatgtcccagtggatctaggaataactctgtttgaatgtccttaggttcttaaaggggttcctgacagaccagaggttgctcttgtcaaactcagagaaatcaaatgcaaacttgagaagaaaatcaatgttcaagatcgctacaaaaatgtcattgctgtgaaagatgacgtcagagtgatcgagggtcctagcaaagtaagtacctttgctgtctggttgttgttgcttaccttgctcaattttcctgatatcatatcaattaatatttatattctagggtaaacaaggtcctgtaaagcatatctacaaaggagtcttatttatatatgatcgacatcaccttgagcatgctggatttatctgcgctaaatgcacatcatgcattgttgttggtggatcacgttctggtgctaatagaaatgtaagtgtcttgttgtgatgtggccatgttttgttatattttcatcaaactgttgcttcaccttatctagctatttttctactctagggtggtgattcgctttcaaggtatggcaatttcaaggcacctgccccagtaccctcatctccaggaagatttcaacgtggcagaggcggaggatataataactgtatgtttgatcttttctttctattttggttatgagtaagaatacgtaatgttttgtttagttgatatttgcattcttcactggtctgctgcacttaatacttcttcaggataagaaaatatttccactatatatgacttgtacatttttctggtagtacaatgttttattgctttccatatattttgtgacatgcttatacatcttatctacgtaaagtttcacatactcttatttgtatctttaaatgcagctggagggaggcatgggggtggaagaggacggggagacgattctttattgggtactactgttaaaatccgtctaggacctttcaaggggtataggggacctgtagtagaagtgaaaggaaattcagtgcgtgtagaacttgagatgaagattgtgacaggcaagcccttgaattcacttctccgcgtgtgggtttctacatgtcgaacgaattctaacaatagttcatatatgcagttgatcggggtgcaatatcagataatgttgcgacaacaccgtttaggtaatctacttatttttatatcattggttattttgacttcaatcattatgaaggactttgattttatcatttgaatttacacagagatacatctcggtatagtatgggaagcgaaacacctatgcatccttcacggactccacttcatccttatatgactccaatgcgggactctggaggtttgttttttagatccaatatctgtttatttttaatgttatataacacctcctctgtaatatgttctcaagttccttggtgattttatgtaatttcagctacaccaatccatgatggaatgaggacacccatgcgtgatagagcttggaatccttacacgcctatgagtccacctaggtaagtttgtgttgcgtttctattttcaaaagttgatttcctctttaatctcctcttggttctcttaaatgctgttgtaatttttgcatcaatgtgaggttatctgttatgtttacaaacatggctattgtctctcaaattattctcagaaattcttaacacatgtctgagaattgtaaatcttgattgaagaataaacttggatatctctcaaattatggttgttatggcatcagggataactgggaagatggaaatccgggatcttggggaacgagtcctcaatatcaggtaagatttatacatctattgttttgctttcaaccttattattggcttaatgtctctgacatatgtagtcgtgttaattacgcattaaaatcgtttgtgttgcacttgtttccagccgggaagtcctccttcacgggcatatgaagcaccaacgcctggctcaggatgggctagtactcctggtggtagttactcggatgcggggacacctagagaccatggttcagcttatggtaagatgcgtgtaatctttttcaaaatgttgacttttctagtctggcccgtctttttcttacataccttgtcatgcagctaatgccccaagtccttacctgccatcaacacctgggcaacccatgacaccaagctcggcttcatacttacctggtactcccggaggacaaccaatgactcctggaactggcctcgatgtcatgtctcctgttataggtattgtctattgtcggggtaatagtcaaaaggataaatgtttagtatagtccgaccttgcatcttccttctctcagtcccccttagttagaagtttccgtttctatggttgttttcttagcttattgtaaatgcaacaggtggggatgctgaagcatggttcatgcccgatattttggttgacatacacaaggctggagaggacaccgatgtgggcgtcatccgagatgtttcggttcgtcttttacctttcaccagttttatttaaataaagagaacttctagtgataaacaaaaccaggagaaaagtcaatgatcaaagttacacatagagaagctcgtagaccttgactgcgagaaatgattctgttcatgttgagtgatagctcctttctaatgctaatattcttcctatgtactacttttgtcaggatggaacgtgtaaagtgtctctcgggtccagcggtgaaggtgacactataatggccctcccaagcgaactggagataattcctccgaggaaatccgatcgtgtcaaaatagttggcggtcagtatcgtgggtctacaggtaagctgatcggaatcgacgggtctgacggtatcgttaagatagatgataatcttgacgtcaagattctggacctggccttattagccaagtttgtgcaaccgtgatactgttctaatgaacgttaacttttatcttgtgagactcgtatattgtaatcttatattcctcaatagtttataaagaaactttgaatcttgtttatcatcagagaaaacatctgaatcttatctccagttttgtgtttttcttgtaatgcctctatcttttctatatttttttagttcagaacgttaataatcgcctttaccattttttccctacatacctaacgattaagagtaactgtctaaagtgtagtaaaattaaaatgatagtaatacatggtttggcttgatttccttaaaaacttctaagcagcttgtgttttaaaacacacccatgaaaggtttcttaactttacgtgaactcaaaggcaccaaatgccgccagtgcgatgcttgtgaattgtgacgatcgatcgtatatccactgccctttggtgcctttaaatcaattttcgggatatgacccgattgatagaaatatacagaaagtgatacggcttctttcattctctacaagattggtatttatacatcgggtgttggaactttttttaacataatagttttccggtaactttccgacaaaaacggctgaacggaattgtcagatcgttagtgcattggaaagctggtaaagagtactacaagatggtatactcatacggtttgccagctttccattgcactaaccacctgacaattcggtttggccttggtctgaaagttaccagaaaactattatgtcaaaaaaattccaacatcaggaactcaagaatcatggataataatatccaaaggttcccctaaacatgggcttactatagattgtgaggcaagttagtgatgaattaatggagttgtgtactgtgaacacaatgaataatacgttaattctacgcagttatatctagagatgttgtggtgggtaaaaaagcccaacccgacctgaacccaaaataaacccgcccaccaaaaactcaactttagaaaactcagatgggtttttgattaagtgcgtaaagcccgaaaaaactgattattccgagactacccgtgggtacccaacttggtttttatcatttttttagagtttatttttaactgttaatatactattatatgtatgttgtatctatattttgcttattaatatattttaaattatatttattttctgtattacatatatatttgatgggaaaaaggttgaattgcgtttttggcgggaaaatgttaaattgcgttttttggagaaaaaatgttaaattgcgtttttggcgggaaaatgttgaatatcttttttggcgggaaaatgttaaattgcgtttttgaccggaaaatgtgaaatctttttggcgggaaaatgttgaatgtcgtttttggcgggaaaatgttaaattgcgtttttggcgggaaaatgttgaattgcgttttggcgggaaaatgttgaatatcgtttttggcgcgaaaatgttgaattgcgttttggcgggaaaatgttgaatgtcgtttttggcgggaaaatgttaaattgcgtttttggcaaaaaaaatgttgattatcattttttggcgggaaaatgttaaattgcgtttttgaccggaaaatgtgaaatctttttggcggaaaaatgttgaatgtcgtttttggcgggaaaatgttaaattgagtttttggcgggaaaatgtgaaattatttttggcggaaaatgttgaatagcgttgttggcggaaaaatgttgaattgcgttttggcgggaaaatgttgaatgtcgtttttggcgcgaaaatgttgaattgcgttttggcgggaaaatgttgattgtcgtttttgacgagaaaatgttgaatgtcttttttggcgggaaaatgttgaatgtcttttttggcggtaaactgttaaatcgcggtttaggggaaaaaatgtgaaatcttttttgacaagaaaatgttgattcacctgaaaaatgacttaaaaaaaaccgtgggtacccataacccaataaggtaaacccatatgggttttatttatttgggtacccagcccattttaaacctgtattttttttctagaaaaagtagatttatgggcttaaaattttatgtgggttttgggtacccagtgggttttaacccatcattaacatctctagttatatcaaagtgatcacataatttttaaataactatatatataatggtcaaacgcaataaagaatacgttgattctactcatttatatcaaagtgatcacattacttattgactaactatataatggtcctaagtcctaacacaatgaataatacgttgattctacacattgattctaacaaatatctaaatatcatatatcgaatatgagtatatgaaaaaacagaatggatcatgatatgctaaagaacatgatagtgagtttaagcactgtatctctgtatcatgaagaaaaaaatcacgtaaatatatatatagatctattatgaatgaattatcacgatggtatcatcacccaatcaatgtgacctttgttctcgatgatttggaattatacgataaattaaagtttaataggtctagacattcagatacacatacccaatcgttttttttttgggtttcgggtctctttgggtaggggttgacaatcttgatattctaaaatttttgtttgggttcgggttcgattattttagtaaaaaaataaataaaaaagtccaaaaataaccaaaaattccaaaatagttttgggttcggatcagattttttattcatatatactaaaatctgaccaaaatacccgattacgagaaaatacattggttactctttaccaaatgtaaacaaaaatacttaaattacttaaaagaaaaaataacattgattacttttatctcaaatatatccaaatatatatgtattactacaaaatatatagtatatccaaatttataattgtaattttgagtatttaaggtattataaatataaatataactaatatttttaaatgtatatttgtattcgggtatccacgggtattagatttggtttaggttgagttcggttttttttttttgattgtagacctattcgggtaattttaaaaattagactcggggttggctagtttttttttttgggtcaagtagtacgacatatgtaagaaaaataaagctaactattctaacattaccgttccatttttgacagctcactgtaacattataaacagacattacaaaccaaataaattctttttacaagcctaaaagtcatatttgcaagcccaacactaatctgcccagtaaacaataattagggtttcaattaaaatttggaaaaatcacggtgtcaagagtcaagacataaccaaagccgagatttggagatgaaagaaaactagatcgagtgatagaggagaggagagaaagaggagaaaaagagagaatagaaattggattaggaagtgggtttgcttttagcccacgtaagttagtttgaaagtcaacgtgttgtaatttgtaaacctaattggattagaaagtggggtttggtttatcccataacttagcacctctatttatataaaaactctagtcctaatcctattaggaaagcacttatttagataactcctaaagagatttgagcttatcacttcctaaaccataactcggttaggatctaaaccataactcggtttaagattacttttattcttatgctttctttgaagcttaatccatgttgtaatttgtaaacctaattggacttgggtttcataatcctagatagatagtcacatcaaatcattcgatttaagagagatcagttcgaggaaccaaaacctgagagacaaacatgtctgatcaagtttccggtaaaagcactaaatttgggaaggtaaaaataacttcaaataatatggatcatcattcatgtgccgaagaatattcaggtaatatattcaacactctacgtgctagattttgtttttttttaattgcatgatcagtcttagcaattaaatagttaggtgtgaattccttttagtattgttgaattccatgcatctcctttatgttcgtcaacgtttcatacgcaagatgtttcacatctatggctattttcttagcttttcgtatttgccacagatgaggatgttgaagtgcggttcatgcctgatattttggttaccgtacacaacagcgaagtaggcgtcattcgagatgtctcggtgagtcttttgcctttaaccaactccagaattttatttaatacaaaagagaacagataatgataaacaggatcaccacaattcaaagacaaaaggaccggcgatatgatgctagcttccaatgctggctccaaagtcggtttttagtcttctaagctttctttacgaagaaaatcttagctctcaatctacctcctatatataaattacgatgcacttgatgtaaaaaagtttatttacttttgaatcttatttaacattacgtacataaaaaaaataatgataaacaaaaccatacaacaaagttcaatgatcttgattacgagaagtgattataaatgatagctcctttctaacgcatacattcttcccatgtgcttacttttttgtcaggatggaatgtgtaaagtgtctcttgggtctggtggggaaggtgacactataatggtcccctcaagcgaattggagatagttcgtccaaggaagagtgatcatgtgaaaatccttgggggttcataccttgggcttacatgtaagctgatcggaatcgacgggttggatgctattgttaagatagatggtaatcttgacgtcaagattctggacctggccttattagccaagtttgtgcaaccatgatagttttaatgaaagtttagtttcatcttgtgagaccgtctattataatttcaaatttctctacatttgtatttgttttctacatttttagtttagcatgttggtcccctcccttgcaagatccccttactttttttccaacctattatgaataactattgatgctagatttatcaagtgaattaaagattcactatatgaccaaaacaagaacggctttcgctagtttatttgaagccattgaacaagacatatggtgtaaaaagaaaagatcgcgttggctacattgttcaatgacttcttctctttgacactcatgtatattctcattcactccatcgttcatcaaaagtttcagggtttttgaaatatgtgaataagcattctcttgaaatatgtgattctattgattttctcttccatctccccttgtttctctttaatatgatgtagtgagtttgcatcaatgtaagattgtttgttctgttatacaaacacaacaattaggggtgtcaaaatgagttgttagctcatgagctggctcagctcgacttgattatttatgagctcgagttttatttttaaaagatcatttaataaatgagtttaatgattgagttttatttagctcgagagttatacgagctagctcatgagtttggttttttttctgaagtaatatatacaaaaagttaacaataaaaaaaaatatatattttttctattaaaaagagaaatatattttagaaaatatataatttacagaataatattagaaaatatataatttatttatttgcattagctaacgagctagctcatttagcttgcgatcaagatgatctgagtctaaatttgtattttaaaacttatataataaatgagctgagcatagctccctttttctccgcgctcatcatgaattgagctaaggtgagcgaacaggctcattttgacacccctaaccacaatatgattattgtttcaatatttttagatattttcaacagatgtatgagcagggccggccttgacattttgtgggccaaagcccaaaacaaaattaaagttaatttagaagttttaaaaatttggggccaattattggaaaaatgaataaaataagggttgttttgtaaataagttttgctgaataaaaatggaggccacagcagatgtttcattttgttgtgtccacggccagccctgtgtatgagaatggtaaatcttgaataactaggaagattagagaggccattgatatgggtgtcatccggaatgtttcgcttagtcttttgccttttcacaacctccagaattttttactctaaaagataaacaaaaccagaaagttcaatattaaattgtttaattagctatattagtatcagattttgtctaaagaaaaagcagaaaagaatatgtctttgctaaactacccttgaaatttggacttccatttttttagaacatgtacaaaatgaagaatacaaactctaatattcgtaaaactctaagaaatgtattcttaatattttaaacgaggttttatcttttaaaaatttactttttcaaattaaattacaaattgtttccttcaaatcacccacattcttttaaatcacaaattgttttcttctatttcctcctttttaaatttgcttagagaagagtcaaaaattatgtaggggtatttacggcaaaaatgacaattcataataaaaatgtatatgagcaaacttttttttttttttccagttttcccatttaaatttggatacacatgtcctatattgtattgtgtatctttttttcttttcttattgaataaatttgccaaatggaaataagagtaaaattgaataaaaaattaggtcattacaaagatgtgacattgttttaaaatattgtccaaatcttgtttttaattacaaatttactcttactttaactactgtatattgggaaatatttgttttgagtgacgtgatattccgttatatgtaaaacctaaggttaagaaaaacaaaaaaaactttcgagcaccatttacgaggtctcaaatatgaaagtagatttcactctttggtccttgtttctctttttgcaagcattttgtaacctcacataacattctcaactaggtgaccactatcgctttctctctgcgattctttttctggtggtcagagatccttttaacacttatccgcaagttttatcgctccgtcggtccttcattccggtgagatttttattcttcctccgccgtttgactttgtcgtcagtgagatccatctccggaacttggcagtacagagatttgctgatgacctctcccctgtctcactttgcggtgaagacatttgtgaagagtccacttaatcgtcttgctatgtcgacaatcccaaacaaacagatccttgctaaatcagatcattattcgctgcctaaccatcttcgcggatgagaaactagggtttcctggttgggtcaagatttgagcatgtagcaagatgggcctggtgaatttaaagaccaaacaatcaatttattttgtaacccactcgccaacgttgttaaggcctgtttttcttaaaagtgataacccatgtcatttcttcctttcacgcttctagttcatcaatggatgttgaggctgtgatatcgtatttgatgaagcttcaaagaagttctgaaatgtgatggtgctaatcaagatgtacttccactctatttcgaccagcactcatgtgataagcacataaccagagtaaaccggtgtcatagaaaagagatgtggtctcgtgatggctcctaaactaatgggattgtactctccactctccacgatcttagtagtagatttagtggttagtttctttcttgtttttgtgtatttaaagacttcaatgtcaagttgagggagacttgaaaattgacaaaacagagtttaactcttgggttactttgtgtgttcttctgttaagacaaaacacatctctttggctttgaggagggaccacctatcatcagaaaccttcgtcttgagaaaattttgacctctcctctccctccccgatcttctggtggatctgtttggcgaactgtcttcagtttctcatcgcatagtatgaaagaataccaatgtaagtaaaaatttgtaaaataaataaattgagagaagaccgatagacaaaggtggggcccatgagtctgagagaggacgtgggtactcacttgtagggggcggtcagagtgtcataagatcttccatctattacaaacttttcaaattgtgcatcttttttagaaaatttattgagcctttatctttagttttttatgtactatttcagtttgaagtgttaagaacctccaaactgaacacaaaaagatattccgttacatgggcgtctataattatctagttttagtatagggaaaatcgagaaaaaacttccaaactgaatcattttcccaactgaaacttccaacttttttcgtttctatattaaattatttcaattttcaacgaaaacctccaatttgtttgttaccaataaaacttctaactaattcaattcccctataaaaatactcccttcaaatcgtcagatttaatccatatcaatgattgattaatggtagtcaacttttaaacgatattttttccgtttatttagttttaaaaattcacatgttatttacaatagaaaaactaaaagtttaaattacaaatcataaaatacattttttggtagttgtaaacgccatttactattctgaccggaattgtaattgaccattagtcaactattgttcaagctcaatttaaaaattaaggtgtagtaagatatttggccaaaacaaaaaggtgtagtaagataaagataattagttaagagtttttaatggaaaccacagtttttagattttcttggaaaagtgtttatatggaaacaaaaaaaagttagaattttttttttccatttatatttattatttattacaaattatgagaactgttacatagacgattctatcatggacaattccttccgacctttattagatccacgacagacaacacattcttctctttctcgatgcgcttgatggacatcttcaagatcttctctgcgtaaaatcttggcaaacggctataattgtacttcgttgtagattttttgcacacttgcctccattaatctgcaaatctgctaataaatcgcaatacctggaactcgaaccctatactttttggtgtaaaaacattaatgaacccttggtcaatagttagaagttttaattgggaaaatattttaacttggagatttttgttgagattttcccattaatatattttcaaaatatagtatctaatctcgcccacttgaattgttttatttttcttatattttctttcgtttttttaagaagtttgttcgttccccatagaatggacgttatcttaccacatggctttcacattcgtattatgtgcttttagattgaataatatatgttcaaactacttacttcaaattatacttttaagaatatctgttatatctaggataaatttgtaaaataataataaataaagaaaaaattaatattattaacggttttggtgagaccctgttgcattatataattgagaaatatcttcatccatcgctaacttttgtttgttttttcatgatatttcggttctgaaactatatatatatatatatatatatatatataaatcatatagtaatctttttcataggaactgaaattgtttcaaagaaacaacatcgatagatttattaaaattgtttcgataaaatttattgagtttattagacaataaaagaaggaggacaagtacaccaatcttttagagttaaacgacatcaaaaaatgcaattaaataacaaaaatgcacctggtctatgaccaaagaaatacatttcagttcttatatatttgaaaatttatattttttttcttttattgtttatcatatggagggggtggtggagagttgtagatgatggaatatgaggaacaaacttgtaaacatatggtggggtggtggagaactatagataaatggaatacgaggagcagaattgtaaacatatggagggggtggtggagagctgtagatgaatggaacacgaggagcagaattgtaaacatatggaggaggtggtagagagctatagatgaatggaatacgaggagcagaattgtaaacatatggagggggtggtggagagctgtagatgaatggaatacgaggaacagacttgtaaacatatggaggtggtggtggagagctgtagataaatggaacacgaggagcagaattgtaaacatatggaggaggtggtggagagctatagatgaatggaatacgaggagcagaattgtaaacatatggagggggtggtggagagctgtagatgaatggaatacgaggaacagactcgtaaacatatggaggtggtggtggagagctttagataaatggaacacgaggagcagaattgtaaacatatgaaggaggtggtggagagctatagatgaatggaatacgaggagcagaattgtaaacatatggagggggtggtggagagctgtagatgaatgaaatacgaggaacagacttgtaaacatatggaggtggtggtggagagctgtagataaatagaacacgaggagcagaattgtaaacatatggaggaggtggtggagagctatagatgaatggaatacgaggagcagaattgtaaacatatggagggggtggtggagagctgtagatgaatgtaatacgaggaacagacttgtaaacatatggaggtggtggtggagagctttagataaatggaatacgaggagcagaattgtaaacatatggagggggtggtggagagctatagatgaatggaatacgaggtgcagaattgtaaacatatggagggggtggtggagagctgtagatgaatgggatacgaggagcagacttgtaaatatatgtagggggtggtggagagctgtacacgaatggaggaggagggggagacttataaacatatggaggtcgtggtggagagttgtagatgtatggaggaggtggtggtggagagttgtatacgtatggaggtggtggtggggagctatagagataaggagatggtggtggagacttgtaaacatatggagatggtagtgggggactgtagacatatggttgtggtggtggtgattgtggagagtatttgcactgagcacttgtaggcactacaacgacatagaaggctaagaccaacattagaagagatggccaattactaggattgaccatgtttattgaatttgtgcactcttgtttctggtgacaactttttgtaaggtatagagaattctttatgtatatctgaaatgtgttttacatggatggctctaccctatttatacaaaagctaatgtttaccctaattctagtaatgtacataaaatatcctttaaaaagcccatgaagcccaataacaatatatatctcaataccttccccctctaaagttagagcaatgaggtcttgaatgccgcctgattagggtaaaaccgtttgaaattgttttctaccaagtgcattggtgaacacgttgatatgctgaattattgttgaaacaggcccgacccatggctaaagcacatgaagctggacgttttagcatgactaatctatatattaaaggcatcattttgtaaaagcagatatttatttttgtgcccttgagatgtcaagtttgagcctcatttatgtaagaaacttagaatgaaggagaaatattataactttattaagctcttctctcttagttgattacaagcgattgtctctcttatttatacaactcaaaacctctcataaaccctaggtgccttaacacatgtcgtttgagcacaggaggttaagagcgtcatatctgttctttgtctctaccttcggtacggtttcacagctcaccattgttgcttttgcaacggctctctccttcacgcctgcaactctgttctctttgtcttttgtgagttgcagaggcaatcttctgttgttgggcttttcgttatgttgaatggttgggcttggtgtcttggcccatagcattctgtttgggagactctgagctgagcagagggtttgacccaatctctgttgtcgttgactgaagcttctcctttacactcccccgcaaacttggtgtgggtggcaaatctacacccagtttgtaccttagcgaagtgaaagcatcgaagggcaatggcttggtgaatatatcagccaactgctggtgggatggcacatgcttgacaatcaacgaacccaacgctaccctttctctaacaaaatgatagtgagtttgaaagtgtttagagcgtgtgtgaagtaccgggtttgcagcaagatagatggaggaaaggttgtctccatagagctccggtggatcaggttgtggaatgtggagatctctgagcatgttattgagccagatgatttcagaagttgtatctgacaaggctttatactcggcttctgttgagctcttggagacagttggttgcttcttcgacgaccaggagatgatattgttgccaagaaaggtacagaatcctcctgtagaacgtcttgtttctcatcactatcactgaaggctcgaagcttgaagactgcatcattatttgtagcagacttcttttgctttgagtgttgactatagtcaccgtcagtgtaggttcgaagagtgaagtctgtgttcttgttgaagagtaaccccatggttatggttccctttacatacctaaggatcctcttaagcagattgtaatcagctgttgttggagcgtgcatcttttgacatacgaagtttactgaaaactgaatatctggcctagtcaatgtcagatactgaagcttgccagccaaactgcggaagtaagtggagtttgagaatagctcattttgtttaggaactttgtgaagttgaactggcaaaggagtaggcattggtgcacaatcgatcattcctgcgacttgtagaagatcctcagcatacttctgttgagataagaacaagccttggtcagagttctgtgcttgaatcccgagaaagtattgcagagatcccatgtcagtcattcgaaactccttgctcatttcctgcagaagtctatccatgagaatgttgttgctaccggttaggactatatcatctacatacaaaagtagaatgagcacatctcgtccttgttcatagaagaatagtgatggatcttgtatgctgcaaacaaaaccaaactccaacaagtagttagtaaacttatcataccaggctcggggagattgttttaacccgtatatagatttgtggagatgccaaacatgatttggttttgtcttatccacaaatccagctggttgatgcataaagactgtttcatttaagtctccatgtaagaaagcattcttcacatccaactgtttcagattccattccatcactgttgctatatgtaagacaagtctcactgtggctgttctcacaactggactgtaggtctccaagtagtctattccttcttcttggtgatatcctttagccactagtctagctttcaacttgttcaaactgccatcagcatttattttggttctgaacacccatttacttcctaaaacattcatgtcaggtgtgtatgggactaaagaaaaagtgttggtttcaacacaagtgtcaatttcttcgcccatagcacctttccagccttcatgtttcagtgcttgtgtcacagtttttggttctggatgtgatgctttctgtgttagaaggacgtatctggggtttggtttgactactcccttctttgatcttgttaccattgggtgaacttgctgaaccggatcaactgcagcttctgtcctctgattttgatctgaagttccagctgtttctgttgactgaacaggagaacgttgagtggcactgtcttgtggactgagagcgttgtcgcctatagaagcaggatctgagcctgtcgtacgctcaatgcactctctgtccacaagagccggtgactcggcttgatttcttggtgagtttgattgaatgtctgtatctgcaggttgttcttctcgttgtactgtggactgagcagcttgaggtgtgacatttggtggtgaaacttgaacccgtgtgactggtagaggaggaaagtcgtcttcagagaacacagaagcagcttgagtttcactttgattcttttgagaaggcatgaaattctgttgccacgcttcaagaagctttgttgatcccaagttctgcaggtgaagataggtatcttggaaaggaaaagaagactcatcgaagatcacatggcggctaatataaactcttcctgttggaggatagatgcatctatagcctttatagcgatcattgtagcccaagaacacgcacttaagagaacgagggtcaaacttatttgatgcatagtttcttagagtgggaaaacaactgcagccaaaggttcttaaagctgaatattccggttgatggccatgtaatctctcaaatggactcatctgatttggtagagtagttgtaggaagaatgttgctcaggaaatttgaagtgaagaacgcttccacccaaactttttgtggcagcttagctgagaacagcattgacagcccaagctctgtgatgtgtctgtgcttcctctcagcaagtctattttgctgaggcgtgtaaggacacgatattgactgttgtataccactttcctctaaatgtttgagaaatctatggcttataaattcaccccctccatcacattgaaaggtactgatcttttgattaaactgtgtttcaacaaacttttggaacttgcagaaagtaatgtagaaatcagccttgcatttcaaaggataaaaccagcaataacgagaccaatggtcaatgaagattacatagtacttaaacccctgatttgacaaaactggagagggtccccaaagatcacaatgaactctctctagtagtctagttgcaacaaactgagaatctgaaaaagaaagtctactactcttcccaatctgacatgattcacacatcctattggtgctcttattgatgatgatagctttagtactgactaactgctgcaggatcttactattcggatgtccaagacgtctatgccacacttcatctgaggctgcttgctgtctagatgaatagaaggcttgaacaggtggatccttcagcgtgtacagaccattcttattttgacccagagtgagaagcctctttgttaccttgtcctttacaatgaccccattagcatcaaattcaagagtacatgggtaatcggttgtgagttttgaaactgataacagagactttgcaatatcagggacaactaaaacatcaagaagagggagagtacctgatgtcgttggtaagagagcagaccctgtgtgagtgattggtaagaagttcccatctcctaccatgaccgtgtcagatcctgaataagctctactctgctgcaggtgatgaggtgagcttgtaacatgagcagtagctgcagagtctgcacaccattcactgcctgcttgatctgtgacatcagtgattcggagagcagcgagagcagttggcatatcttcatgctgatatgcattgtcaaagcgatgccaacactttagagccggatgtcctatttttccacaaatctgacacactggtctttcaacagactgacccgaagacacagaagaaccagaggagatttgctgatgaaatccccttccttgtgttgtatagcctccacgccctttggacttttgagatgaactgcctctgcctttgttgtagtaggttgttgagtcataacgctgtgtattgaatgcaagatgaggagtgatgcttgcagcgtcagtgtaagccaaaagacgatcatcaaaaccagtaagacgaggagagatgtcttcaaaggttgtaggaacagtatccatggacccctcaatagatgtcttaatcggttcgtactctctgcctagaccatgtaaggcagcaaaaattttcatcttttcattcactggactgccaacagaagcaagttgctcacagatagacttaatctctttcaaataatcactcatggatctgtcacgcttttcaatggtttgtaactttctttgtagttcaaacaagcgtgaagaagaaacacgattgaaatgttttgctagagctagccatacctcctgagacgtggttgtgttgacgacttcagagagaatgtcttcagacagagatccaagaagccatgaccggaccacttgatcagatttcacccaagagagatacgcagggttcactgtctccacagctgcagcttcagcggtgagtggagtcgcaagaacaggatctggtggtttgagagcgccggtgacgaaacccagtaaaccttggccggagagaaacgattcaaactgtgttttccacagaagatagttccttccatttagtttgacagtaacacaatttgaaatgtttaagagtggttgagaatagagctcaataggttgctccatggctctgataccatgtaagaaacttagaatgaaggagaaatattataactttattaagctcttctctcttagttgattacaagcgattgtctctcttatttatacaactcaaaacctctcataaaccctaggtgccttaacacatgtcgtttgagcacaggaggttaagagcgtcatatctgttctttgtctctaccttcggtacggtttcacagctcagcattgttgcttttgcaacggctctctccttcacgcctgcaactctgttctctttgtcgtttgtgagttgcagaggcaatcttctgttgttgggcttttcgttatgttgaatggtgttgggcttggtgtcttggcccatagcattttgtttgggagactctgagctgagcagagggtttgacccaatctctgttgtcgttgactgaagcttctcctttacaatttatgttatctttttttggatttgtttcatagagttttgtttgttaataggctaaaaatattattgttttgcttgaggcatagaaatagtttaggcagaccctagaaatataagtccataaattgcatatgtgatatataatattcagtgtgcccaacacactctcaacccactgcaactttttcaacgcagcaaccatagcttggacagagacacgttgagaccatcaagtttctttgatttccacgacacaagagaatcagcaagttgattcaatatttgaccatccacttaatgatacataattaagattacctgattgatctctgtattttttatatcacttcttttatttttttgacgtcacatgcaagttctgataatcgcttataaaccaaacataacaattttgagtctcatctatcttatttatgatattgtaatgctaactacaaaatgtgagtacgagaattaattggtctgttaatattttatttttttgttacgcatgtaaatatcagaaatataaaaagtttggttttacaacatatgttaaacctataaatatgattccttggcaaaaaaaagttaaaaacaaggagatcaaacaaattcttgggataaatcttggtagatgtcatcgcagccaacacaccattaactttcgaaatacaaacgaatccatgcatgctttgacctcatttccattttaatttttacatatcaaagcctaggtcaaaaaggtggacctatgaaggtgagcttgggctgcatgtttgttgtgggaggagccctcaatgtgacacgatcggaagggtgtctcaaggagacctcgcgaataaggagtgctggttcccgggtgccaaggtttcgctagaggggaggctaaagattcatggtccttgggttaagtggaggattcttgggagacagagcaacgtctaacatgggaagattagaaaataattgcttttgatatataagtcaaatctaactccgattagtagaaaaccttttggcaagaaggctaaaaacaactatatagaaagagttggattgggctcggaaagctcaacaatcttgacgttaagattcatgacctagacctattagccaagtttgttcaaccatgatactgttcgaatgaacgaaaagtatatcttgtgagaccgtataaattttgtcttataatcttaaaattctctatagtttataaagaaactttgaatcttatttccagttaaaatcctttgaacgtttatctcttgtgagaacgtagaagtatatctctatagttttcaatgttgtgctttttcttgcaacgtttatatcttttctgggcacttgtaacagccaagaccaattcacaagtagatcagctcttgtatgaaattaataggatttgccacgtcgaataaaactatagtttcagcttttgtgtgttgttattacttttcaacagatttatgtttgaatggattgtgatagaatagaagctgtttaaatagcatccattatacgacatgtagtttatgaatatgtcttacatttgagtatgaaactttgaaattgtcaatttaaattttgatactccattatattacatcttgtaattttaaatatggatgttcaggtatttttttttttaattttataacaaatttccaaaaatgtttcgttcactgttcttctgttcttcttcatttaactaaatgaagaacttcttcatttaactataattgaaaaaaacaaattgcttctttatgattacataattttaatatattttcatactatatatttcaataaaatttattgagtttattagacaataaaaatggaggacaagcacatcgatctcttaattaaagagttaaacaacatcaaacgaagcaatcaaacaacaaaaaaatgcacctggtttgtaaccaaagatatacatttcaattcttacacatatgataatttagataagaagttttatttcatgaatatgatggctgatatatgaaactataattgttcatcatttatatatttgttagtatattggaggagggggagagctataactatagcttggagatggcggaggagatgatggtgggggattgtagacgtatggtggtggagaactgtagacataaggtggaggcttgtaaacatctggacatggaggtgggggactataggcgtatggtggtgggctgtaggtgtatggtggtggagaactatagacgtaaggtggagacttgtagacgtatggagacggtggtggactgtaggcgtatggtggtggtgaactatagacgtaaggtggagacttgtagacgtatggagacggtggtggactgtaggcatatggtggtggtgaactatagacgtaaggtggagacttgtagacgtatggagacggtggtggactgtaggcgtatggtggtggtgaactatagacgtaaggtggagacttgtagacgtatggagacggtggtggactataggcatatggtggtggtgaactatagacataaggcggagacttgtagacatatggagatggtggtggactgtaggcatatggtggtggagaactatagacgtaaggtggagacttgtagacgtatggagatggtggtggactgtaggcatatggaggtggagaactatatacatatggtggagacttgtaaacatatggagatggtggtggactgtaggcgtatggtggcggactgtaggcatatggcggtggagaactatagacgtaaggtggagacttgtaaacatatggggatggaggtggactgtaggcatatggtggtggagaactatatacatatggtggagacttgtaaacatatggagatggtggtggactgtaggcgtatggtggtggactgtaggcatatggcggtggagaactatagacatatggcggtggagaactatagacgtaaggtggagacttgtacacatatggagacggtggtggactgtaggcgtatggtggtggtgaactatagacgtaaggtggagacttgtagacgtatggagacggtggtggactgtaggcatatggtggtggtgaactatagacgtaaggtggagacttgtagacgtatggagacggtggtggactgtaggcgtatggtggtggtgaactatatacgtaaggtggagacttgtagacatatggagatggtggtggactataggtatatggtggtggagaactatagacgtatggtggtggtgatggtggagagtatgggtattgagcacttgtatgcgcagcaacggcatacaaggccaatatcaccataagaagagatggccaattactcggattagccatgtcgattgaatgtgtttgctcttgtttctagactcaggttttgttagtatgtttcttactttaaacccgatttatttttgaatggattgtaatagaaagtaaacagtttatatagcttacattaggccaactagaatacttgtttattgaactttaaggaagcgtcttagagcaatatcttatattgtttaataagtcaacttaactagtttctgattttgtctataaatctgaagaaaaagtcgagaagaatatgtctttggtaactacctctaaccatactttaaatttaaatgtgtcaacttttgaagttgtcaatttaaattcaagacatttaagagtgtttctttctgaattatctatcaccgaatttgtacactagttctatattacatcttgtaattttaaatactaatgttatcgtacatgactcataattttgagtttttcttttgagttaatttttccaaatggtgataactttgacattttatttcgtaatgtgtataatacaactaccgattttcattttttttaaaaagaatattacttacactaaccatttgatttggtttagtcataatctcttcatatttcagccatctggtcgtcgtccgttatatggaccttttcttattctatcgttttaacattgtaattaccgattatcttttttgttgaataaattttaaatgcttaggacaaaactaatattacatgttgtggtttcggacctggagagattacaggcttcggcccaaaacttccttgtattaaaaaaaaaaaaagaataaattttaaattctaaataaaaaagatatttactaaggatttttgtgaaagcaatactaattgcattaacattcatacatgatttgtataattgtttggagttgggtaagatgctcgacttccacattagggaacaaacaaagctagattaatgcacgtctagtgaaagatccatccctttgattacttaacttcacattagggaaaaaacaaagctaggttcatgcacttctagtgaatgatccatccctttgattacttaacttcacatttagggaacaaacaaagctagattcatgcacttctaggtgaaggatatcaggatatgccacatttctatcaaagaatacggttaagaaagtctataggaggacaaaaatagatatgttttcccaaaaaagattcaaagctcaagttaaatggaacaatgagttagcaaaaaatggtttaacgggaggagaaatagtggtagtgtcaaccaagtcgccttggtccagtagtaaagagaggtaattcctgtcacatgggttcgagtagctttggccactgggattcgagtaatttaacatgggttttttcgggttccagaattagtctttggacctagaaaccctttaagatcacctgaattatcaaaaaatatatatatagtagtagtgttgtgtcctatgttgaaaagtaatatggatcagctttggaattctccaggaagcaatgggatcatgtgggatcaaaaagaataataaagagaccacgattgggcaattactaggcacttatgtcattgaggtgattagtggatcataagattatgcctactgttatcctcaatttgaccgtatactattttcttctcttttagccatccttgaatacctaaccgaggttcaagaatcagtttatgctttcatgttgggttgacctttgttaaataggttatctagtcatgaagagcgaatcaagccaaactcttttttttttttctctttaattaaaataggattgtctctaaaataaaattttacctaatccccgattttgtaattttacttttcatctcaaagaaatacaaattaatattacaaaataaaaaaaaatatgaaatataacccgtcaccattaccatcaagttttcaaagttttaacgaataatatatcaaatcaaaactttcgtgatgcagaattcaatctttagaattttaaacatctaatacatatgatcgtaataaattttagaatatacatataaaaatgcatattattttttacataataatatcgatttccgttgtttactatacacgtagcaagacctaaacagttttaatctgatatagcggaaactaattttggcaccttagacaattgattggtcaattcaaccctcaataagcccaagtggaaagacaaagaaatttagggtattttgtcgaatgagacataatcaacttgactgctccaataaactgttttcactagatgatggatagtagttctgttctaaacatggttaatagagatccaaaacccaatttctctatggactttattggtgcaactctttaagtgaaattgaaaccttacttcaacacatttcaaatgtatctacctaattaactctttatataaaattaaaaaaaaccttagtgcataagtgggtaggtgaacttgagtctcttggcaatatgtaaagaggcgaaatcaaagttgatcaacaattaaacacaaaaacccttaagttgacgtggctgtatctcttccaactcttaaaaatcaattactattatacccctcagaaaaatggcagagcgtgtgtctctcacactcaacggaaccctcctttctcctcctcccacaacaacaacaacaacaatgtcttcttctctccgatctaccaccgccgcttctcttctcctccgctcctcctcctcctcctccagatccactctcactctctccgcttcctcctctctctccttcgtcagatctctcgtctcttctccacgtctctcttcttcttcatccctctctcaggtatatcttcactctctcccttccaatttcctttatctcttctatatctgaatctgattttgtaatttccacgatctaatttgatttcagaagaaatatcgaattgcgtcggtgaatcggagtttcaactccaccaccgccgctactaaatcttcatcttcagatcctgatcagttgaagaacgctagagaagatatcaaagagcttctcagcaccaaattctgccatccgattttggttagattaggttggcatgatgctggtacgtataacaagaacattaaggaatggccacaaagaggtggagctaatggaagtttgagattcgatattgagcttaaacatgctgctaacgctggtacctataagctttataccattattacgagttagtgttatttagttgtttgctataagcattgtttgttggttgttattaggtcttgtgaatgctttaaacttgattaaggatatcaaagagaaatactctgggatcagttatgctgatttgttccagttagctagtgctactgctatagaggtgaggttaatagttcttaaaggtagtttttagttgttgtgaataggtttagtaaagttttggtgagttttaggaagctggaggaccgaaaataccgatgaaatatggtagagttgatgcctctggtcctgaggattgtccagaagaaggaaggcttccaggtaaagcgtctcatttatcggctttgcctctggttcttcgtataacgtggttgtactttggttacatcattctatcaaatttttgtactaattattgtatgtttgctcttatgttcgatagatgctggtcctccttcacctgctactcatctcagagaagttttttacagaatgggattagatgacaaggtgattgcggttgaatttttttttaatcgttatggaagatcgagaagtaagccatattgaaagattattgtaagtgcaggacatagttgcattatctggtgctcacacgttaggaagatctaggccagaacgtagtggttgggggaagcctgagacgaagtacacggtattatccagttctataacgtattgttatatatgatactgcaaatggatcagaacactttgaatatatagttcttactatgtgttttttttttggcattgtagaaagaaggacctggagcaccaggaggacagtcatggacaccagagtggctgaagtttgataattcttacttcaaggttgcgtttcagaactttaactctatcttcacactttgtatttgaaagtcttcctttttgttttttcatgtttattaatatagttgtttcaacaggagatcaaggaaaagagagatgaagatctccttgtcctacccactgatgctgccatcttcgaagattcttctttcaaggtaacaaactgaggttgaaacatatcaatacgaagaaacttactaagtctttgcctttaaaactgaaacttcattgcaattgcaggtctatgctgaaaagtatgctgcagatcaggatgcatttttcaaggattacgctgtagcccatgcgaagctcagcaatcttggagcagaatttaaccctccggaggtatgcattcctttgatttctgtcatttgtattatcatctttaacgaaaatcgaccttcaaatcaattttttcgtctacatagaaaatgtacactggagctatagaaaatctaagtactgttggtttagaatagatagatatcttctttttggcgtttaaggagtctccattgatgaataaattcgcgggtcttaagaactgattaatgtgaatcttttgtgtagggtatcgttatctaatgggggcacataatttactcaaccagtaagctttcttctttgtattttgttttttttcctcattcgaaattccaaatgtacatgatgtttaacttctttttaagcaggacttatgattttagagaaacgtagttcaataatgaaagagaagaaaaagttgacggagaacttttcatgcgagtacttttcgagataccttttggacaatgtttctggctgttcaaaggattttgtttagccgaaagtatttgatcgttttcatggttttgggctttcatgttttttcttgtaataaattgcggaagtgattattcaaaatctatacaaattttgtctgggattgaattattttatcgatgttataactacacacccttggttttgtagctcaagagtagcgttgtgcccaatttatctgtcttctcgaaacctttcaggtaagagttcatgtatctcaattctcgaacaatggaccgaagtgtgattgctaaaacccacacccggaatttgtatatagggtttatgaggaaagaggctagattttctcagggaactaaatgaaaagaaatgatgtgaatgaaatttgtatatgagatcagatcaagagattgaggtttacaaagtgatttttctgttaagtgtcgtttgggttgaacttcctcctccgagattggcggtcctttaatctctctttgttgactatgcttagactatctccaatgtagaactctatatttttctctattttagaggtgactatattttagagtaaatataattgatttttctctattgtatgactataaaatagaggaaaagtttagagattgctcttttttgctgtatatatagactttttctgtattttagagttaactctattttagagttatacaatgaagcaaaatcaactataattactctaaaatatagtcaattctaaaatagagaaaaatatagagttgggcattggagatgctcttagctttttggctcatccgatctgttagagttcacctggcatcggattttggattgtgggcctgttcttcttaaaagcccagttgaagtgtatttccacctatgggccttatttgtggtaagtagggctccaacatgaagataggaagttgtggttgggtatcaaatccccaaaaaccaacagattactttatggttcaaaactttttgtccaaacaataaaagatggttcaaattaagctacaaagcaaaaaaaaaaagaaaagtttatcgtgaactcaatgtaaacgagagttgtaaaacattaggcaatgagaatagtttcaaggattcatggaaatgaatacatcagtcaatcaataatgcattaaggatcgttctaaaactcatataaagttatcatgcttttggacggaacaactatctatgcaatgtcgtgtaccgatcacaaggcaggtgatcgagttgaagttcttcgtagactggtcacaaccaacgtgacatgactgaagcttcccctagaaccgaacacacacaacttagttatggagctttacgaaccattgtaccaggattgagtacagcttgtcacattggttgtggcttattccaggagaagcttcagcccgattacatgccttgtgattagaacgggacatagctctcttcaatcgggcacttaaaatcaatgcttaatcatattagtcttattctattttgaggcactgacttttctagctttccataacctctaatatgtcaagatttggtacttgggaagacatccaacggatgtcaaacttcagaagctatgaaactgtcataaaacgagttcttgtcgtcttttggttcatttttactttttaacctgtaaaagtttttaacatcgcaatcacttaaaaatcatcatgttaaccttgaaattataccaaacacttgttaaaaatattagaatactgttggtaaaccaagcaaaaatactatgttatcaaccaacatcttatatattttgttaacatctatattttaagactttggatatcaatatcttatcgtaaacttcttactcgaatatgattctacttaatttacgtttatctttgactatatattatatacacctatatcttaaatttaatctatttatcttatcaatagaaatcatacaatttcatccaaaactaaaccgaattaagttttgatcatgctgattaggtgtataacctataagttcatatattactatgttggattcatgtaatacatgggttaatctctaaatataatttttagaaagtttaataattttctttcaatcatttgtgtaaacagtattttaaatttcaactgaaccagaaattaagatagttgaacaataaaaacacaatcaggaaaaatcaagagaatcttttttataatttttttattattattgaaatcatgtttcgtgttaatgaaacaattctaatttaatggtatgacgtcttgtaaacatatggtggtgcaggagacttgtaagtgactttaagaaaaagagagtaatatggtcgatttttggagatttgtagacgtatgatgctgatggagtctggtattcaacctttttccaaaggagagtattatggtagaggtggtgaggggtggacatgtacggtggtagtagagaattgtattcaacatttgaagaaggtgcgtaatatggcggaggtgggaatttgtatacatgtggtggtacgtagtggagacttatagtcaatctttggagaaggggagtagtatcgtcgagacgtatggttgtggtaaaagacttggtgaagggttgtagtcaacctttgtagaaggagagtaatatggtggtggtggagacttttagtcaccctttagagatggacaatagtcagaagatgtggggagttgtagacgtatggtggtggttgaaacttgtatacgacctttggagaatgaatgtagtatgatggtgttggggagctgtagacatatggtgttggtggagacctttattcaaccatcgaggaaagagagtagcatggtggtggtggggagctttagaagtatggtggtaatagagacttgttctcaacctttgggaaggtgagtagtacagtggttatggggacctacagacatacgatggaggtggagacttgtattaaaggtttggtaagttgagtagtacggtggtggtggtggggagctgtagatgtatagtggtggtggagacttgtagtcaaactttggagaaagagagtagtatggtggatgtggggagttgtagatgtatagtggtggtggaggcttgtatttaacctttggagaaggagatttcttaggtggaggtgaggaactctagacgtatggtgatgatgggaagctgtagagatatggtggtgttgaaaacttgtattgaaactttggaggaagatcatagtactgtgatggtggagacttgtagacgtatggtggtggtggagacttgtattcaaactttggagaaggaaagtagtatgctggtggtggagaaatgtagacgtatggtggtgggaaaattatgtaagctttggattacttcctcagaatttcttgtatatgatttgactgttcatgcattacactatttgaagctcatcatgtcgttgtaatatttattacagcccgaaattgataataaaacatgtcatgataaattcattgtttccatagagtggtttgttgcatgtatagtcattgacttgttattatttcagttagaagacttttatggtttattatggaatatcttgaggaaggcaaatttcaaggatgacgatcttgcttgtatttttggagctatatatgacatcaaatccgttctatctccaatgttattgtttttatatatttgctacttaaagatcttaacatatgaaaaattctaactaaacaatgatacacagctatactcgccctaatttgtatcaatgcatttcgtattgatttggttggacactcatgcggcgaagaccttctttcattggatgaagtctctattgaaggtgaaggtgtagttggccataccttttctatgctacatccttctacaatcataaatgtggtattcatttttctgatcttttaattttttgggaaaaatgtccaaaaaatcacgaacttttataaatgacaaagtttatgttgacttttcatttgagtcatgtcgttaagtaggttaatataattatttcccggcgttaagttctcgtttatctcctctattagaacaaaacaacattgtttattgcatctcgttttgtctgttgaaacaaatttaaaccctaaatccccaaatcgatttcattatctgcgattttgaggtcaggtgggtttgtgattttgagataatgaaatcgatatagggatttaaggtttatatttgtttcaagagacaaaacgacgtcgttttgtgtcttcaataaacgacattgtttgttctaacagatcaaataaacaagtcattaaagccgtaaaaaaaattatattaacctatttaacgataggactcaaatggcaagtcaacaaaaactttgtcatttatttcgaaagtcaacaaaaactttatgatttgtttgtcttccgtgaagttcaagattaaatcgtcccaaattttaaagttcgtgatttttttgacatttttctctttaatttttataccagtttttttttgtgaagaaatgcttgaatgtaccaacatcataagtcaaagagtcttataatgtttttaatctgttagacaattagcaaattttgaaaataaattgtaaggtaaaagaaaaaagtagaagtagaagataagaaaataggctagtttgtgtagaaggatagtcatagttttaggtgtaaagaacatgatcaaataaaaatttaatgtcaagctaactgagacagaatttgaagaaaacccaagagaaatatatactctttccctcaacctaatccaataacggcctgactatatgattatagtgaatgagtgtatcatttcctactagtacttcatactttttgttgaatacctaattactaggaaatcggtttttcatacccgtacaattgtattatgttaaatttacatttaaacataatggtgtgctagctataacatacctcgagtaatgaaacatttgaatttcatatttacactttaggttttgtgcacaatcatgcataaaccctaaatcttgattatgtggaatccacatgtgaaacctcattgctttgttggaagttaataccagcgtatgaaacgagttaattcaggaatttcaattttgtgttataatctcttcactacttggcaatggcggagccaaattttttgtttataggagtcataataaatttaaaattttgaatttaaaatgtttcatattcaacattttagttgtatcatcaagtattttttatcaacaaaactttttttgttaatatatataatagatattgtggagattgattagttgttgtcttatcttgattcatgacttaatttaagaaaacaaattataaactatttgaaaaatgtaaaaaatgaaacaggatctgtctaaaaagaagaaaaattttgatttgttacgaaaattactgttttttactaatcaaaaatttcttttaaattttaaccaaacaaaaaaagccaagggtactaagattaaatgtcaaaataattattcatggggtcaaagacaagaatagatcacataacatgggggtcattgtgaatactttaacccaaaatatataattatcttaagagaattaacttataattaaaaaaaactataaatgtctgtctgagatagttcaaactgacccctcctacttaaatgttgcctccgccactgctacttgggccaatgtctgtctgagatagttcaaatccatgtgagtatttacctgaatttttttgagagatattgagtcatatcaattatgtaggcacaacatgtactatacgcaacacaaatattcacctatttttgaaaacgaaagtgatgactagtttgaatgtccacatatccaaatgtaaacataatttagttgcataatgcatatgcaacgttgaacactctacactatgtcgaataagatttggctttttatatttaaaacagacatttctaattagcatttcacatcattcttgtgtacattttattggtaacactacatgcatattttcaggtgtagagtttcaaatatgttatatagatgcaagcatgagatatgaggcgtgttaaacaatactctctaaagggtttggcttccgctgcaactgcttacgtacaatgccagtctgagaagtgactaattgactctttctcttttggccatcttcacttttcatgtattttatgtaatataagtgagaaaacgaggaatagaaaaactaacgtaagtaactctatatcaattcttaattgttgtctaatataaactatatatcctaaccaaaacaaatttagtcattgatagcaaaacatatagttaaaaaactcgagcaaattgaaacaaatatcaactaagaaatacatgtataaaggtcgacaaaatttattaattaaaaaaaacataataagatagttgaacaaaagaacaaaatcagaagaatcaaatgaaaagaaatcataaaatgaaaatattacaatcatgtttcctgttaatgaaacaattcaaattcgatagtatggcatctagtagacatatggtggtgggggagacttgtaagtgactttagaagaaggagagtagtatggtgtgggtggtgagctgtagacatatggtggtgggggagatttgtagtcgacatttggagaaggggagtagtacggtggaggtggggagctgtagacatatggtggtggtggggacttgtagttaacctttggagaaggagagtagtatggtggtggtggggagctatagacgtatggtggtggtggagttttgtagtttacctttggtgaaggagaataatatggtgggggtggggagttatagatgtatggtggaggtggagacttgtagtcaacttttggagaaggagagtaatatggtgggggtggggagttatagacgtatggtggtggtggagacttatagtcaacttttggtgaaggagagtagtatggtgggggtggggaactgtagacgtatgggggtggtggggacttgtagtcaacctttggagatggactatagtatggtggtggtggggagctgtagacgtatgggggtggtggggacttgtagtcaacctttggagttggactgtagtatggtggtggtggggagctgtagacgtatggtggtggtggagacttgtagtcaacctttggagaaggagagtagtatggtgggggtggggaactgtagacgtatgggggtggtggggacttgtaatcaacctttggagatggactgtagtatggtggtggtggagatctgtagtatggtggtggtggagacttgtagttaacctttggtgaaggagagtagtatggtgggggtggggagctgtagacgtatggtggtggtggagacttgtagtcaacctttggagatggactgtagtatggtgggggtggggagctgtagacgtatgggggtggtggggacttgtagtcaacctttggagttggactgtagtatggtggtggtggggagctgtagacgtatggtggtggtggagacttgtagtcaacctttggagaaggagagtagtatggtgggggtggggaactgtagacgtatgggggtggtggagacttgtagtcaccctttggagatggactgtagtatggtggtggtggagagctgtagacgtatggtggcggtggagacttgtagttaacctttggtgaaggagagtagtatggtgggggtggggaactgtagacgtatgggggtggtagggacttgtagtcaacctttggagacggagagtagtatggtggtggtggggaactgtaaacgtatgatggtggtggagacttgtaatcaacctttggagaaggagagtagtatgatggaggtggtgaagagctgtaaatagatggttttggatgtggtgtgtacttagggattttgtgttcatggcttggagaattgtaatgtggagtttgaggggatgtgtaagggtatgatgtcactgtagccgcaatggcacttaggacgacaacataaaccatgcactgtcctaaccccatcgttcttgaggttctaatcacacccattgcaactatcttttttctttgttttggttttatgttatatttgatcatgaacatcctttatatagttttttttggtgtaaatataatattatcttctcaacctgggttcgtgtgtggcacttccaaaaacattagaggacgtgctaagttgtttgtttgaaaagtagtgacttgtgaggaatatgaagtattattagattctctagcaactctcaaatttttttaatacgtttccatattcttttgtttgaatttgtcgactcaagtattttgaagtacaaaacatatccgtcagttgatgattatttttagctataagtttgttaaatttattgtaacttggacgatttacttggttttataatgaaataattaatttaattaatttcatcgatatgagagttgtattgattcaaaagtgaaacaaaataaccaatgtagaaacaaaatactcatgaaaacaaatgttcaataaaaatttaaggtgatcgatatacaaaggttcacacaaagtttgatttttcctctcataagtcataccacacatttttgatatgcattaaaaaaatcttaatgtagattaatattttatttatttggtattatgggtcaagcttttcttaaaattaatacattaataattttgtagacaccatgtattttcaagatatatttatatttaaggtttaacatttttttaagtagacaaaaaatgatacaattgataaaactatggatgatatatattctttctataaaaagatgtaaaacaatttcatataaaatatttatatggaaggggaagcatcaaaggcaaacagttactctatttaaatatgatctcatacaattaatttgtttgacgttttaactctcacctcaatttggtttctctatttaaatatcccattttagacaaatgggtaaaaaaatcctcatcttttccggaacatgaataaaaccctcaaatttttgtgagtttttaaacctcaccttttaataaatagtaacagaacatctaatattattaaaccaaataaatatcaattaaataccaaataaactattatgttaagacataaatatagctacttagtttgccgtataaaaaagtaacttgttatgaataaagatggatgcccattataaggctcatcatctaagcccatcatctagatgtttctagggttttacccttttcttgtactcctatataaagaacgatttatctcaatggaataacacactcatttcctctatctctttctctgtttataacacattatcagcacgctctaaaaggtagatatagagattcttacatctttttaagaaccatgtttacttatcgactcatggttcatagtacttattttctattattgaaacaaaacaatatgagccgatcgatgattatagtatagatcggtaaaagcatgttttcaatgattcaataaagaagagaatcatgcttatcatttgtttctataattactatcgcatgattcaatgcttctacaaagaaaattgttaaagaagagaatcatgcttgttaattgttaatttttgtgatttactattacaatattgaatatataaattaccaattttataattatataactaattttgtaactattcatagcccgatggtgggtgatgcaagcatgtattaatgttttagcattccagttttgaatagttgcatctatattcaatatcattttataaatattatattgtctaaaatctatttatgattgatatgatatcccttatttaactcctttgattaaaacattatacatatcttatcacttttagatattgatttttccatattaaatatttgatttccatatatttgattgtgttattattatttttactaaaaatgttgcaagataatttttctttttataagattccatatatctaaatctttgtgttattattatctaaatctttttataagatttctatatattttattgtgttattattatttttactaaaaacgttgcaagataatttttctttttataagattcttttctctaaatctttgtggtatctaaaaaaaaaaaaaaaaaaaatgttcatggttttgccctaattttgcacgaaatcattttacccaaattttgcacgaattcatattaccctaaataaaagttttgtcaagatatatgtaaaatccagattttgcacaaaatagttttattctgattggttttacaatattgcattaaaattgtattagtatataatacttgattattttatgaaataaattgattgataaataacttaatttataggtataatcacttatagaaattttcatgaatgactagtttaatgtattttaagaagatatcatatttttgatggtcaaagttttttcaagaaattaaattatcacgagaagtttagaaaataaatatggtaaaaaaaaaaaaaaaataataagaaaaatttctaacgatgaaataatctagtatatcaagtagtataaaatcttattaaaagactctagaagagcatatacattgctttctatgggaatacaaaattaaaatcatcgatgcggtataattctccaaatcttaaagttaatatgatgagatataaaatacattatgattctagagtggaattaaaaatgagatggatgaacttgaagtttcatcatttcgaggaggagaagtaatgaatctcacatggataataagtgacatatccagaagattatgttcaatctttgactactaaagatctaaaagttgtataaagcaattcttatacgaatgtgttattagataaaataagttataattagttatttctgaaacttcaagacttgaagtctctttgtgaatataactcacattgttaagagaatatctatgatgcagagatggtaaaacagacgcttaaacttttacgcaagtattgttgtcctgtagacacaatattttgaaagaaattttgagaactattataaacttaaatcgagtgtttttcaaaggctaagaaaacatatgagttatcgatgataagtaatactcagattctgaagtgaatataagatcttacatagttagtcaaatttaatatcgtttatagtagaatataaaattttaattattatctcgttattgttttattaacatatgattgattattaaaatacatggaagtaattttgattataagatctcattaagggagtaactgataaacaatgaaaagtaaattagaagttttgaaagaactagaagtttcaaaagaattaaaagtttcaagagtatatttggcttaaccggattggtcatcctggtttaatgatgatgtgaaagtattgagaattatgtggccattaggtgaaaaaccagaagattctccctaatgatttatcaaatgttacttgctcagaaagcaatatgataatgtgatttttaccagtgtaagtaatttggactttatctattcgtaagtatatacaaggagatgattatgggttgatcacccactatatgacatttagatacctaatggttataaaagatgcatcgattcaatggacgcattgactcgattgttgcatcgacaagaaggtcatatttatccttgttataaactcgcaacatagagtttgcgagattactttcttgattaaagtacaagagtatttcagtgtttatttataataaccactattggatatccgttgggataagtgtttaacattttgaaattcatgttcatacacaaaatggtttagtaacatcgatacgcatcaagccaatgaataattaatagttttccccgttattattggttttgggtcagaaaccaaatagttttcatctaaaagctttgaatgtgaaaagtgctccaccacagcacgcagagatgaaccctcagaggaggataagaatacatgttggatatgaatgataactaagccatcctagaaggatttatataccgctcgttttgaagactatcatattatatagtcagctattccaacataagggggagaatgtatacagctggtgaaaaagataaatagaaatgaattatcaatgatcctcggagtaaagaatgtatattaagagtccaaaagataattcaattacagaatttagcgttgtaattgccagacgcatttgctgacccaaataaagtgatgaagtcacttataccagttgtaaattaaatgctccagaatataatgaatgttctgtaaggaccaatttcaaactgctattgagtcttaagatcgcatgaagcgtaatagaccttggttccaaatataaatatcctcgtaaaagtgaaggagcacaaaattaaaaatgaccaaaattgaggaaataaatattttgatgatctcttgaagagagtgaatgatctctaaaagagacataaacatgacaaatgaaacattcaagtacttgacaatgaagagatctagctagctatgtcatgtcaaaatataatggaatcaaaagcaaatcgacgtcgtaatatatttgcatgctatgagcagttgatattatagacaaaaaggaggatcatgaaagaaagtctattgaaaagtgtacacaaagtaatgattagccaaaaatggaaaagaagaaatagacatataattataatctctagtagagatatttggactagtagtctatgcacatgatgtgtaaaaccagtggaaacaaatgagtctttatgtgaaagaatagtgaaattaatgagattttcacaaagataagaaatgttatgaagagatatattctcttgtggtggatgtaatatttttttaagtatctaaagtctggcaataagagacggaacactggatatgacatttatatgaaattcttgaaagatataatctctgaaggattaattatatgagaattatgttctctagaactctactcgatcgaataaaaagaaatatgtaacatgacatataatcatataaatgtatatttacgttgagtttgtcaaaatatattgatcaaactaatatttgttttgaaaatcattaaaactcctacagagttatcataagtaatacgatgacaataatctatgataaaatatcactagataatgatatttataagtctatatgaaaaccatataattttgatcattaagattatggttattaattccaacgagatattgtatttgattgaaaatcatctcctgaagaagatgtttccgagggggagattgaatgatatgcgtggatgtaccctttttccttatcatagtttttatcccacatgatttttctatgacaaggtttttaacgagacattaaagaacacgcaaataatacacttgatgaatattaagaaattctatcaatcatccaaatgaatattatacactaatgatatttagagaaataaataagatggtcaagatgaatcatctaaaagattcatgagcagaagaatgacgttgtactttatccagaaatttgttcaagagaagatttggcagacttattctcaaatactgtttattctctgccacatcttctaatcatgcagagattttactaattcatgaagctagccgcgagtgtgtatggctaagatccatagttcaccatatacaagaagactgtggtatgtatgcagggaaaaagactccaacaattatgtacgaagacaatgcagcatgcatcgcacaactcaaagacggatacatcaaaggcgatagaacaaagcacatcctacgaaaattcttctacacacacgatctacaaaagagcggcgatgtacgagttctacagatccgttcgaataataatctggctgacttattcaccaaggcgctacctactgctactttcaagaagttagtctatcgtatcggattacgccgtctcaaagatctcgacgaatatactcataagggggagtaattgtatgttgcactctttttcccttaaccatggttttttccattgggttttcctggtaaggtttttaatgaggcagcatttcaaatactttacgagttatggtactataatggtcatcagggggagtgttatgaataaagatggatgctcattataaggcttatcatctaagcccatcatctaaatgtttctagggttttaccctttccttgtactcctatataaagaactatttatctcaatggaataacacactcatttcctctatctgtttataacataacttagtttgtaatctattttttccaaattcgagtttacgatttgttttctagaattgagttgttgttttttttctttgcgatataaagaaataagtttcatcgccattagaaattgttatgtatggctctgttcatttccttttcgctagcgactcatgtcaacgactcaaaaacagctttacttttaattaaatttgaaacgagctacaagtgacaagttaaagacggtattattgatcgccggaaaaatttcagcgaccatcatcaccttcagcgacataaaatttagaaaagaaattctcttttcaccacaacccatcgacataattaaagaagatacagtgttatttttagtcgctgcaagctgttgctggcgacaaggaaaagaacatagcctaaaacagtttatatcttagcattttgttttggggttcaaatttgtttttactttctaagttttggatttataatggttcaaatctattaacataaatttgttttaaacttgtgtaaccgaaactttgttcttgtgtgaccgaaccaaataaaacttattaatagaaaattagtttggtttcatgttgatgaatttctaaaacacaatcgaataaatcttgttgtaactaaatgtatatgtaaaagattgtaaaatatcctatataacataaaataattacttttatccaaaattgaatcatacataagctcgaatcaaaataaataaaatatgaatagacttcggatatgttatcttcaatatgaaaccggttttccgagccaataaattcaaattgtttagacaaaaacattttagtggtaacaaaactgttttactatatctcaactagatttgagatcacggttttacataattgttttacatgaaggctaataaaacttcaatttggaaaaatatattgtaaaacagtattacggaaaaaaatctttaaccaacaatattaggtgttattttaccatttttttaaaagtgaaggtttaaaaccaacaaacaaattaaggatttttgagaaattgctaagaatggtatttcaagactatccctttttaagtatgccccttcctattggtcatttcgtctataccctatttttatttctaatgactattttacccctattttgaaaatgttttatgttaacaaaataaaatattgattttttcgccaaaacaatttcccttaaaaagaaatgtgctgggaaatagatttacaagagttttttaaatatttttacaggatttacaagggtttttaaaagatttttaaaagatttacaaggttttaaaaccctttaaaaactcttgtaaatctttttaaaaccttttgtaagggttcacaagagttataaaattgttcaaaaagagttacaaatgtttaaataattaatatgttttttaagagggaaacgtttttttactaatgtttttaaagactttataagagttttaaaaggattttataaggatttacaaaggttttcaaatccttgtaaatccttttaaacctcttttaaaactattttaaatctttaagaatggttgtaaaatgttttaaaatgatttaaaagtattttaaaatatctaaaaggtttttaaactggttttaaattatttactatttacgtatgtatttaaagactttataaagattttaaaaggttttaaaataatatactaaggttcttaacaactatacaaagctttttaaaaatttacaagagattttttaagatattttaaagggttattaagaaatttataatgatttttaaatgcatttttcggcgggaaaaaacatattggcgggaaaaataaaatttggtgccaatgctttcagtttctaattaaatgttctcattagatgaggagtaatttggtcattttgtttaagaaaagaggtattttaaaaaatagccaacggaaaagggtattgttgcaaaagagtagtagaaaaattgtatttttgcaaatcccccaagattttcttacatatttctgaaaaatgagatggtttttttacccattttttctgaatatctctaaacaacctacataacttttttttttactaaactatgtgagctaaatatcttacatattaacttgtcctaaacgtcttactcaaacatgattatacttaatcacattcatctttgatactttcataattacaaatatatatatatatatatatacatatatatatttcataacacatatagtaatttacgtagatacgtgattactatcattttgtgtgtaatttaagaaaatagaggataaatatatttaagatgaaaaactataaaaaaaaattaaacacatactggcatttaataaattaatagtaacgagtcacaagttcgtgacttagagtcttgcaatatgtcaagttttgttgataatgttcaacattatctattaaggttaataaaatttatatttcctttttctctaagataaataattattcaccctttaatctattaacaaaaatttcatcctaattatgtttaatagtttaatatgttaagaactttttactaggatatgattagaattttttacttcttttacttcttttttttcaaagaaactttctatctgacttgatggtgtggtgaatggggcattgtaacaagaaagatcatatttctcgtgaagctgaagttgctactactctgaaatagtttctggaatttagacttctgagtgtaactagtcaggaccattccaatagaaccctatgtatcctcgttgattttcaaatctttgattttaaaaccatgttccaccaacaaaattgacattctccagaagaagattgtgcacaaagtcaatcttagccattaacgcagcaatcagactattgttcatgttctttgcttgtttttggttctgcggttagaaacacacaagaaaaagaagagagaaaacgtatgtaactaaaaaacaaaagactaaatttctacaccttatctaatgatgaataaaagtagaacttcggcaacgatgcaaaaatttggtagtgccaaatttacttgttgaactattccctcaaaattacaagatcagtgcaatacttaagggtcgaattctacaaaacacgatctagataaataactcaattgatttattcataaataaccatcaacctagcaattcatcttttacctttgaaaaccctaaagctaacaaggaatctactaagacatagtgaatgaaacaaacatcatgaataaaatagattgcgataagaaatcaatagaagaaataaagaacttagaaatctgtctctaaaagctctcccaaattatctcccaaaatgtttaagcccaagctaaagtagaatgaaagatgagtctaaacaatgatccaaaaaactatttatatctagaaacacaaacataaacttcgttgcaattagggaaaagttcttgggcatttttgtaaatattcaaaacttcaaaacttgagaattatagttcaaaatcttttaataaacttacaaaatcttcaaatcatagttcaaaacttgtacctcaccaaaatcccattacccagattaatccaaattctgaacaaaatcattacataaaaccaaattatctttttattcaacatcgatttgttcagagctttgtcggagcgctacctgttgattgttgagatctactttggcaaagatgaggttcatattacttctccgcaatttgtgacatctcttaaaacaaaatcaattctctttttaagagagattgtttacacaaaatcaagaataatttacaacagtattgaagagactaactgaagaccctagaaaatatggagacttttatttaacctttggagaaggagatttctaaggtggaggtagggagctctagacatatggtggtgatgggaagctgtagacatatggtggtgttggaaagtagtattgaaactttggaggaaggatcgtagtactctggtggtggagagttgtagatatatggtggttgtagtgaccctcgccaaggggtaagcgaacatgcaagaaacatcgaggaacgtccaaagaagaaccggaagagaaaggaactagttaagggacgaaacccaaagagatgggcaagacaaaaatgaacatggccgtgcaatgtcagatgaaatgccgagtctgattcatctggtcgtatcatgggaaaggagaatcgtgaaatggtagattctagttcaagatggggtcatctgggcgaagccaaaacaggagaaagttaccccgaatacagggtcgattgcccatatgtgcccaaatgcgataaatcttcaatgggcaagaatgggcaacacgggcgtgtcgtgggacaaagtttgctccgccgggcgttgaacgccctttgaccgcgccaaggactcgtgggccggctaacttggagcccaaaaatgtagcttggagccgaattcttgaggagtggagccaaatttaggacccttggagccaaagccactccgtccacgtgtcgtcgtcccatccctgctgcatatgtatcttcaagggcgggtgacaagtgtcatgcgaggtgtcaccaccggatggcatgcggtcggttgtagcccaagctgtcccgcctataaattcttgaccacctcgggctttttgatgggagaaaagagcagagaggctgtcgtacgtgatcgagaaaaccatgtagtaacatcgtcaagagtgagaaatcaatgtcgtgattttgtctgatcgagaaactctgcccgtgatcaagatcctctgtccgtgactaaagaattcatgtccgtgatcaagaaaacttgtccgtgaacaagaactccttgtccagtaccgagaatctgtgacgatagtacgtgaatcttgttgatcagaatcaagaatcttggcaaaagatttgatttgtcgattcgtggtaaaagtcaagaatgagggaggttagctagaaagaagctagatcaagacgcgaatgatgtggagaagtcgtgaggtgtccgagaaccgttgaagctagccttaaacctttagccgaatctcagtgagtttcgaagcatgttatatggcacatgataggtttgagtgtttatttggatgattgattgcttgtttggttgcatgatcatatactctttcattcattgaatgatttcttgaactatatgagtattgattaatgatgtgaatgatgatactaagccgcatatgagatcttttagattcctatgcttaaaggcttatggttggtaggttgtggtaagtaaggatattgatgattctatgtgtttgagtaaccatatgtctcataatatcttgaaattttgggtctggttgcgtggtgctcgtggtaggaggcatagaccataagcgtatcaagatcgcggtatgtctgacctttgtaatgaaccgtgctatcatggggtcttgttaacgttgttactcgatcgccatgtagtgcgaaaggctcggagagacggggctagctaccctggtcgagttgtctagacgatggtgtagcgttttggtagggatgctccggttacatgcctttgtggttgtaaagcggaagatcctaggagtgtgtgtttttggtgtgggggtgtttgaaggaagcatatcgggccctttaaaacttgataaaaaattggagtcaagattgcatgtgcatgcttttggtatatacttcggcaaactacctttcgttgctattctctgtagcgtgtttcatgttatgattacgggatggggaactaatatctgttgcaggtagaccgagctcactaagtaatcttagattacttatgactcccttttgttttttcaggaaaccttagaggaaaccattagagggatgctcgggacgtaggtaaaccggtatagagtttgttacttttttcaaaacttaataattttggttcttgatggatttgagagtataggctcgaggcgccattgtaaaaacgttttagatacttggttgtacgagaatttatacgttataaaagattattttcatataaagagtgtgtttcattcgatattagtcttgtccagcctaacacaacatcatggcaagggttgaaaagcctaaaccgtgttcgtgagggatggttcatgtgggtgatccggctaagggtctaaatccatttgaaaactaagttgggttgtctgtgtgagctatcaatgtagcgtttccgtgttgcccttggcttgtccgaccatagagcgattcgggggcattacagtggtggtggagacttgtattcaaactttggagtaggatagtagtatggtggtggtggagagatgtagatgtatggtggtggggaaagtatgtaagctttggattactttcccggagttacttgtatatgatttgattatttatgtattacactatttgaagctcatcatgtcattgtagaattcattacaccccaaaatcaagaataaaaaatgtcatgataaattcattgtctccatagagtggtttgttgcatgtatagtcattggcttgttattgtttcagatagaagacttttatggtttattgtggaataccttgaggaaggaaattttcaaggatgacgatcttgcttgtatccttggagctatatatgacatctaattcgctctatctccaatgttcttgtttttatatatttgctacttaaagttattaacatatagaaattaaagctaaaaaatggtacacaactatactcgccatgatttgtattagttcattttgtattgatttggttggagactcatgtggcgaagaccttctttcatcggatgaagtctctgttgaaggtgaaggtgcagttggccatgccatttatatccttctacaatcctgaatatggtattcacttttctgatcttttaatttttatgccgctttttcatgaagaaatgcttgaatgtaccaacatcataagtcaaagagtcttataatcttttttctgctagacaatttagcaatttttgaaataaattgtaaggtaaaagaaaaaagtagaagaagaagatcaaaacagaggccagtttgtgtagaaggatagtcataattttaggggtgaagaacatgatcaaataaaattttaatgtcaagctagctgaaacagatatgaagaaaatccaagagaaatatatactctttcctttaaactaacgtaagtaactctaaatcaattcttaattgttgtctaatataaactatatatcctaaccaaaaaaaatttagtcaatgatagcaaaacatataataaaaaaactcgaacaaattcaaacaaatatcaactaagaaatacatttataaaggtcgacaaaatttattaattaagaaaacataagaagatagttgaacaaaagaacaaaaccagaagaatcaaatgaaaaaaaatcataaaatgaaaatattacgatcatgtttcctgttaatgaaacaattcaaattcgatagtatggcatctagtaaacatatggtggtgggggagacttgtaagtgactttaggagaaggagagtagtatggtgtgggtggtgagctgtagacatattgtggtggggaagatttgtagtcgaccttaggagaaggggagtagtacggtggaggtggggagctgtagacatatggtggtggtggggacttgtagttaacctttggagaaggagagtagtatggtggtggtggtgagctatagacgtatggtggaggtggagacttatagtcaacttttggagaaggagagtaatatggtgggggtggggagctatagacgtatggtggtggtggagacttgtagtcaacctttggtgaaggagcgtagtatggtggaggtggggaactatagatgtatgggggtggtggggacttgtattcaacttttggagaaggagagtagtacggtggtggtggagaactgtagacgtatggtggtggtggagacttatagttaacctttggtgaaggagagtagtatggtgggggtggagagctgtagacgtatgggggtggtggagacttgtagtcaacctttggagatggactgtagtatggtgggggtgggaagctgtagacgtatgggggtggtggggacttgtagtcaacctttggagatggactgtagtatggtggtggtggggagctgtagacgtatggtggtggtggaggcttgtagtcaacctttggagaaggagagtagtatggtgggggtggggagctgtagacgtatgggggtggtggggacttgtagtcaacctttggagatggactgtagtatggtagtggtgtggagctgtagatgtatggtggtggtggggacttgtagtcaacctttggagaaggagagtagtatggtgggggtggggaactgtagacgtatgggggtggtggggacttgtagtcaacctttggtgatggactgtagtatggtggtggtgtggagctgtaaacgtatggtggtggtggagacttgtagtcaacctttggagaaggagagtagtatggtgggggtggggaactgtagacgtatgggggtggtggggacttgtagtcaacctttggagatggactgtagtatggtggtggtggagagccgtagacgtatggtggtggtggagacttgtagttaacctttggtgaaggagagtagtatggtgggggtggggaactgtagacgtatgggggtggtggggacttgtagtcaacctttggagatggactgtagtatggtggtggtggagagccgtagacgtatggtggtggtggagacttgtagttaacctttggtgaaggagagtagtatggtgggggtggggagctgtacacgtatgggggtggtggagacttgtagtcaacctttggagatggactgtagtatggtgggggtggggagctgtagacgtatgggggtggtggggacttgtagtcaacctttggagttggactgtagtatggtggtggtggggagctgtagacgtatggtggtggtggagacttgtagtcaacctttggagaaggagagtagtatggtgggggtggggaactgtagacgtatgggggtggtggagacttgtagtcaccctttggagatggactgtagtatggtggtggtggagagctgtagacgtatggtggcggtggagacttgtagttaacctttggtgaaggagagtagtatggtgggggtggggaactgtagacgtatgggggtggtagggacttgtagtcaacctttggagacggagagtagtatggtggtggtggggaactgtaaacgtatgatggtggtggagacttgtaatcaacctttggagaaggagagtagtatgatggaggtggtgaagagctgtaaatagatggttttggatgtggtgtgtacttagggattttgtgttcatggcttggagaattgtaatgtggagtttgaggggatgtgtaagggtatgatgtcactgtagccgcaatggcacttaggacgacaacataaaccatgcactgtcctaaccccatcgttcttgaggttctaatcacacccattgcaactatcttttttctttgttttggttttatgttatatttgatcatgaacatcctttatatagttttttttggtgtaaatataatattatcttctcaacctgggttcgtgtgtggcacttccaaaaacattagaggacgtgctaagttgtttgtttgaaaagtagtgacttgtgaggaatatgaagtattattagattctctagcaactctcaaatttttttaatacgtttccatattcttttgtttgaatttgtcgactcaagtattttgaagtacaaaacatatccgtcagttgatgattatttttagctataagtttgttaaatttattgtaacttggacgatttacttggttttataatgaaatactctacaagaatttaattaatttcatcgatataagagttctattgattcaaagtgaaacaaaaataaccaatgtagaaacaaaagactcatgaaaacaaaagttcaataaaaatttaaggtgagcgatatacaaaggttcacacaaagtttcgatttttcctctcataagtcgtaccacacattttttatatgcattaaaaaatcttaatgtatattatgggttaagtttttcttgaaattagtacataaataattttgtaaacatcatgtattttcaagatatgattatatttaaggtttaaaatttttttaagccgccaaaaaatgatacaattgataaaactatggatgatatatcttctttatataaaaatatttaaaacaattccagataaatatatggaaggggaagcatcaaagccaaacatttacgggagcagcgttgcaaagctgtaaaaaatgaaagaagaatttgttgaggccattaaacatgttctcatacaattatatagtttaccgttttaactgtataaaatttgtttggtttcacgttcatgcatttctataactcaatcaaataaatcttgttgtaattaaatgtatatatatgtaaaagaatgtaaaatatcctatataccataaaataattacttttatccaaaattggattatacatacgctcgaatcaaaagaaataaaatttgaatagacttcgggtatattatcttcaatatgaaaccgattgtccgagcaaataaatttaaattgtttagacaaaaacattttagttgtaacaaaactgttttactatatctcaactagatttgagatcacggttttatataattgttttacatgtagactaaaaaaacttcaactcggcaaaaataaattactttttcagataaattactttttaaaataaaccgaaatttgctcaagttgactctacttttaatcaaaataactagaatgactcccctaaactagaatgactctaatctttagtgaaaagactaattgaccagaatcaaaattcccttaaaaaaaaccaatttagaaaaataaaaatagttaattaagtaaaaattaaaacaaaaatgataaatgataataagaatagttaattaggtttttgccatcactatttttttcccaatcttcttcttccacttcttcttcttcttcttcgatatacccaaaaccccgatctcgaaatcaacttctccgagaacaacaacggcaacaatatcatcaggatttggcgatttctctttgcccttggtgagtgatttgtttcttctcttattaccccctttgcatgtctcttcttcttcttcttctattttcaatcgagtaaaagttccaggattttctctccttagcatatacaagtatgtcggaagctgctcatatccactttctggactatccctaaagaattgttgtgcataccttagtgtctgatatgccttccaataatccatttacacattattattttacagtgagtattagcaatactataaaaatgcgattaaaaatagaaaagaaatagtaaatcataccttgatttgaaagcgtttattcaacgcttcagcaacatggattggtacaaccttgggtccaatcccaccaacgtaatccttgtacaacagtccaagtatttggtgggttgcttgtcgggaacacgatgaacgctttctaacagaacatgtatgttccgacttaaatactctcacatgaaacttcgtagagtcaccaactggtgttgctcgaaccatccacttaaaacctttaacccaatacttgacgatatactttttggagtcgatttatgaacatcaaaatcaaaattctgtaatacggtaagtatcttcaaacgtttctccaagtgctcctttgtttcaaaactttgtccaacctccagctccaatgaagacacatctagagtagcagaagtagcttcttctttttcttcttcgatgaatatacctaaatttctttttttgagtggtaacttaggtttttcttcttcttcatgtggaattccgtacatgctaaagttctcatcatcgaaatcggttctgtaagaatcgtcgcagtaatcaaatctactttcatcatcttcaccatccacataaatattattaacaccagcttcttccatgttttcactggataaatcgatttctccttctacctcatggactatattacttggtcgtaaagaacttgtcaaagtgcaatcaacgaaaccatcaagtccttcctttgtggtttgaacgtgaattttttcctttacctcaacacaaagccgagaagtttcttttttttcatatgcccaaaaaatcttgaaactgtttattattatcaataataactggtggtgtatctgctggtagtttttttttagtttgagatcttgtaactcaaaactacttcgaatagcctgttatccaaaccgtaatcctcatacaccattggaacaaaatcatgaaaattggtttcactgttaccttcatgaactctacaacctttactattatcaacaacaaaaagccatctggttttctcaaaaatccatcttccacacacgagaataatctgatccatacccaaccccttattcttagtatgaagaaaacgtattagaaagcgaattagaaaacatgaataaaaaagtcacaactaaaaaacgtagatgaattgaggaagagaacaaaccactgaatctaagaaatcccgaaaaggaaggaagtgtaatcttagtgtataatttaaacagttggagcgtaaaataaggaaaaaaaacggaagtgaataatctcaatttaatgcaccaaatgtcaaatatggaaataaattaaacaaatttgttgtcatcaattataagtctgtcgtaacacattgtaaataaaccggttcaccgaagctctcaaaccgggcaacgtttttaattgagcgtttaacaaaattttgaaaacaaaactgatgtttcaaaatttgaaaacaaatctgtcaacaaaaggtctgtcatcaatgaaaaggttattctatttataaacatatatgttataacaagacatgagtaaatctcttatgcttaagatctgaaaaacaaaactgttatcactaaaaacaaatctgttatcactaggatactgtctagtaatttatttttgaaagcaaaatctgttataaaacgatagatttaccaacaagttcataaaatctttgatcacatataacataatcattgaatttcattttatttggatgaaaaaactgtggcaacactacagtttaaattgtaaaataataaatctgttaccaaacacaatgactctgagatttttctaaacaaatctgccacagacttgattttcctaaacaaatatgcgacagacttgttcgcgtactttcaaatttaataattgttagaatgtctgtggagtctatagaaaacaaatctgtcgcggggaaacaaatctgtgaaaacctatatatatctgtagtaactaaaacttacataaatatgtggaacaagaaaaatctgccgaacaaaatctgtggtggacaaacaaatctgtcgcacaaaataaatctgtcgcaacatgagtaccaaattttttaaattcgactaaacttttagagtggcaatttcgttattaaaattgttttttaaattaaataataatggtttttctgtaatattctttttcctaacaaatgaaataaaagacattttggtctaaaatattactcaaataacccatatttttgggatgtcattctagtaattaactctaaaatatgggtttccctatttttttacctaaaataaattacttgtaaaatagtatttagaaaaaaatattaaacaaaattacttattatttttattttagtatattttaaatttatttaataatagaaagtgttattttaccatttttaaaaaaatgaaggtttaaaaacctacaacaaattgaggattttttttactaaattttggatatattaatttgtcctaaacgtcttactcaaacatgagtacacttaatcacatttacttttgatacttacataattacatgcatatatatttcataacacatatagtaatttacgtagatacgtgattactatcattttgtttgtagtttaagaaaatagaggataaatatatttaagataaaaaaactaaaaaatatttaaatacaaactaacctgtaataaattaatagaaacgagtcgcaagttcgtgaattacagttgatgtaggtcaaattaatcgtaagaccactctctcaaataaaagatcgattgtagcactttagggtcgaattccgaaaagctctcggatcacacaatagactaaagtttcgaattaagctaaacaaatagggtataaaataagaaacaaagaaaagcaataaaactcaagatataaatcagatagagaaaagtgtcaggtttagggtattctcaggaaatagatgatagtagatcaacaaatagctaggatgtgatcaaaccgttcttaaactcaaaccttaattacagaataaccggtgatgtgccgtgctactcactctgcctaaggttaaagatccctagtgatgtgccggtgaatccctatattaagacatgcatgctaaacgagttcgataagttcacctaagtacataggccgatttttattacacacctataaacctggcccatcaaacagtagttttggtaacatgtacctatgatgggcaaacctattatttaaaatcaagttctagttgatactagagaactagcattaagaacaagtaaaaatgaagaatcctacagatatcctaacaaagaggcaatctactaaatcatctaacttcctaatgaaaaaccctaaacctaacaagaaaactactcaatcatgatcatagaagaacaaaacatgtttgaataagaaatcaataatgaaattaagaagagaatagagtttagaaagatcttctttaaagggagtctctacatggttttgctcccaagtacagaatagaaaaggagaatagcctctccaagcttaggtctaaacaatgaccttaaaactatatatatatatatatatatatatatatatatatatatatatatatatatatatatgtttctaaaacgtgctgaaccttgtttaaaaataagagaaagttctgggctgcaaatcttcataacttcaataaaacgcgtctttgaattgtcgtcaggtattgtgtctctcgacacaaggggtggtgtcgatcgacacctacacgatttttggtctccgaatttcttctgcaacataagttctctattttcctccagaatgctccattatctccaattgcatcccaaacttgtaaattcctgaaaataactataaaagactttagaaataacaaatagactctaaaacctataccaaaattataggtaaaagcagtaaaaatagagatatatcaacagtcttgcaatatgtcaagttttgttgataacgttcaaacattatatgttaaggttaataaaatttatatatttttttctgtaagataaataattattcaccttttaatagattaacaaatatttcatcattattatgtttaatagtttaatataagactgcagttggaaaccgagtctatcatggacaaaatgaaggttgttattgaagctgaacaaccaaaaaatctgagacaaaacatgtactcatgtacttaaaagggtttagatacatgtacttaaaagtttgagacaaaacatgggtcctaaaagtcatagacataacaaaatgaaaagcttaaaaaggaacatggttcttaatagaagcttctaatcatccatgaggcttgggaatttgaaggccttgcaacgaacctcagagtgtagtgttccagcattcttgcctaattcctcaaacatctccacagcaagtttagtccatagggactgcatgttctcatcacacaagccatcaaaggacttgccaagcgccaaacattcgatgtactttattgagtagatagcacaatcacatgcgtcaagattctccgggatcttcgtaatcctcttccactccaactttgagtagctcctcctacgttgctttgacggaataaatgaactcaacatggcaggaatcattgtcatcacaaacatgcactgtatcaccatttctgtatccgtagtcaagctcgggatgctatcataaacattgatccgtttttttggcaagtcaatgtccagagcgacccaatgattcccgttgacaaagaggtatgcatataggtgatccacatcaacaaaccatttcttgtttttcgccgcgtcacattgagctgtaccattgacttgatcctcataatgctccctgaatttgaagcacctataatccggttgaaactgtttatagtctttgagcattgtggagatcaaatcttggtccaaaaaagctattctctggttgggatattttgacggatcacgattgaatcttcggcgaaacaatgacattgcagctcccatgtgctgcattataatcaaaacaacaattattatagttacatatagtttcagccagctaacactaaatgatttaatcaattgaaagcaaaaatctttaaaaattgctatacttacatagtctttcagccatccatatttttctgttgaccaatcgcttcttggagtcattatctgccagtagaaccgagcattaaagttgctggtgttcaggccttctttttcactgcagaaaaaaaaagaatgagtaatgatagcacaaaacgtttctatgtgaagaaaaatagacacttacaaatctggttcgagccaatccttcagcctatcaaattggtcatcagaaacaggttgaagatgttcagttaccgaagaagacgatggtacatcagtgattatgcgcttcactgttgaatttcctacagacggatatttctgagaacccgctagctgtggcactcgtctcctcttactagtaataccgtccagattatctagtccttcttgaagtgctctcaatgcatcagtcgttgccttattagccatctgatctagaggattggagaatgtttcttctgaacgtgaagccattttcagattgtctgcattaaccttatcagtgacatccacaacatcatcatcaaacgtctttgttgttggagctacaactgacttcttcttctcaggttttggactatctaccttctctacctttacagctgtcttcttcatttcaggttttggtttttctaccttctctacattgacaattgtcttcttcttatcagattttgcaactttcttcttagtaaggacctttgtagcagcttccatgttcttcactgaattaacagccttcttaaccactctttgaataggcaacccatcaacagaacctgacttctcctctacaacccaagactgaaaaaaacacagtacacattcattgtaataaacgcagaattcaaatccaaaacagccaacagtaaaattaaaaactgacagctacttacacattggttactatttgcctcatattcatcattgttgtttgatgtggcagcttcattgcatactacaaggggctgagactctttaagaactctcatatcagtctccacagcttcaaaccttgtttttacactcgcttctaagcaagtaactttcttctccaacccatccaatctgctgcttgcattcttgtccatgtcactaattgtgacattcattttttccaacatattccgaatatccagcaagctt

SEQ ID NO: 551 - DNA, 97494 bp, Arabidopsis thaliana
aagctttgaaactcaaagacaaagcacacgtcgatgcaacatatagataattaggataaaacgactgtagatccacaaacaattggagacatgagctaaagagcatcttgccacaagcaacgtcatggttggtcgcaagcacttccacgaacaattcgggaggttgatgagtggtcactgtcatacgacaacgtgacgttaaaaaggactccataaccgtaggtctcgccgggtcaagacgcattacatcttctacacaagtcagaagaatggttaggaaaaacagacatgaaggaatggttctctccataaaggagaacaactttttctctccataaaggaggatggctgcatcaataaaatctccataaaggggttgattgcaaaccgcagaccctcaaggacgagtagaattcgttgaagagctttaatacaaggatccaagacttgccaaacacactcaataggttgcgagacggtaggaggccaagtcagggattgaacaagtctaacttgtggttgtttgattggggtgcgtatgatccagaaggaagcgatgtcgtgcgtcctcgacaaactctccgaataagacgcaagtaacggtccaagatataatcctgtcgttaacgaaattcgaagagcagatccttctggaaaaagcttgtaatctatatagatttgattgagactaaaattcccgtatgaaaaccaacctaaagatttctttagacccttaccatggtaactaataggccaaacagaaggtgtcgctactttgcaagattggagtccacaaccaactaatacaaaggaactagacttaaaacaatttgggcttgaattagcttttaaaataacagacctgggccaatgtggtgagtaagttgggcctgaacaatcattgggccttggtgagataattgtgaggttaggatccagctggcgaaatgggtccggcccgtagagagagaacaccttcgagattagggttttgccgctcgccgtcaccctctccgtcgagccattgctcccaaacaaaaagcaactctccgatatctcgactttgagacatagaggatcaagtagaagcgcatggagaggtgaattccttactatcaccgatgttcagtgaatcggtgcttcagaggaagctgagttagatccataacgaagggctatgacaaagacaacgatatagtagatctttgttttggacgatgaggcgccgcttgatttagagggttcatcttgtgttaatttcgagctttgtgctgagtccagagggtgaagtggacggaggttcgccggaatcctcctcctagctctgtcgcaaagtattagattgtcttcaaacatcaacacaagaaagagggttcgagatgattgagtaaaaagccaagattgacacaaagaaaaaagctttaaggaaacaaagttggagggggtcgagatatcccgacgccggcaagcataagctttgccggcgtcggacagaacgattgggaaaaaagtctcgaaaatagtgcctgggagagtctcaacagtttaaatttatcaaccactagttcaaaacacttaaaaactttctctttatttaactattgagctaaatagtcaccatttaacatactttttacttctctggaacttattcatctcattcagcttatttttattattcaacttatagttattcaacttatcattattcaacttattcaattggttcaatttcttaatcactatttgcagcataagtctcatgtaactagatgtattgaaattcaaaaaattataccaacaaaaagtctgtcatcactaaaaagattatcctaatcataaacaaattggacaataacataacatcacatgagaaaatatgttatcctttggatccgaaaaacaaaactgtcatgacttgtttttagtcatgaaaaaatgataggttacacaacaattcaaaatattaaagatttaggaaaatttgagaagattacatacaataaatctgcgagatattacaaatctgttataactatatcgaaagaagtttgtggtgctgcaaaaaaaactttcgaacaaaatctatggtgaaccaaaaaatatgtggtccaaaataaatatgtcgtaacaagaacctcaaatttaacaaaatcgaacaaaaaggcgaagtgtcagtatcgtaaataaatttctgcgtttttgaaaataaatactttttattaatggcattcttgtaatattattttttcatacaaagcaaaacaatggtattgtagacataattattgcccatataaccaatattttgggcatgtcattctaataacaaaacacaaaatatgggtcattatggtaaatttcccaaatatttatgtgatgttttggaataacaaagtaagttctttcgtggatcaaatttttgttgttgtgataacttcatctttccatccatcgaaatgaattagagatttagactccaattagagtttcttcgatttttgatatttttatgagaagaattagataaacaaaaaatgtgtgatatataaaacaaaaactgtgtggtatatacaattatatgttctcacttgtttatagtgaaaataaagatgatgatgaattttgtttcaccaaaaaggtaaataaaagttattaataaaagctcatatttatatataaaaaaagatggtttttattttaaattttcatacaatgtatttttattacttattagtcacaatctatagaccaatttatacaaaagtcagtattaaaaaaggaaaattaatttctcaacgtaacaccaagatattagcgagaacatctaaaagaagtagctactctattaatattttcctaatagtttatttgtttcacatctaaatttgttataactaattttcatggaaccatttcggaaaaacgttatatttcccaaaacaagaactatcgcatcatgccagatagagcccaaagtataacctcgatctatttatctccgaaacaaaagttataaatctatttctccctgaaacaaaaattatgtatctaaatttctccgagttaatagttctaaatctataaacccaaattattgggtgttggcatgatgtgatagttttcgtggagaaataaacagttttttcgaacatttcaaatataatttgtaacgatttgcacactatatttaaaatgttgttcatattgttatatccgcttaccaactaacttatttagttttagataatattataattctattcttacatgtatcaaaattaatttttatttttgtatattaaaactcttatagagtttttattaattactagacgtttaaaattagatttactcatatttcattttgaacaaacacaatataaaagtaaaatacagttgctgagcaaaacataaaaataaaggaaaaataatatatagttgtcacgagaataatttttcgaaattaaaatacataaaataaaatctataatattaattatccaatttaatgatattcaccaaaataaagtaattatctatactctaaatatataaaaagtaatttttatagaaacaaactttctttgttggtagttttgtttctattcaacttttagtactttgaagtaaatgtgtataccataaaaaaatttggcatctcttccccaaatttttttaaaacgcgcctcttcacatttcgtgtccctctcataaaagagccctactctctagactctagagcattcctctctccgatctttgccgttgctctttcgaaatgacgcgtgtcaaccagcttccatgcgactgtgtatctacggcggaggaatctctcacttccggcacgtgcattacccctacgcacgtgacttccctttcgtctcctcttgatcgctccggcgatgttgatcctcttcctgtttccgacgaatctggtggctcgaaggccgatgaatctatgactgacgcagatgagactaaaaagaggaaacggatactcagtggtgattgtgaagccgatgagaataataagagtgacggagaaatcgcgagtctcaatgacggtgttgatgcgtttactgcgatttgtgaagacttgaattgttctctgtgtaatcaattgcctgataggcccgtcacggttcgttctctctctctctctcgctttgtgttttgcctcttatacttgttaatgttagtgtatatgattgtttacacttgagttactaatttcacacaattttggagtagattccttctttttgtgcttaccatttatgatgaactacatttatagataacagaattgctaagttcaattaagttaatacttattatatacctgtttttgtatctctttttggttggatttgacattagttagttttgagttacttctcaaggtaacaaatctattgtgtagatgaaatttattagttaagagtagtagtatatgggttgtttctttatcatgttgaaattatgtgtgttggacaagttggtgttgttaaattttgtagtatatgggctgtttctttataagagtagtagtatagtagtatagtagcctaacttatatgtgtagttgaaatttatcatgttggtgttgttaaagtttgtgattgtttacagttttttaagtattaacttcttcttttcaaaataagtatttcagaaaaagatgaagactattacgttaggctgatggataatcttgtatgtgtatttttcttttcagatattatgtggacataacttttgcttgaaatgttttgacaagtggattgatcaagggaatcaaatttgtgctacatgtcgtagcacaattcctgacaaaatggctgccaatcctcgtgttaactcgtctcttgtgtctgttatccgttatgtaaaagttgctaaaactgctggtgttggtactgcaaatttttttccttttacaagcaaccaagacggcccagagaatgcctttagaaccaagcgcgctaaaatcggggaggagaatgctgcaaggatatatgttaccgtaccatttgatcactttggtcctataccagctgaacatgatcctgtcaggaaccaaggtgttttagttggagaatcctgggagaatcgagtagagtgtcggcagtggggggttcacttgccacatgtttcttgcattgctggacaagaagactatggagctcagtctgtagtaatatctggaggttataaggatgacgaggatcatggagaatggtttctatacacaggaaggaggtttgcttttctttactcctagcttttggtccatttgactcatgtagattttacttctctcatgtgtttagaagtatctattgtcctgtttgttgacatacttttgtttgttttcgtcttgaatatatgtggatgtgtcacccagtagagggagacatttcgctaacgaggatcaggagtttgaagacttgaatgaagctttaagagttagttgcgaaatggggtatccagttcgagttgtcaggttagcagaacaaaactccattgctctctcacattctcattttttcgttaagtttccgatatcgaaagttgtaccacaaaggtgaaatgtattgcttttctttgcattgaatgaagaatagagttatgctaagttccatagatacaactcttaatatcagtttccataatctaggtcttacaaggataggtattctgcatatgcccctaaggaaggagtgagatatgatggtgtatacaggatcgagaaatgctggcgaaaagctagattcccggtacacacatatagtgaaacaagcttgtaattttttccctgccctttatatgcattgacatgttcttctcattccataggattcatttaaggtctgtcgttacctgtttgtaagatgtgacaatgagccagctccatggaacaggtttggtctacttcttagaagcaccttttcgatattctgagtttaacactgtgataatattgcagtgatgagagtggagatcgtccaagacctttgcctaatattccagagcttgaaacggcctcagacctgtttgagagaaaggaaagtccatcatgggattttgatgtaagttccaattataacagttagcgagtgagacgtgagcagatctcgaattttctgtattgtgctgataataatatacgcttatattatcaggaagccgagggccgttggagatggatgaagcctccacctgcaaatcatgagcagagggagagaatgaagatggctatgacatgtcttctcctttttgtccttatcattctcgttggttcatcatctatcttatatcagtattagaagaatcaccgacaaataacttgttggtttgatcccttagttgtctttcttgttaccaacagtcttttctagttctctcactactcaagtcttggaaacttgaggttctcttggttagtgaagtcggattcatatttttttgtatgcttccaacaatttgtccctgctctcaaaaggtgcaatgaagtttttaagtatataatgaattatgttaggtcttcattcttttgagcaatatttttaattactaggatttagaggactcagagacataactgagtaagatgttacgatgtttttttactaccacataccactgctgcatcattggattttaaaaacaaacaaagtaaatgttggtgcggtttaagtctcccaatctttcatcttcttgctcccttttggttttgcgattggagcatccatgcctgccattttcttgttgtatttttcacgtagaggatcattggaagtccacctgcacattcattcattttatgtaagtattattatcaaaatcagcagctcatgccaacacaaacaggttcacattcacatgcaataatttagttcagttgccagcttactgtttctactcaaacgctaaataaatcagatttcagaagcctaaaatgagagctatgaagtttatgcctaaccaagatgcaagaaaagaaacgctaaaagcaaagaacttacgggttactccaatctgttgtgtcttcattgacaaggtgagtccatttagttcttccactacgaccaaagtgcttgacttgcataactttggggagaatcgatttgtccaacctatcttctccggttggagcagagaagtcgcgctgaaatataccatcggttccagcagaacctgcctcatcatcaggatctgcctggaagaaggcacccttatggtaatatttctgcataaagttccatttctttttcggttgagctgaagaaggtttcggattcttcctctcccaatctctcctctcctgctctgtcatattcctcaacttctctatttcttccctctctctcagcatagcttcccttgcatctctttctctcttgatcctaccaatctctcttgtcttccaaacttcatactcctcagcttcattgagttcgtcatcagtttccacatctccaatattagcttcctccaatagtatgttcttccgtatctcttcatctttcctaacttcctcaaccacaatttgctttgtctctatttttctttgctccaattttctctttgctaattcctcaagagcttcttcttcagcctcaagcctctctcgctctgcaattgtatctctctcagctttcggtacaaaaacaggcttaatcaaggcaataccaggcatatcatcttccgaatcagtctcgtactcagactcctcctcctcctcttcttcctcttgtatctcatcttcttcttctaaaggaagtaaagcagcctcctcttgtgctcgtctaagattcttctccttaattcttcttcttctttcttccaaggcatcttcatcatcatcctcgtctctattctcttgattcctcgattcttcttcttccgtagatataatctcagcctgtctaatacgccgatgatcagctctaacttcgtcacggttttcaactttagtctgagctaaacgccgcagccttggatcatccttcctagcaacacccaaatcatcattctttggaaaagctctatccaaaacagaaaacttctgcatcctaacatcatcatcttcttcagcttcctcagcccactccggagcttttcctggccaataccttcttactttagtctgtccaataccaccttttagtttctcccttacagcaattgcagattcactcactcccgctgtgaccgacatatttgcacttgcaagtaaccaaactcaatcaaattagctatctgtctctgcagcacaaaataatacagggattagattcaagctttgcatcattagtattcaccagaaaaggaaaggaaaagagctacttcccctaatcgatcctcaatagctaaaatcttaaagagacaacaacaaaatgcattatgtacaatgcatatcattgatgtgtgtgtgggtgagtatatcaacataaacacaccaacatgaacaatggacgctagagaaattcgaagattgcacattttaacgaactataacattttcaatagtatgtacatacttaatcaagtgtggtgaaatcaacaatcccaatagcgaagctattgttcatacataaacacaagcacgaaagagagtaaactgttacaaagttttgtcttttgacaaatttgcatacagagtcaacaaaaagtcgatatctttctgtacccaaaagcataagaaccaataagaacaaataacaatagaaatgattaatcgagaaaagccctagaatacaaattcgtgaaaccctaaatctcagaacaaaacaaagatcgatttcgcaagatttagcttcagtagaaacagatcgacatcatatgagatcgaattgataagaaaatcgagcttaccaggagatgagagagtttcggttagagattgcggaggagacggcccttaggtggcggtctcagcggcggcgataaatgtaaccttgacggcgagagattgatgttggcccaagaccattaaggcccaatacttcggttcgtaaatttccaactaaacgtgaattttagtaattttttgtgaaattaagaaaattgttattatttttatatttttcctaaaactatacacagtaaaatttccataaattaataatttaatatagatgagactatggtattttcttaatttatcaattgatccaaaaacaaaatttaggacagaaaaaatgtattaatttatcgggtattaatttatcgattattaatttatatgaggttttattagttccataaccttaagattacaagatatttacaaatagtataactaataacaccgagttttattaaaaaaaaactatgaaaaatgtagtttgagtagtaattgtgaaacaaaagaattgaattttggtttacataactttagagatggtagacgggcgtgcccgcgaccgaacggaccgaccgcaacatgctcgcttttccattgatccgcgacgaaccggaccgcagacgaccgcggtcttgaaaagtgagtcctaacccgccccgcaaagcccaacagttagacagaccggcccacggtctttagaggcagaagaacttatgtttggttgattgacgaagttgtaccttgtttctatgaagtgttagcttcaaggaatattgtgaaacgttatgtattagcttgaagtacttaaaacatttaagtcaaaagtacttaaaacagaaattctaaaacagtacaaaacatatatatgtgacatgtttaccttagcagcatagatctcagagtcttgcttcttgattttaaattcgtttttcaagttacagactgcttggtgacttttcctgtgagacaccaacaatatcatgtcaaatcttgtcgcatttgtcaagagttgaactgaaacttaaactcttgacttgaacattgcaaaacagagatatgtaacatgtcaaaaacattacaaaacacttgactttagctagattttctaaagtaaaaaaacattacaaaacagagatatgtaacatgtttaccttagtattagagctttgtgatggtgaagcacaaaagatcacataggagaactctggatgttcctgccacatataaagctccaactctaacttccatattgtgaaaaacatgactcttactatataaaacgttgtgaagaaaaagaactagtcactaatccacacaaaacatattgataaacacaaaagacacatgaaacagggatttacaggacatcataaacgttcttataagaagaatatgtgcaactatcaaaattaagctcagtccatgtaggagacaaactcaaagtcacctgaatcgattgggacacgttcttcttcatcaacctcaaaggtcgtcgtcgttgccgtatcaaaccgtgtttttgaaatgtatgatccgatacatgaacatgcttcttctataaacgaaactctaagtcgtacacattggtatagttatagagatgacttcatcatcttgatgtagggtttcgtttatagaaacagcctttgcaacgtttgctatataatcaatatgaagcttaagcatataaaccccgtaaaaaatattcaaggttcactttgttcagttcataaaattatgtttttaatggttgacgacaaaaaccaaaagagaagttctaagcgaatatattaagtcatacatatagcctagaaaaaaataattgaaatcgttgcatatgatttaaaaaaccttagatatatcatactagagacagtcacacgggaatggttcaaaataatattgtaaaataagttttaattgttgtttattatatattgagaaatgtttaaattcttttgtagttgtaattgatttatttatatttcatattattataataatatagaaaactagctataattgtatatattaagtaatgtttagatatttttgaaataaattatattctatttcatatcagtaagaggaaatactgatttatagtttctgagaaaaaatatgtgtagccatttatagaaaagagcatttattaaattaatttaaatataaaatagtgttcttttcatgtttatgtttacgagttcaaaaacaaattcgtgtgggcttggcctcttggtttaaagcggacaatatcatattagagaaaaatatttgggcttggagagtccaacaattgatattagagcctatgtaaaaaaacgtggacctaaagaggtgggtttgggctccatgttcggtatggaaagagttctcaatgtaacacgataagaagagtgcttcaagttgtccttgcaaataaggaatgccagagcctggtgctaaggttttgcttgaggggagggcctaaagttcggggtttggtttgaggagataattattgggagacaaaccaacgtctcacatcaaaaaattagaaaatattagtctaatatataaatcatgtttaattccaattagtagtgataccttttggaaagaagacaaaaataaatccgcgcgggcttggccacttggctcaaaacggacaatatcatattagtaggagagttgacttgggcttagaaagacgtcataagatttgagagttaaccatcaactttaaatattggaaatcatacataaaccacaagtccgttaataaaactgtgacatatgatttcattctttaatattttgatacattgttatgaaagttttagaaccttaaccgagtggaagaaaactttggcccatacaactctagtctagtggtagttgagaattgcggaaaaattgaaaggacttaatcagattcgatctaccatgaaaaaagcaatacaatatcagtcgagcgcatgcatataaatcacaatctttcgtcacctactaatttgtcttaagttgacaaaagttgctttttacaaaagtaaaataaaaagcttagcgaatgtgccaaagaaactgtgtcgttacatatgtatatatttgatttaatcaataaaaggtaaatggacttcttaaaacctaacttcatcgacgtcataattgtaaaaattatataagcgttgttctatatcctacatagtttatatatcattctcagcttaaatcagatcgtaatccaagtaaaatctattaaaacacaatctcatattccggccttaacaatagcaactattagttgaatataaattagtcagatggatgataaatttccctcgttgatgctagtgaactagaacttttgaaactataaacacatgcaaaattggttatttacgttgaaatatttatgaatgagaataactagctttttcacatagtcaaagttagtatcaattttgagttggaatcatgcgcttaagcacaagtgattcatggtgatttcaacgtaaaatacctatttagcatagattggttaatgcctatccaccatatgaataattaaaaatagttatcgagccaaaatgtatactataatctttggctgtgttcaacgaaagcaattatggacgagcgcggttccctcatttattacttaaattgtagatattgctccatgtaagaatataagatactgactatatattgactaatgtattactccaatttaacggaaataaaggtgacacatgtactcaatcaacaagatgagttattcataatgtaatgaaatgggacatatcaaaacttgagtggtagagttgctgcctcttaattacaaacagtttgaaagcaacccctccttctaactaaatctgatattgctccttattatagaacatgtggttgcaattttgtgcacacatatagagtttctgatgattttattcattcaccataaattgtatttggtataatgattgatgcgagagatcacttcgtaatagtggatgttttcttcagatagtcgctacatgttgaattgtggtaagcttatttctactagtagtgttatataatctcaatgaattgtatagcaacaggtggtactttaaaatacatattttgaaaacaaaacttctcatcgcatcaacaattctactttgactttgagccagatgtcttggcaacaaatcggagtttacatgaatgtcattttcatttgtatttttgtttacatattattgtcaattcatttaaattttaaatgcaactgaccccaatcaaaaacttggatcaatgtctaccgttgaaacatgacacacaattactaactgccatgtgtcctccaaaattgataaatcactcctcagttatttacgtctgcgtttaatttttcaaacatttgactgttccctatctcataagtcataaactaatactcattatcttttgttatttcccactttttgaattagtagattttaaataataaaaacgagacatggtacgcttacaaaaaaaaaaattatgaatgccaaaatgcaaagactggtaaatatgtcacatatattttatataattatttcaagttaaatatttttcttttttttttaacgttttttatggacgtcttaaactttccaacatatttctttttttttttaaaactttccaacatatttcttttttttttaaaactttccaacatatttatgatttggaatatagattacctccatcaaaattcatataatataaatatattatttatttgttttatttagaaataaacaaacaacgatcggccaaaaaaacaaaaaaacgagaaaaactgaaaaagtattcgtacgtattacccacccaaacttgcatgggttatatataagggtgtgttggcaaaatagtcactttttcatacttaattaggaaagtagtcattttactattcataatttgtaaaatagtcattttttgctgtttgattcgtacacttagattgtacatcacttttagtgtacaaatgtaaagtgtacgctgtatatttttatatatatttgtacactaaaagtggtgtacaatctaaatgtacgaatcaaacagtgaaaagtgactattttacaaattataaataataaagtgactatttttccaattaagtttaaacaaatgactagtttacaaattaactctatatataatggattaaatgccaaaagtttcatttcacctcggtggaagtttcttgcaccctccacgagaccccaaaagcaattaatgatctttgttttgttctttcagaagcaataatgtaatcctattttattttgtttttactaagcaaaagaaaaacaactcaacaaataaacaaataatctgctattgtcacatgagtcacatctcctttactatatgaaatgcgctcactgtagataaatgtaatctcatccctgcaccatatatggtacaaagaaagagcctttcttcctcacttttatcttcactctccttgaacatattttccctcttaatatcttcaaggaaaaaaaaaaaactgcaaagagaagtggtgtgagtgaaaatgggagtggaaggaacgatggagtatatatcagaccttttaaagaagaggaagaggaagaagaagaagcaaatgcaaacagtagctctccgtgttgctcgtatcgactgcgaaggctgtgaacgtaagatcaaacatgtcctctccggtgtcaaaggtaaagaaaatcagttttagccaaccatcatgataatggttagagatttgccatgttggtcgaaaccacggatcaaattcattccactacttttgtacatgccccgtctaaagcatagagccatagacaaagaaaatcattaatatatgatatatctaacattttttaaatgccaacttttattttaaaaaagtagatttttctatatatgtacaaaaataatatgaatggggtataattaaattttaaatctcgagtggacatattggcattacaatatgtgtttttgaatatatataacactaccaatttatatactcgttggacgatagaaaatgtgacatttaacaaaaaaaaacatgaaaattggatttaatttgcattggactcgtttggacaggggtgaagtcagtggacgtggacgtaaagctgcagaaggtaacggtaacgggatatatagacccaaagaaggttttggaggctgccaagtcaacgaagaagaaagtggagttatggccgtacgttccttacacaatggtggcgaatccgtacatatctcaggcgtatgacaagaaggcaccaccaaacatggttcggaaagtccccgacacggcctctgtcaacgagaccaccgtcgatgactcttacactattatgtttagcgacgagaaccctaattcttgcgctatcatgtagaagagtgtgcttttgtaaattaattaagtatatggctatagattatattatactattatatattatcggttttggtaatagtacctacgtaagagtcgtggtgtacgggtttggctttacaactattacgtgagaaaatcgagatttcttaacacttataaggaatttaaataagaggttttatagatagctaaattatgttttgaaatattctgctgatgagtggatgatatataattcattcgtttagagtatattcactttttattttggataacttgggtgtgatccagttcaaaggataccataaactccgagtcaaatcgcggaggcttttttcccaagctggttctcgggtcaacgagtcatgagcagagcgtgcctaggtttttggtggtcttaggcaaataaggaaaaacattttatacatattgtgataaaatgtctgataatgtataattaaatttaacatatttttcaataattcctgaatttttgctttcaccggattatcgggtactcttatgaaatagattttcgatttaagctcggtgttcacaagttggagaaaaagttcggtatatctaagactcactatatactgataattttaaagcatataagctaaacaaatatatggtgacatgtgtttatataaaaaaagatgatacattcggttcctcagtagctttagctttgccctttgattggcccttataacttaatgatggagttccggtgcttccattttttctctgtttgatcctgattaaagaaaacagagacatcaatcaaataaactaaagtaaaatgaataagccaaaagcaaaattatacaagtgaatcaaaatatcgaaactaaacgtagaagaccaagattgtgtttataagtagagaggaatattatctttcactcatgattgactaccaacgactgtttttttaagaaaaaaaggtgtttagttcataatattttttgtgaagataaatcttgatggaaaaatatatttataagaactgatattagatgttggttttgataaaattaaaatatgaaatattcaaaatagtcaaagattgagctgatttaaaggaacttatatagttgttgtttgtgtaatatcttatattcgaccgaaacaaaattacaaaatatccaaaaatttgaactgattaatttagtatttgaatttcctacattctctaaacaaattaattaatttcaatatattaaagattaaaaaaaattataagttttcttcacgttaattttgttcctcttctattttaaggctaaataatttttaaaaaattccttagttttttttagatttgtttcttttaacttctgttgaaaaagctaacaatattggctactttctcttcttgatgttttacagcagaaaagaccgagaaatcgaatgaaacagtatgcacataattcttcaacgttcctttgttttctctttttgttattcttcaatgttttctaatttaattacttcaattccaaacacaggacaaatgtgcagcttgtaagaaaacagtttattcctctatagaacatgacaatgaaaggagaatcttcccacacaagacttgcttcacatatgtatgcaaactctaaaacacctaactttatgaaacataaaaaaaagtgaagaaaagtcttcttacattgcaaagagtatcgaaaatgcctaaaatgaaagataaatctaacaaaaaatgcctacctattttctaattaactataaaaacacaaacacaaacacaaaaacaaatacaaaaacaaaaacaacaccaacaccaacaccaacaccatttatcaattgtggactcctcttctctttgtagatgttcttctatgtccaaatattgagtttctggagtaattttctcccatatacattgcacctcatgaatggaacatttctgtttatatagaacaacaatacatgtcgcacatgatcctacaaaacaccaaccacaatataagttggtaaaaatccacataaaacgactccgaatcatcatgtttatctcttacctcggatacaatccacgctgtttgaatcacataatctccatatggatctacaagaagtgaatcaatgtcacttagcagctccgctatgatcctcctggaggaaaattctctactttccaaacacttctgcaccacgtgactcccatacttgtcataagagagttgcacgtaatttccatcaagatgtttcgagagagcacttgtcacctcataatctttcaaacgcaacaaatattgcaccacgtagtttctgaccaatagagattttggtgtaagagtacttaatgtgatttatacaatgattaacgcaaaatcataaaagaatcttatcttacccgtagcaattcccgcataatcttacagcaatactgattatctccttaatcaaagggtctcttagctctcgagaggattgtctaatcaattttttaagcatacaacatccattttgatctattgcaacttgataacaattttgaacaatcacttcaagaagatactgtcaaatatagaagagaccacacatgaaaaatgatcagtaaaaagcatatattaacaagttcaaaccggtttacaaaattaatacttatggtctaccactactcattttcttgtaacacaagcaagagagctcgaaagcctttgttacacttttcccacacacaaaacaatttaagttttgaaagctatgtaaccgcgagattattaaaaccaaatttgatgaaataacaagttcatagttcgaatcgggccatctaaaattccaaaaatgtgttggaaatttaagtattcacaatcttggttataagaattctggtgaaaatctctattagctataaaataatgtttgaggaacaaagaagtaaagatgcttactctggtatgtgaaggagaaaattgattgaagcagaacaaaatcacacgatgagcaataacgtccttggtcaatagaagtgaaacatagcatagagtttccatgaaccgagatatttgctcttcagaacaaagactacgcatcaaaccttgtattgcatgtgttctgttatctccaacataagagagaaaaaaacaaaaaaaaacaagtcacatgaatggtattagtgagactaaatgaaatggacataagaataatgcgtacccgtgtgtatggacacaaagcctaacaaattcaaaaggttcctcaaggactatatccaaaacccgagtgatctgttcatcggtgcatttctccataagctttcgaaagactttatggccataataatcaagcatcaattcacatacatgtgagatcaaattgtcaaatatcttatcaattgtctcctttaaacccttggcaatcacatattgcaacatgtgagactctataccgtctttagcacgcgataatagagtattgcggattccatacatataaccatatgcatcatcactccaaggggtttggtcaaagaaaggattacttggtaaataaggaacgtcttctaaatttccgtatggagaacccatgacactagcactacgactacgttcatgaaaagacctaagagcatcatacccattaacataattatctttcaatctctgactgattcctctgttctcgtccagtgttttgctgagaatctgaaggaaaccagttcacacgatcggtcataccttgatccccacggtccagttcggagacaccaaatcttctaaactcatgttctagggtttgcaaatcagaagaaaataaggtttcaggtgagtaatcactcaagggaaacgaatggtcgtaagttctgagacgctcccacaaaatccgttgagcgggagattccacggcttcctgaaacggtgcggccgccactctttcgttctgattgctcattggagaagacttggaccacgacgacttggagatgcgtttagtaaaaggagatgttgagaaatgaaagatcaggttccgataattattagagatgctaaggtaaatcttattttataaagtatgaatttcaaaattaggaactcatatgattgtaccacgtgttaattttattgatcttagattttgacacgtataaaacaagtatttccttttattaattttaaaataaatgtatatttcttttttactttcaaatcataatataacttgagaattttttttcttatacagctttttttttaaaatcataagattttttttttaattattattcttagatagcttgttaagaattttaatttatccaatcatacactttatgcatattaaccggatttttaataaacttgttaccttctttctttaaatagatcccatcttctctagctctccaatcccataggcctccatgatcctccatactgaaaagcttgaatgccgtaaagctttgatagtgtatatagttaggaccttgtctcaaagtacacataaaacgggtggtaccccaaaagttagtgccaaaataatctagaaaatgtcctccgattggtattatatgtggacctaatacatcatctttagaataacacctcatccagaggtttttcttgaatttgagctcgttcgcgatcctgattcttgctctcgatacatggccaaacatgcaaaggctaaacacaaacataaagatggataggtttttcattttcattttctttttggtagatgtttagatctttggttttggtgttgtatatatatacacatttgtattactattgttggcacacattcccttcggtattagattcaatgttgtaacacatatggcataatatcttacattttgaatgatttgagttttagtgagtttttatatgattttcatgatttgagggaagttgatgtgatttattgtaaaatcttttcaaattccatctaaaaccatgagatttggatttctatatttttaactaaaaaagtcttatcaaatcctctcaaatcctttaaaattaataagaatcaaattcacaaactgttttaaacagtggatttatttttaaaccattagttcaataacagtattggattttacaaaagtttttaaaatcaatgattgaataacataaaatttgtaaattttactgaaatcacttaaaatactagtttgaatacacccctcgtagttatatgtgattatgtgaagatatgttacaataatcaaattaggtatctctatataactataaaaattgaattttgaaagaaataaaataaaatcaagcaaccaattgtggataatattggaaagattatgctcgaagatcaaatgataatctattaaccaattgtgtataatcaatcgataatactggaagatcaaacgtaatcaattatatatcccctattacaaatttacagtataattaaagagaattaaatgataatatctttttatatttggaaacgaaaaagttctaaaattatttacgaaattcattcattattaatcagttaattgtaaatgaatttatttaaaaacgtgaacatagtaactaatattaatatatttataatttatataatgaatagaagggaaaatcataaaagtaatgattgtttgtaaaaataccgttttctaataccctttcgcaataataatcttttctgttggtcattttttaaatatctcttttcttaaacaaaatgatcaaattacttatcatctgatgagaacatgtaaaatacctcttttttatccatcatttgtgtttgatatccatttaaaaataccactttttccgccaaaatttatttttccctccaaaaatttatttggaatatttttttcgggaaaatcaatatttcattttattaacgtataatattttcaaaatatgggtaaaataatcattaaatgacaaacaagaagggatataattaaaaatagataattttgaaacagcatttttagcaatttttcatgattgtttctccaaaacatatacgtaaataaataaataaaacatttcatcaaaaatattctattgttttttaatataaaataaaatgaatatgtaagagaacaacaatagaatacattaaaatatgtatatcatcattaaaaaaattcatattattattcactttactaattctaaatacaaaacacatcattatgttactgtaatattatgaatattataattgcttaaaaatatttcttaattacaaccaaaatcgtagtaatatcttctagctatctagctatatatatatatatatatatatatatatatatatatgttcttcttcctccattgttcctctatttcttgtaaaaacacaaagagaaaatctgtattctcctttgcagatatgtaactactcatccattgcaagccccctttttaacagctcttcaaagaatctagaaacttcagcaataatttttaaacatgttgctagaaaatcctctggtttttgctctgttctttttacttcttttaaaaaagctaagaatcgaatgattcttcaacattcctctgttttctctttttgttattcttcagtgttttctaatctaatttcttgaatagaagtaagcataagatttacaacaatcaatataattctttgttattaactgtaaaaaaaatattacacaaaagaacaaaatgaaccaatcataaaaagttaagaaaaaaaaaaaatacataaccatatacatatagatgtttaaatatctgcagaggaaacccttggattagtatggagggtcttcttagatttcttcgttttccagattttactcttacctccaacattttctttttcttcctctacttttgcctctgcaagcttcatcttcatcttttctttataaatcttcctcatcgcgtaagcttctgcgaaacccgctgtgctcgatccaccgacaccgtacatcttccaaaaataaaatctacgaatcaagattggtctaaaacttagtgagtatgaggatgaggctttatttttaaggggtttggggatgtatttataaggttgtagagagggtagttacatggaattttccattcgacggtcaattttgatttttctttctttgttttgtttgtttccttatttggatttctttaatttgaggaaatatcatagaaaacgtagaaaatttgaaaaataaagtatatttgcttggaaaccaagggattgattctctaccatacaaaagcgaccgaagcaaatcctaaacgttgacatacactagtactgacaggtcaacttaaataggaccgtaacttggtgttccataccatgtcaacttaactaggaaaactatattggataacaatttttgacatagatgaataataaaataagttaaataactatcaatattttttattaggttgattacaatataatctataactgattacattgtttttctctcgggttaaactaacatattatattcatacctaataaaacagtgtaagatattcataagagaaaaaaaaaaaaatatatatatatatatatatatattatttatttatttattggtataaaaaatataaattatttgttgatttgtgtagtaattagaaatgacttttgaggaattagttatgaattagtgttgaagtcaatgtgtttcgtttcatgaaattaagtaggtgagtgtagaagcagaacttagatacatcaaacaaaatttgaagaatagaacgcaatgaaaactatagtttgtattcaccaaatgcatttaaacttattggacttcgtctttaaatgtagatgttttcaaataatcacgtaattaattttggtggcgaaactagttttaaaaaaaaaatgaaattaattaaagaaacagtaaagttagttagtgcataaattctaaaaaaacacaaaatattagtgaagaaaatagatcaaagtgggtatatatgaaaatacttgagtccatttgacatttgcttatgtaatgcatgacgatgacgatatgtccaaatcaaaatcttttacgagagtccatttgcttatgtcatgcatgacgatatgtccaaatcaactagttcctaggaataaagcatactagtgttttctccagcaacaaatactacaaaagtttatctaagtctttataccatattactgtttatgtaattgaacatctctcattaacttcaagtaaaatctccttcaccaaaatccaaaacaatgttccatcaattgaaccaaagttatagatttatgttgttgtaatgatatatagctaaacaaaaaaacggacatatgagtcatttagttgtttagtccccaatcatatggttggtacttcacttcaaactgagtatcaactaaacaatcaagcaaagcttctgaaagttgtggctccaaaaacgttgatgcatgcttaagtatctcctcttttccatttccaaaatctaccccatacctatgcaacggaacatgtttagtaaaatgagacagaaccatgaaacaatgttgaactaaatgaaatatatgtctaagagcttttaccaatcaaagattttgctgatctctgcaactttggcattgagatcaactctaagtccaccacatcttaagaaatcgcgagctgcctccattagttctttatcgatctctccaggcgtgaagcatcgaagaggtggtccagaccgagttccacaaaccagagtaaaatgagtcaaaggctctgcataaggcagagcaacctaaaaagacatgagacatatatgaatcaaaagtattcatgagacttgactcaacagactaacacttaacaaattttttaccttggaacgtttatcctttacaccaaatggtttcataggattaaacatcggtcgctggttaccccttagaattccattttgtatagccgaaagcgagtaagtgtagccaccaatcacatacttgaagtccataaacatcttggttcgatcaaaagttcctgctggatgtccccatactagtattgaatgtatagccatcatgttataaaggtttatgaagaacgctagcttttcctctctttgcatatcttcaagctctactctatgaagctcctggattattcgcaagtacctttgaaaatcgaacaatactcgggtgagtaacaaaacattagaaaatagataaagaatgtcactatacataccttgcaaactcttcactcccatggatgcttctatagtccacatgttttccatccggtgaagtgtaagcttcaagaatcgctcggtacacaagtctgagtctcgatgcgatttccacaatcggccttggcttcaaatcgattattcctctaggtatgttgtgacattgagatgacactatagggtcatcgtctagaaaccgatacaagtgattcccatcctcaaacaaattctccctagttaaccgcgaaagaatggaaaataagaagcacaaatgaaagttgaacacctaaaaaaacgtcggtatggcgaagaaaactcactctaggacatgttgaaagaagagatggcttgcaagctttcgagcaacttcaactgcctatacaacaagattggattttacgtgaccataaaatcctctaaaatcttaaattctcacagtgatcatagtacttaccccatctctttctagtcgttgatccgcagataagaaatcaacagcttcagaacctaagaaacagtttttaaacctacgcatcttataaaaccgatccttaactacacaaggcttcatcttcaacactattaaagctagctcatcaacaggtcctttactcgatgcatcatcttcccctgaaaaaggcggtaaaggagcttcccgaggcggtgtttcttctatcaaatgtttgatcttctcctcaagctctcctgattcctccaataccttaagctccttataactcccaactaacttttcattaaagaataccataggaacaacatctcctccactaatcttttctagctccacctttcttgtcgggtaaatatcgatgttaatctcgacatatcttagcctcttttcatgcaaaaacaatctacatcctctgcattcctcacatcctagtcttgtatacaatataatcctacctttcatcactacaggctcaaacactgtctcctcttctctataaaccaaatcttcgtcgttttgcatcatcttcaaatagcttaaaggattccacaaagactttccttctgttttaggagattccacctcatcatctttagtcccatgagctgcattgtcaatacttagtttaccagaaagccgacgaatcattgtatgtaccgcaacttcgctcttcgctctaacaaagttcttgatcgccgctgctttctctgtccatgcagaagaagttgatgaattagattcttgtgatattccgcttcgttcatcaacaacagtttcttcacaagctttcgttatttcagcggaactctcactatcatcatcatcatcactactatctacagacattatctcatcaagggaaacgttattatctccttcttcttcttcatgaatatctatagactccatctcctcctcttcctcctcgatttcgacaaccggtttacgagtaaactcttcttctttcttctccacattgtgtttaggagacacttctttagctatgatctcagcagatttcctctcctcttccacattttgttgtttaggagaaacttccttagcgatgatctcagcagattttctctcctcttccgtattttgttgtttaggagaactctccatattcgtcgatgatgacgctataacagagattacacataatcaaacaacatgcaaaacaaaagattgtcacatagtatataaagggttaggtccactccacctatagccaattagttttacgttggaagcgcaaatctatcaaaaacactgcagtatctccgagggagagactgatttctcaagtatcaattcagaaaaaggagaaaggtaatgagaaacttacagatccggagagaatcgttagggaaatggattcacagaaatttgataaataaaatgttacagagataaggtaatgatccaaatccttttgtgtataatttgatggaaattagaagaagaagaagaagaagaaggagagagcgattatcagacagaggcaagagcgaagcagaggagcgggagaagcgggaatctcatgggttggggtggttttgtaaataactctttgtttttttcttcttcactaagaaaaacaaaaacaaaaactgatatgaattatagttaatattcattttgattttagtaagtttgtgaatttgtttaatattgaaatgagtaataataaattcaattactgaaaaacttaatgaaaaatattttggaaatagatttatttttgtaagaaaaattaattacaaagagagagttttgagtcatttcttattgaaattaagatataaatattttggaaaaaaaggtgtgtcaaaattttaattttgtaaagggccaaatattaaatgtatactgtaatgaatcataggtattatttaacctatatatacatttttgcagcaattttttgaagataatgtttgagatttgagccataattcaacaattaattcaaatgggtgggtataacccgatttaactttgttcggatcctacataagatgtttagttctgttcggatcttagataacattaattcttgaaaaaattaccatttaaaaaaaaagacaaaaaacgaaattaataatttaattactaaatttaatataaatattatctctaaactaaccatatttgttatttaccttaactaatttcctaaaataattctacctaatttaaacataaatatatgattcttctttcacttttatttgatcttatattttatttattttgaatttatataaaatatatatacttaataaaaactataatattttatgtacatgatgtaattcaaaaattttaaaacgagcatatattattcaattgatgaagaaataatatatgtataatgttccacatcgcttagaaaaattggacaatggttcaaagccatattataaaaaggaccaaaatgattttgattacgaatgagtaggaagcttggtttatcaggcgtcctaaattaaaattgttatccagtttactcgggttctttgttttaaagaaaaaattataaatattttaactttatcaaaagttaaatattataattttaaaaacttttaataaagtttagctttaaaaaatgttttaaatatttataattttaaaacatgaagttttaaaaattacagattgaattttataagaaatttaaacattataaatatatatatataatatatattaatacggggcgatatattacaggagaaatcctaaatagaaaaatcaaaattcaatgatgaattttgggtcgatattatattttttttgaagttcaaattttataatattaaaattataagaaaatgacaaaatgatgtttaatttcaagggactgtgttatatggtaggacgggtttgggttgataataacatgggatggtatattacgattgtaaaatgtcccacatcgcttaaaaaattggacaatgattcggagtcatactgtaagaagaaccaaaatgattctgattacgaatgagcaagaagcttgatttatgaggtgtccaaaattaaaatggttatcctgtttactaggattctttattttaaagaattgaaactttaaacattttcaaaaagttataaattgaattttacaagaaatttaaacatgataaacactataacagatattaatatgggatgatatagtaagagagaaatcctagatatactacgagagaaatcctaaatataacaatcaaaattcaatgatgaagtttggatcaatattaatttttttttaactttctaattttataaatatttgaaatttataataaaatgacaaatttgtgtttaatttcacggaagagggttatatggtgggatgggtttgagtggataataacatggaatggtattttacagaaaaaccctataattaacagtcataatataattatataatattaaacactaaacaaaattaacaatattaaaaaatacacttaaaacttaaaaaaattttaaacatatttcgattcttttataagaagtttaaacattataaatatttaaattttatactacgggagaaattttagaattgactagtttgggttgataataatttgcgatagtactagaagtgaaatcctagaatgacaatcaaaatacataattatacaattaaatactaaaaaaaacaaacattattaacaaaataaatacatcttaaaacttaattttttgaacgcatctcgattctgtcataaaaaaggtgaaacattattaatatttaaactttatataacgggtgaaatcctagaatttatgggtttgagtcgatattaatataggatggtgtactatgagcgaaatccgagaaacaacaatcaaaatacaattatacaatattaaacacttaacaaaataaacaaatacaacttaaaactttaaaataagttataaaattttgtctcgcggtttaaatcaaacaaagcataaatctatagatcatcataaaaaattcaactgttttttatctaataaaaatataggcccgcggtatactgcgggttaatatctagtgtttagttattttctaaatgtcaactattcatcagtttgactgtttaaagtaagagccattagtaacttaggtaatgtataaggccattttctcacttgttagagccaaattgtagtatttagaagttacgaaagaaaaggactaaaacgttttactagattttacgggagagaggtactttgctgactaaacagattaaagcagtacttttcagttgcaaggaactcattagtccctctcatcgggactttctcaaagatggcaatatcttgtcgagaaattaaactttatataataagattaatggaaaaataagaaaataaataaggtataccatatcataaagataaaaacactttcatataatatttgggttttcgtttgtataacaatggctttaaaaggaaaaaaaaatcatggacacaaaatagggaacaattaagtatagcccgtgttaaagaaaccgcggaatctatataatattgtttttaaaattgcattaaacaagattttatacaaattacgaataaaaattggacgctttgaattttagatccaaaaaaaaaagaaaaatggggtaggtgccgtctagacggctatattaatcggtgtaggtggacagaaaatcgaatcaacgattatttttaccgtttggacaaaattgatactgcctctttttggcagcgtctaggcggatggacgagttttagaacaaggagtatagccaagcgttataataacaatgtcaaacaagtttcttttttggtttggtggtgagattgtcaaaaaaacaacgatatgattggacctagatctccatttcaagttcaaccattacgaaatatgtaaaagttaaggacattacagatcatagagtgggataaattaaatcttaaaatataaattatcggttttgagacctaatgtgcactcgtcgtttcttgttttcgaaggatataacaaacttcagtcaattatgtttggttttaataaacttcagtcttgtttataatctagttttccttttgtaaaagagtagctagctacccatgtatatatgttgtgtgaagaaaatagtgatagagattgcttgttaaagaaataaatagacacagaaattggtaaccgagttcacggcctcaaacgctacgtctcgggggagatctagcttcactatatcaaagggattacaaacaccacttgacttgtgatgttgttttggtttcaggtacaatctcaagaagaacaaagatcaaagataaagaacaaagaaggagaaagcttcttgaaaaataaactctcgtttcttctctttctctctagaactctctgtgtcttgtctaacacacctaccaccactttctctaatctcacgtagagatatataaagtgatggaatgggccattttgttcttctctctgttaggccaaaaggcccatttattgtgtgttttgtcaaatccaataacatgttggaacaaataacactagtttgacactgattttctgagtatagtgaatgttaatatcttgttatttttagatttagtgaacacaagaaaattaaaaaatttaaacaaatcaaaatatttgaaattaaactcaaattctctagttaagaaattaaaactaaaatcaaatacctagctataaccaacctcgtagttaccaaatcaatttgatactatgctatgatgacattcaaacaaatactttgtcttctcctaagatatagtttcgtctccgaatgcaaatatataaactgactttatgttggaaaattaatttgtaagaaatcgaatatgcaacaacattatcttttgagcaaaatataagcaagatatgttcttgcaaatttcttacgataaaacatttaaatgagaggactgcataacgtgagtttctttcactaatttatgcatcttttgtacaaaatgacatgttctaatttgtttctaaatttttaatttgcatataatttacctatgtttaaaaaaaaaagattaaactaccaatgagatgttagcacaaaattatttaagaagacatctaatactcattccttaatttgcaaataatctcaatgcttgtggtacagtgacttgtctaactgtctcatacaaaacaaacaatatcatcaaaccttgaatctgcatgttcattttccttctctctcttctccagctctactcgactcagcctcaatgaaaaaagaatcacatgaaaccttctattttccctttgtcgagacaggatacctctcgagagtctctataatctcctgtaattcgaattcttcgtcaatgtccgccatcatcctcaacagatccggagattgctcctcatcactgagaaccgccataagcgcttgcatctcgacttctacacttagaagaccctctaacatactaactactgctaacattggtggcctatcagaagctgcacgactcgtatagaagatcccaactttgattgtcttcattacctcatccatgtcatagctttgtagtcgcagatctacaaattgcgccaagttgttatgcttccatagatgacacacctaagaatacaaatgaattcagattagtaagttagaaatcatatgcaaaatatgaactacctataaaccactaagtattattaaaactaggttgtgtcagattttattcttatttttaattttaaaacgagctcattttgagctgctaacaaaaagttaactccgttagttttctattaacgaaaatttcacggcatgtattaaatggccaaatcaacgaaatttagccattcttttagaagtcaaccaaactttaggatttaaatgagatttcaaaagttcatgtttttcgtcccaaatttgatagttgacgcatttttctacattttccccataataaaccctagaactagatcttaagtctataagtaattaaattcaaattgatggagagtttgatagtttccaatatttagagaaaacaaattggatgtaattcgacaagtaaattaatgcaagtatttagaaaaaaaatgtatagaaagtccataaacatttcatgaaaataatgtaactttattgtaaattacactgtaaatcaaatatataaacaaagtccatattttttgttcgaatttgttctaactttttaagttataaatttaaaatgggtcaaaattaattattaacataatttttgttcgaatttgtttaacttttcaagttttaaatttaaaaatggtcaaaattattaacatgattttttttctaaacatgtgtgattgaaaccaaataaaatttattaacatacattcatattcagcccggtagaaaaacttatatatcgccttttgtattacaaaattagtttggtttcatgttgatgaatttatataactcaaaagaattaatcttgattaactcttattttcagttatttcataaaattaagaaaaatctatcatatataaaacaaaatacttacttttatccaaaattgaatcaaacctaaattcgaccctaaataaattttggatatagtttgggtaacaataaatatgaaaccgattttcgaagctagtaaattatttttttttacataacaaatacattagtggtaacaactaaaccattttactatatctcagctagatttattatgattttacataatgtttaacacaaatacgaaaaaattcaatttggaaaaaaaagaaattgtaaaatataatttaggaaaaacgaatcttaaaataaatcatttttattgatttaaatttctgtataatggtttgtttatttaaaattgattttattgatattaggtgttattttactttgtactaaaaggtgagagtttagaaaactaaagaaaaaagtttaggtttttcccattttgcccaatattttcaaaaagaaaaaaaaatatttttaatgatacggtaattcattaaaatgtaaaatttgtttgatatttgaatcttgctattgttttgactattgataataaaaataaataaatagtacatacatatttgatgatcattatttacttgtttgttgtattcggctttaatatatgtaaatggaagcatccgttgaaaaagcttttatcacgctagtcataaacttggatcatatgttaataaccgttatagctaagtttgaaaacaacatacaatcagaaattatacagaatgagaaaacgagtctaatccaatggagcctgagcacagccaaaaggatactcaaggacttttctgacagattgagggtttgagtaatgaacacaactctccacataagccaatgcactgtcataagatctgaaaaaacaaaaactaaaatgttagaagagagccagagactttgaatgcgaaatcaaatgaagagaagcaaaaaaggttaaaaccttgatcaaagtggatttttctacccttcttgagctttgttgagctcccatccttgattaaaattaaaactgctgtaaaggtccattgaacttttaagtactaaaaactaaactcgaagtcagatgggagtggacattatttgaaaatgagtagttgagagagaatcgagctttcgattgatccgggaacttggaatcctatggatgaagacatggaactatcaatggtattcttggtttttaaaggcgaaaggcgaccgaaggcgtaaagaccctctgctatcgccttgcgcctaaggcgagcgcctcggtcgcctttcagatgtgaagcgaacgctttcaggatctcactttgcctccgagattctaggcgatgttaccatcgcctcacctcgcctcacgcctatgcacgctttaggcgcgctttttaaaactggtatttacttaaaactgtaaatactaaaacatcaagtcataatttaaatagtgaaactaagtaactaacaccatagaactaagatgaatcttagttcggtcttgttcgattcttaaaggcaagaagaaatagagaatctaaccgatgatctgtgtttctgtacattgtaagacatatatacaaaagtattcgcttcactcaacaagcaagaatcaacccttcatttcttcttggcatcgataaacatagcacgagtccaatgttcaacatcctcggactgtgaaggtggtggcgggtacttaggatgctccaccaaatcccatccgttcatatcgttgttctttcgggttgataattcggttgcagagagataactggctggtgagttcgggtcctggttgtaacttgtgttcctctgctcaaaaagatattagaggtatcgttataaagtaatcatgtagaaacaaaacatatgaactgcttcagaaatcgtgtacaaacacaacatttaattgctcaattcataaagtaaccaccaaatgaaccatcaacatctacaaaatgtagccattttcaaaggatttggacgagagatataatgtgtggaagctatatgaattttcaaacagtttgatgggttcttaagcgactaatatggttcttaatcatgtttgggttttcctttggaaaatttaatgagaaagggaggaattagcatgtaccggaagatgagcactttcgagtaaggagctcgagatgactgagtgagcgttccatatggatttgttgagttgttgagcctgcttgcctgatctgcatcatcagaacacagaagtacacataaacttaccaggaatctaaacaggtatataagataccaaatacaaaagtcggaaaaaagcaacatcgtgtgaaaaggattccccgaagatatggagataaatgtgagttgaacataaagtttgctttaccttgaagaagccattttcaaggagaaaacagaccggacctcctttgatgacgaaagtgtagccagtaacttggcaaatgcttcaaaagttgacgcctcgggaggtacttcaaggcaaagtgaattgtaacaatacgcagtcaagcacgcaacacttttcttgagaagagctatccctttctgtagatctctgtgtgactcaatcgaatgaggagaggcagaggagtacttaaagctgttgcttcctggagagtccagacggggttcttttctatcggactccatggaagcaacaccgaaattgctggagtttttatctgtccatgagttttcaacgctggttgaacaataattccggcgaggtatgaagagaggatactcattgctgcaacagaacaatgccttctttagtttctttattttatcatcttacaaagcacaggtatgtagaatgaagtttccaaaaagggaaaaaaagattgtaccttcgagtagaagtacgtccgtcccaatatgaatctcgttgccaaatacgagagcaagagccctgtgtagttaaaaccaatagacatggacgagtttacaagaaactacagtgaactttgtgttccactagcaatgcaaacttattgaagataaagcaatcataccgcaaaacccgagctatgtagtgcaggagcggctaagttatgaacaacaagattcagaagctggaccatatacctactccacatgtcaaaattttgtcttatgaaacccgatatataccacggactcaaacccaaatgcatagccttaagaaagggaggtcaaaacattaccccaacgagacagcaagctcttctgatgggatagaatgaggatccaaaccactcggaagacgtgaattgcaaattacatcatattgacgaactgaaccgttctgactctctccatcaaaactaacctggatacagtacagagcaactaatataaacagtactcaaagatgataaacagaaacagattatcaaactaatacacatactcgacgtaaaggaaacaatttgcatatctgtttcacaacaactgactgcttatgaagacgctcagacgaaatcgccatctgcaattcacaaaactcaacttctttacactacacatcacaacgtcaaaccaatcccaaaaaagatatagctccttacatgaccaaggctctgagtacatatcaaattaggaaaatacttctccacttgttcaactctagttttctcaagctgcataagaaaaacatagttatctatcaaacaaaacttgaatatttcttatgactcataaagcatcgatttttaacgtacagtagaacgagctgaatcaagaactccatatttaactttaagatcagaagaccctctctcaatcttaaccttcccttgagtaactaactccttattactcttaagcttcttcttcaacttcgaaatcttctcgttttgaatcaatctccaattcttctgatcatcagctttaccctaataacgaaaacatgaaactgtatacttcacagaacaaaaaaaagatgagtctttaaaaccaaaccttagattccaatagctcattgaatcttgataataatgaatctcttcgagttttgagtgacttcaacaaagtgttatactcaatcaatctatagaaggaaaaaaaactatgagggtttcgaaaaaaatcgaaactttatgagagattttgtggtgaaacctatgattaacgcaagcagtacagatacaaggacgattagtgttgtcgcaaatagcgcagttactggatcgttttgtcatcgtttattccaaaaccatattctccggagagaagcttgacggcgacctagagaaagattccggtgatttaaggtcgaagagtcggcgacaaattgggaaattaaacagttggtgtgtcgtagcgagagatgaagattacggatacggagtggttttttcgggtttgattagtaaaccggtatcgctgcggtacgaaattttactggtttaatacagaattagatattttttacttttcggtttgttcttcagtagaaactctataatgttaggaccataaaattttattaatttataataatattaatttatcttataaattaatatttattaatttatcgtataagttaataaatattaatttatcgtataagttaataaatattaatttatagaaatatttatgtaaaatacaatattatattattttgaaaatgtttattaacatatattaaaagccaatggcaggcattataaataagttcgaactccaagatttatttcacaaaatagctgcaaaaatgtatatatagatttaattatctatatgcttttaatatatttgccaaaaaaaaaccaataattaaaagctaatggcagacattgtaaataagttccaactccagaatttatttcacaaaatggctgtaaaaatgtatatatagatttaattatctatatgctttgttgtttgcatatataattatgttagatttttatttttatttgacttctttaatttattttttggcaagatattgtgtatgtatatttacaatattaacgtgaacgtaaacgtaaacatgaagcttaatccagtttctctttacacaaatcttagcaatgctttctcaaataaaatattttacaaaatcaactatgacggatcaaatacgcaaatagttatgtgagtacaacagatatcatactagttgtattttaaaaagaattgtaattgtagcttgaacaaaaaattcatataaaaattagtcttaaaatatatacttaagatttatgattattaatttataatattagtgggactataactttacatagggatttcaaaaaaattattatcttattatcttatcgattttggttaatttttacattggcccgacttgggaccggcaaaatttattaatttatcgtgtttattaatttatcgagtattaatttatagagtttctactgtagttgtaaaatcttttaactatttttgtaacatgaaacatggaatatggtcggtttaagtatgtacaaaagggttgggcgttcggttattcggtttcattcggttttttgtttttttggttcctgcctcctatgatcgataagggaaccagaatttttttggttcgatttcttgtcggttcggtttagttgaaatatttaggatgggttattggtttatagcttaggaattggaaattcaaccaaaaattgttattcaatcattgatcttaaaattctaattaaaattatatattattgattcgatgatttataaatactagttaaaatcctttttattcatttgagatttttgaatttaagacccgttcggatatttttagatttctagtcgggttcgggcttgaattaatttaaatattaaaatataaaaattttgtatgcaaatctatcaaattacttaaaaatttaaaaaattaccaaaccaactcatatagttttatttgaatatatccagaagtaaccgacaatacacaagaataacttaaaaatcagaatattttgtatgtataagtataaatataactaagatattattaatatatacttatatttgaggtatgtttaggtacctattcgggtcgggttcaggtttgggttttttgagttttgaagtttagacccattcgggtatttgaaagtttcgggtttggatatgaatcgagtttacaggtcaattttgggttggttcctcgggttcgggtactatgcatatgcctaccaaaatacccaaaacaattaataaaaattcattagatagaaattgggataaaatgtaggaagattgacaaaaatagtactaaaagatttttgtttccaaaattaacccaacatttcaaaaaaacaaaaaaaaacatgaagtggatttttataagttttgatttcatgaaaatgacttgtatacttttatgaacaatctacatatacatttttgcagccattttgtgaaataaatcctagagttggaactcacttacaagttacaaggaatgccattagcattaattattatcaataaactaatattcctaattactagcatttccttatctaatatattttcataaattctaattacttcaaagaagagaaagtttagcacattattaatattatactttattaaaagataaatattatagttatctataatttattaaacattttagaatatttaacggaaaacgtttacaatatttataatatggaaaatcttacaaaattaaataattatttgaaagaactttgaattgatttgaattataatttttttaataagtgtattattaaaaaaaatgtttaatttcaccgaacgagataagatggtaggatgggtttataataatatatcatatgaactttataaaaattaaataaccatttgaaagaaaacttttaaattgatttgaattatatatttttatattaaagtattattaaaacaaaaataacaaaataatgtttaatttcactgaacggggttagatggtaggacgggtttgggtcgatagtaatacgagacgatataccacgggtgaaatccattagatatgtttaatttcattgaacatgattagatggtatgacgggtttgggttgatagtaatacaagacggtatactaaaggtgaaatcctagatataacaattaagatacaattacattatctaaaacacaaaacaaaacaaacaatattaataaaaaaatatataatttaaatttaaattatatagttataatctagattttaatttaatgaactgtatgttattgtttttatatttttaaacagtaaaaatcaaacatagtagttgtatactaaaaatttataaatataaaagttataaatttagaaaatacaaaagccttgaacagaatgcagccattgttgtgtttttcctcaatattggtattttccacattatcctaaattcaccactaccaattccagctatattatcttcttcctggtgaatatgatcatctctatttataacgttttcatctcttctttcacgactactactaggttctgatatagaatcatccccatgagaaaaccatatataataccctagtgtaaaacatccccaatataagtgattcagaacaatgtcttatgcaagaaaatgatcattgttagtgtcggatcccgcaccatgggctcgggactggtcaaagattgtcacgtaagtgggagaggcccaaaagatgaaaggcctatgggcttacttgagtaagagtataagtggggtgattgatccgcgaggtgagtgagacatcgaggtcaaagttgcccagattggagagtcaagtgggctagaagatgaagcacaagaagttcagagtcaattcagattcgaacgtttgaatagttaattcgaagactgaaacagatacatttaagagagaataattacgtgtaaatgagaattaaatgtattctttgagtataaattatgggttaaagaccatgtaaagacacacgcatttttgtgcaaacttactatacacattttcttacaaaactcatagttttttctataatcgtcaatctattttctagtacatttgtcctcaagaataatccttctcactaaataaataaatacttgagtgtgtgaatccgacatccacaatcattacaacatttgacacaaggacatgccataataccttcaatactcgtcatttcttgataagatgcaaactgcatgagctttattaaaccttatttgtaaaattgtattcctgcctcatagctctggtctcatcatctaatcaattatcatctaatctctaactttattaatattatgagaagacattttcttgttttacaagatttatctttgccttcaaaactttgtctaatatatattaaaaacttctgactaacattgagttggaaatcagtcagaatatattaaaagtaccccactttaaactttccaacaaaattcagacaaaattgaccgacgaatttctgactaacctaacttttgtcggaaatattcaaggtacttacttcacactttttcgacgaacttccgatgaaactttctaactttaaatttgttggaaatattaaaggtagattttttttcctcgaagtttccaacaggtttcatgattttcgacaacaggtttcggaaatttctcacttttcgactaatttacgataaaatttgttttttcggaattttgttagaaacccgtcgaaatatttccaagtaaagattttctttgaaatatttgtctgaaatggctatgtttccctgtagtgagcttgatttctctaatgccctaccaagaacataaaaaaatacaaaaatacaacgttattttgtgttttgggattcaattttttttagaaataccaaaccggagcccaaacacgcaaccttagctaatttaatgagactaaaatgagattacatgatcgagtctcgttttgcatttttaaaaatatttgaatcctaaaacgtaaaatgacgtctttttgtttaaagaacatgccacatcgacccacacgtatccattgactctaaaatcattacagatgactaatttctgttaatgttgactggtaattatgcactaaaataaaaatttaggtatgaaatttgaattttctaggagttgaggtataaattagcactggtcatttgtttgggttggaaaacgcacttttaaaactgttcggattagaatagacccttttctccagaaaagagatatagtaaaacctctataatttaatactcgataaattaataacctctataaattaataaattatgtcagtcccgaattgggactagtgtaataagtgatataaatcgataaattaataagataataattttttgaaaattctatgtaaacatatggtctaataaatatcataaatttataattctataaatatatcaactatatatttataatatatataagaaatgttaataaaatataattctagtattgcttttcttgtttaaattcacattggttcttgttttgaatttaattctaacatttttaatgtatcaaaacttttggtgggtttttttaggcatgataattattttctacttataaatggttcgagaaagattttttgtattactaaaaagtcttatattttcattaaaaaatctctataaattaataactattaatttatcgccaaattaatgcctttataaatcaatagaattttatggttctagaggttttattgtatttgtgtggaagagatataccgagcttaactccgagatcagaatccataagctaaaaaatatgtgatttactcagcatggtcacttggcttaaagacagagacaaaattcaaaaattatttcatgatgcatgtaacaaaacagagaagatcaaccaacaaaatccactacaaggaagatgagaagggctttttatggattgcaagtacttctctaaccttttcccctcttggggatgagagggaggaggggattttcagaggtctagagcctagagtgaagactgaacggagtaggtttataggggacctttgttgagagaactatggagaagttggggtttgcagaaagatggatcaaatggagttatttatgatttatctctcatgaatcaaatcctctccaggattaccagcttgaatcaagacagaaggtgaatctctcaaagtccaacatcacatttgaacattcaatttctgaggatatatagaaggataattaacgttcgaaaagaatttaacaaaactttgtttagaaaccatgcacaacatctgttgcttatgagaagcattattaaagcacaacaagaagatggaagtactgatgagtgggcatatatacagactcatagagtggtttgtaccagaatattctcagataattgaccatgctctactagctagctagagattcaaaagataattttcaaaggtgttaaatcaaccacaaccatatcaggctatacagccaacccacataattagtttaaagcatgaatattattaagatatcaaaatgttttatcttggtttttccaaataattaaaatttatccataaacgtccctcaaaaaaatttaccacatctccatgtaatcctccgttaagctgcgaaaataatttttctagtagctacaaaagtgtacaaaacacatccattaatgattgtattcaattacttcatctttcagctagtaatttaataagcctaataaacaacgattagtaccttggtcttatggaggaaaaatccgcaacaaatgtgatatccaatctttcttctttcagcttctctaaagtaaaactacaaaataaacaaataataactatattggtcatcatggagaatcgtttacataactacgtttggtaaatgaaatgtttagttactttggtttagaagttcttctatcaccatcacaagctaaaccgttgttgcttgatacatcctattcgaaagaaagattgacgcaataatggaaaatattatgacttacgagtaaatgttaatgcatcttgtttaacaaatttgcattattttaattattactatagaacttacaatgtatctaatggatctgacgtttccccgattagtgaattcaaaaactccacaacttctctctgaatatatttgagattcaatagttagggctcatgattgttacatgaagaatgagacatacaactaacaaaattttctatagtcacctcttgaagagaaaaacaatcacgtagtattagtgtctgtagaggactgtcattagatctatgtcccaaattcctaccatcaaaattttctgtcatgagagatcttgctaatagaaaccaagatggtatatcatttcattgtgtattaaaccattttaacctcaaaaagcttccagtgattccagctgtgttggatagattgatatatttcagtatgcgaaaaccctgcaaataatcccaacatatttttggtggtttagaagcttatatatacatttattaaataaagtgagaagacataaaggaggaagagccctaccgtaacaaggatttgggccattgcgtcatttagcctaaaatctaggagtgttagagaagttatcttgaggcagttggtcacaaacaatttgatggttggatatgttatcatgcctaaaatcaaaatcaaccagacacaaaagtaagtagttaagcttaagcaaacttgtgaggagaaaataaaggaagccccaccatgtaaaagttttaccttgataacagttatctaagaacagatgctctatcaagcaacactttctcgcaagtaactctaatataggctctaacaaaacattcctgacaaagagaaaaaaacgatattattctcaaagaattcaatagaagatgcttctctataaagaaataaaagacaaaaaaaaatggacatttcatgaaatttaaacatgcatacaaggaatatagctagtaagaaaaaaaataaaaactttaacttacactccaacaatcttcaaatcggttagattcgagcaggctgacaatgaatccaataaggaatccatgttcatgaatccaagaaagtaaatgtgtagacttgtcaaaagattcctagttaaatggaaaaaacaaaataccaaagaaacatgtgataagagttaaaacataaatgtcattaaatatattaataatgatcaagccaacaatctatatataccccgtaagttttagtggatcaagacaagatcttgtaaaaaaacatccaggactaggagcatcacgaccaagtttaagggatctgctcgcactattcctataatgtattaatggaggaagacaagaacttctaaacacagatccgggagcatcaacacgaccaagtttaagggatctaagcacaaccaaaccaatgagagatggttacatatactgattaacaaagcaaataacattgttaaagataagatatataagaaagtgcaagccaatatatgtgaaataacctgagttgttttccagaacgattgagcaaagtatgcaaaacacggtcatcaacatatttaaatgcttttgtcaagtcaatatgagagtaacataaagggtccatggcacacttattgaacattgtgaagcatgtagaagcttgcattagggactttgtatcaaccatgtggctaggaccaatataattaagagaaatccatattgattggttaccttaacggtgagttcagaagggaggaaccaggagatggaattgtggagtgtggctagtttctgagagcatcgtttggtggattggagaagaagcgagagtcgctcgagagtacgattgacgagttggtcttgaacggagacatcacaagaggagagaagattatcaagtactcgatcgaaagaggagcttatggagagagatggagaatccggaaatgtaaccaaggaggagattatcgaatccaagttgctttgatgaaattctggggaatcagatagggactagaggtagggttttcggtgggcaacattgcaaaggcttcttttttttttgcaataatcagatttcccaactatttcatttatactaacccatgatataagtagggtcatgtaataaactacataagattcttttctaggtatgttcagcaaaaaaaagattactttctatgtattataaaaagtttctcaaaattatgcttaaattttttcaacttgggtagtaatttttgatatcctaattaactactacaaagtatcaatccatatccactattactagatatttacctaaattaatcatgtccacaaaatcttttgatctgaatttttagtcaaactaacaatattatttggtaataaagaatatggtagactatagtacccattaaacccatgattaagaattaatgaggtaagacaaaatctcgtgaacgaagatcctttgcgtgaagatataacatgaccaaatttaagggatctgcttgtacaatagaaactacaagagatcgattacgtaaacaaaaaaacagtgttgacattctcacatctaacctctttatcactcctagaggttagatctctcattctttaactatgtctctctcttattgttgcactctcttgtagttcttgttagagagaaacacaagaaacgattttgtcttttaattgtctacattgttaataacttttgatctcacacaacaacacaacataacacacacatacacacatatagttatattttctccacccacttgctacactagactcacttagaccttactcctagattgtagcttgatcttacacaagccactctacacttacacattggaactctaacaataacaattaacatcactactctacactaacaacataacactctttaactactctagtttagcaaatctacttagaacttaactaagaccatattcatttctagcctattataaccaaaccacacccaaacatcttcttctatgaactagttgtaaagtatgtgtattattcatcagagtgaagaagtattttatagaaaaagggttttctatacttgatagaatcatatcttaggtaaataatatttacatacgatatatctttagcctaatacgcaacccccccccattatatatatatatatataaacaaaaatcaatcttttgaaaaatacaaaacgacttacatgatgcttaaggctagagataaaccctgtgaagttgctgcaatagaaactggaatgcatctttctacgaataagctctttctaattcttatgccaatatatacaatggaatgtgacacgtttagacacttttaaataattttattccttttgaggcacttatgagggagagggcactttttctattatttgatttctttaaagacatttttacccttaaacttttcttttgaaatttaacacaaattaaatattttctctctccacgatccttacgtaaataaaaaatcaatctctctctctctctctctctctctctctctccctctctctctctctctctctctctctctctctctctctctctctctctccacgtctccacaacttttggagaagtttcttaaacaattcgatctcgattatctcaggaatttggtaaaagttttgtgtccataaggtctcagaggtggtgtccataataaagagtccatttaaatatatccattcagaaaactttttactgattcatattcattctatataccatgtccataataacaggagattcgattaaccgtagtttgtaaataaaccaaaatttcatgtccataaggtcttggaagtggaggtctcttcaaaactgaaagaaaaatcaacaaacaattatttggtgtccataataacgagttcatttaaatatatccattcagaaacctttctactgatctatatccattctatataccatgtcaataataacaggagattcgattaactgtgttttgtaaagaaaccaaagttccatgtccataaggttttgaaggtagaggtctctgcaaaccgaaagaaaaatcaacaaacaatgttttgatgtccataataacgagtccatttaaatatatccattcagaaacatttttactgctctatatccattctgtataccatgtccataataacaggaaattcgattaaccggaatctcgatgctacatagatgaaacgagtttgacacatgagagagagcaaaaatcaaatcaagccgccattgttgaagaagaagaagtttcttagataactgaatctcaaatttatgtcaaaacaaatatttaaattgcaaaataaatcacaatcttaaagaaaccaaggcctcgtattctccaattagtccagagagaagagaaagccatcgcgtagagtggatttggagattaattgcagatttggaattgaagatattctgggaaatgtttttttcttagataaagcgaggaaaaaaaaagaaaaaaagagagaagagatgggaaaaggagagagaagagatgaccgatggaaaaaaatatagttaaagggtaaataagtaaaataatttatctaaagtgccttctccatttaaagtggctaattaggaattaactttcaaaaaagtgtctaatcacgtaatattctctttttaaaatcaatgaaattttacataaccatcaattttttaaccttctcagaactttatttacaaagaaaatcttaaagttctatcgagatagtgcaaataattcaaaacattttaagccaaatatgttctacaaacctgtcacaatccgttttggggtcaaaaggcacagcattaggaatggcacatttttcaggcataccaataagttttgtaaatcgagaatcttttagaatttcctggaaacatttgcaaagagctaaacgaccgtagattgtctctacatatctgtttacatcgtttatggcatagcaacaatccgcatgtggtagtccgttggcttgttgcaagcatgcacttatcacttggccttgggccattacacagtgtctatcaccattcgggtaagtcaccattttagcatttagagttggggatagaacaaccaataaagtgatacaaacaacaaagattgatttgctcatgtttggttgattttgattaggatcttttggtttagtttggttcatttataagaagacatgttcaatgtattaatatgccaagattttttagaaagtgaaagcaaaatttaatgaatgttgctttttgtttaagaaaatatccccaaatatgctaatgcaattaattattaagagatatgggaaaatctaactaaatattctttaccaataatgagtttatattcattgccaattttcttaaatttgtaaagaaatacattgtcaaaatagtcatgggtgttcggttatccattcggttttggtttgtatccattcggttattggtttttttggttctaaagtttagtatccatttggttattttgaaagttcggtttcggttcttttggttttaaaaatttatccattcagtattttgctttaaatatttttggatatttcaattatttttggatatttttggtcatttttggatatttttcgattactttcgagtatttttacttttacatatattttcaattatttttaattatttagtctaaaaataactaatatttttgaaaatatatttatatttcggttatctgaaatatttccgtttggtaccgattcggttttggttatttcgatttttttgcttcggtttcgattcggtacattcaattcggtttgtttgcccggacctagtcaaaagatagctaagagattttgacccaaaaaaataaaagatagctaaagactaagagatatggcaaaaaatttgtgagcaaatataaattggagattactttactagaaccaattataaaaaaggtgtagcacaaacttttcatataagaagtagggccgggcaaaatatttgttcgatcagtttcgattcgatattcaatttaattcgattcaaaaaatccgaatatccgtaagatttaaaaccaaaacaaatagaaaaataaagtattcataaaaatcgaagcaaataataaatattatttttttaaaaatcgaatatccgcttctattacgacattcgcactttacgggactttctataacttgcatccgcattgatctaagttgatagaccatattgtaaaacattctttatacgattctcaatgtgcgtttttttttatagaaattcggattgcatctctcagattttggtctttccttaaccaatttcgaaccactgtcaactgctttcttcagatggattgacgtctaaacggtaaaccgttctttatttccactttgattgggccactgaacgacttagcttatgagagatttcccatcttaaatcgcaacacttaagatcaaccgtcttagatatgtaaagcaatcaatcactagtgcaatgttgatcctcacatttaaaaagatggttccgcaagaacaggcgaataaaagatctaagttccaccaaaaaaccataagaaaacaaagtcatgagatagttaagtcaataggggttgatttctagtgaacgggtaaccatttcagatatggttggttacaagggcttatgaatatatcatttcgctcccacgatgaaaatttatgtaagaagacttctcgcaaggtgctcccgagctgttgccaatgcttgagttaatgtctacaatacaaaatccaaaaaatggtcaaccgcatgattgatataaagattatcgctttgctcgaaggtagtttagtagtagtcatattgcgtctcacctgttcagagagtgaaccacttgcttctgcgctttgcattgctactttccccgcaataacattcgcgtctgtttcaagtaccatcctgaacaagtttcataagacaatacaaagatgagtatcacagtgatagggattcaaaacagttaaacttctttatctagttactaaagaattacactttcgagagacttcattagcgagaaaagtctctacactctcaaccaatgcccaaaccaaaaccctcaacaaatccaaaatgcccctaatgaattctctaagctgtcttttaagtcttcagctatcaactaacggacgtaaggtctgttcctgaattggcaaagctacatatcccataacccccccttaggctagttgcaaatattctgcactagacttaacaagaacgcttcaacacacggccagaagttgttcatcaatgatcaaacaataagttctcatagtatctaagtaccagatctcactatgtccgtatttagctcaactccatcagcatattagaaagctaattgttaagatatgaagagcaagctaaactcagcaatcttttaactctacacacccatgtttaagagttgcaatagatttccgaactcagtaatcttttaactcttgtgcaaggctaaaatgatagatttccgaatttaacatagtaaaaaaatcgtagaatagtatttgaaagcatatgtagcatacccttgatcaaccatctcatcaaggcacaaaaagatgagatccaagttttcaagggcttccatcttttcaacattgttcctgtaaggagaaaggatgttcaactttaatttcgtatatcactgatcaagaaaggcacatagtcatttgttaaggtgggttaaatacctcagaagtaacgcaacagcatcaaaaaagccttgaagaacagatgataagacgagctcgttttcattttcacctccagtaacaaagaaatgcaggtcctgggcaaacttatagacaacaatattactctccaacagtgtgatctcagctgcaaaaagtaaacataaaaaaaaaaaattatacacacctacaagttgtttgaaacaggaaatatgcacatatgtaatcaggaaacccaatagacagccaacaagtaaaatataatctgaagctttcatactcctatgatacaacaaacagagaactacatatataaatactgtacatgtgttgaagtttcaatttgatcttaccttctgtgcgagcattggtcttggaggttttcgagaagacatatttttcaaaagctaacttggaagcattagttgcccaatcatcggagtaatacttgacagccacacgctttccttcagagtctagaagaagaatgttctttaccaaaggacaagaatcctattcattgtagaccagatagtcagcatgtaagtactaagagagagaagcacaagcagaagcgagaatccttaaaatggatcatgtaagtttgaacttctacaacagcaaagtagataaagatcaccagtccaactatcaccaatcatatggacaattacacagggtccaaagcctaagtttcttgagtatttgttgccaccaatcaaactaaaaagctaaatcagctactcaatactcatcatctatggcttgaccagataggccaatcaaacctatggtgctaaatgctaatacataaatttgctaaaaacacttaggacaaaagataatacaagctttagttaaattcaacctggccaacaaaaggacatacaaaaacatgacacaccagacaaatggcagctccaacagatagaatccaaattattttgcatcaacaaacaaatgatgatattgcacaaaagcagattcataagcaattggaattttctcagcagcaaaagaacgtttacaaaaatctaccagaacttatgttacttagacagtaacaaagcctaattatgcttccagattgaaagatgcaaacaatcttagaacaataggggcatgaacctaagattcgtcacaccttctgaaaacatacttacccactcaacaaacaaaacaagaaaaaatcaatcttaacatagtgatcttatacacaaacagaggagattatattacaccacaatgcaaagaatctcataagtgtaacaaaccataaagcatcacaagactatttacagacaacaatataatgattcttaacagtatacaatgagcttagagatgtacttacattagtccctgccattgtttttgattcaaaatatacctgaaaatagtgataaattaagtgttataaccacacactacaaacacacagaacaaaaactgagaaatctatctaatacatttagtctaagaaacaaaactagcactgaatacaccaagatctaagaagagagtactagatcatcagggaagatcttaaaattaaggtttctacataacctctaagtcaaatttcgattctcaatctgaaaaacttaacgatcagatctcttactgaagctatgagaatgatagatcataatggcaaattgaaaacaattaaaaacttagaaatctacagagccaaacaaaaatctcatcaaaactgtgaacgataacagaaaatattttattcagatctctagagaatgtcaatggatctttcatcgatctgacgaaattagaacgtaaatcatacgaatctcgatagggatgaagaagcaatcaaacggagaagacaaactcgagaaacttttacctttgagatggctttttgagctgaagaagatgagagcttgcgacgatggtatggaactaactgttaaagaagacgcgaaggtctgattatattttagaatgagtagtcgggattcgggaatattgcaaattaaaccccaacatttgaaattatacaaacaaacccaacatttgaaaatcaggaaactcaaacttaattgtatagtctcccgtttacgcaaaattaaattaataataatataacaaaatatggtaaatttctcagataaattcatcaaggagtattttgtaattaatgtgtagttggaaaaacaatataatactaaaatttcaaaaaataaagataattatgtgaaaagttgtctctaacaaaaaaatggaaaaacttgtatatttatatgagaaggattgtaaatattttcgaagataaattataaattacttcttcacctcaaaatttacttgttgaggtcgtaaagtccggatacattgagtttgtagaaattctacttcgttcgtgtctcgacctgctattggaagttgatgataacaatcaaaatctatttcatattactgcttcaaatcgccatgcaaacattttcaacaaaaattatgatccccgagctaggtaggatttgatagttttgtataaaggcccactccaaaataatattttccttgtaaatgtttaccatcttcggatcggttacaacaacacttcagatgcaaagagaactactatggtccgaggtacaaaaagcacaatttatatgaaaaagattgtataaattttagttcatatatttaattttttatatattttttaagtttcagattttaataataatttaggaaagaataattttccaaatatagaataaatctttatataaagatacctaaaaatgttgaaatatgataacttgtctctaacaaaaaatcgaaaaattggcatatccttaaaatatgtaataaaattaaaattagatctaagagatgggaggtatacattttatttcacttttgaaatattttttttgttaaatactaattttggaacctttggtagacagttataccataatcatttatagataagaatggaaattatatttgtgccatctatgcactaaatattataatcgccattaacttgagagtcttgaccagagtccttgcaatattaagaaagttcagttcaaataacagacacataatttgttgtggagaatcataaaactaattcattcatacctcaagtgctttatcaaaatcatctagcttattgatccagagtgcttctggctttcagagttgatagtacccagtcttttattcacgtaatctaattatgcctttaatgcatctattttgaaggatctctaatcatcgagataagatcctctgggacgtagtcatagcttcttgatgagttcactgtcttgccatatttttaaaaaccattcttttccaagaccacatcaagatcgggactgatgtttatttctccattgagaactctttggacaattgctaatttggactctaacttattccgctcaaaagttaaaatatccaccatataatcatgtgtattaggagtaagattagttactaaaacaagaccattgccttaataactaaaacaagacccatagtgtctgatttacataccttcctttcaccacaccattttagcctctcttccttaaaatcttgaaggaccaaaaaactgatattaatattaattaagtgataactaattatttatagagaggaaacaaaacaatgaaaaatgggctattcttactctgctcgggagattcatattttgtgtggacattagttttgttcaacaaacgcatgttgttggtcctaatggttgtggatagtctcaaaattccaagacatcctcttcgattttttcatcattattcagaaaaagcttcatctgctcttcagttaacaacaatgttatgtcaattgacatattatcactgtcattcttgtagccttgaaaaagaaacacatgaatcaagaataagtatacagaaattttatgatagtttacgataaataaaaagctttgaatctaccttgataacttcgcgtttctgatattataatctaagattcgtttatgtcttgaagtgcaaatatgacataaatataatttgcacaagaaatattaaattagattagagatatttaatctaattatatacaaaatttcttttttaactcaaaccataaacgaatctaagcatcaatacccataatcagtaactctcaaaatcgtagtaaatccttaccttctaattatgttctaccgccatttcagagaaaaagcacaacaaatcaatcgttaagagataaaaatccttaaattgagaagtcgcgtggaatgagtttttatatctttcagtttttacctaggttctcatatgttttcttcttcttaatttcatatttgcccctgaagtttttttattaaaaaatataatttatttccttaataataccataaccatatgttcttcttagtttgttagggagagatcttctttaatgacattccttagatatctatgaatcgccattataatttatataatattttttgttcaagtataaaatttatagttttaagtgatccccttaaaaaggaatgtaagtgttatatattttagtgtagatttgaaaagatttaaataatttttgtgattttttcttttagtttcctaaattttagaaacaaaattgatttatatttagatttgagaataaatttgttaaaacattaaatgccaatgacattgggttgtaaataaatcccaacttgaggatttattttataaaggtgttgcaaaaatgtatatgtagatatgttcttcttagtttgttagggagagatctccttttatggcattccttatatatctatgaatcgccattaaattttttttatttttttttgttcaactataaaatttatagtttttaagtgaaactagaagaagaaaattaactagggtcgtttaaatttttgttcttaacctactactaaaagatttgtaaactttattagatggagttagttgatcactccattttactttgtatgtggatctgccgcctacaaagatgtttaaagacggaaaaccgaatatcaaaataatgtgatcctattagaatgaaccaaagttctcaattaagagtaactccaattgtttgcttcaaaaaaaaaaaaaaattgaagtttcttcaaaataaatgaaaaaatgatgcaagactttttcaatagtttctttcatttttctacttcaaaaagaacattgtatactatctatattttattattaattggtaataatatcctttactttctaaatttatatattttacacatttattttatagcaagcaaatagttcaacaaattttctctagagtaaacattattttaaatcaaaccacattgcataacatgaataaaaaaaatcaaatttatgatgcaattgttaaattgtaaagatcattttgtaaataaaaaaaattatcttcaaaatttgaagatacttaagtctttcatttttaagatgaaaataaagtaccattggaaaaaatctttttattttcatcttcaagatgaaagaaatgtgaaattgaaagcaccattggcgatggtctaaagcattttagcgaagaacgatttcgacttgtccacgaccacaagaggaatttgttacagatttgccgcacatagtctttaatcgacatggagtttggtggttaaaggcgttttcccactaaaaactgcaaattgcatcaaccgtagtagctttcaaaattaatccgacgacatggacaatagaggagcttttgaactcccactcttaagacctctagtatcaaaactattgggtaggaaatattaaactataaaaatgaataaataatataaaatatataagcctaaaagatgaatttcataaaaaggtaagaaaacgaattctttaacttttctacttaacccccatcggcaattttctctttccctcaccatgaatgatcatcaaacattagaaaacctaaaagaagatgccatagacaaagcccacttatcttcagaccaaagatgtacaaaatagtcagccatttttcattttgttgcacctctgaagaagaagcagaacaatactcttactgcaactaaagcctttccaccttctagccagcgccgaagtaaccaaaagaaaaaaaaaaaaaccaaagagaataaagaaaagaaaagagaatgaaaaactatcttccatctgaaaaccccgaacaaaatctgatcacgagtcgggagctatgtcctcagttgcttcttatatgataggcagcttctgcagcagtgatggcttgaacttcttgcactgtttttataaaagatgtaaagtaaaacgagttaacaatgatgagagaaattaaaagaaaccaaggaagagtgttgttgtgtcctttacccattctctcatctcctccattgtgtgggtgtattcgtcgctatcattctcatcccaaccaagggatttaaggaatgcagcctcttttggatctggacggactgccgattcaaatctactaatcctttctgcaacgttagaaactttctcgacactttccatgatttcatctctttctgcagcttgtggacttgaagggtcactagctacaagctccttagaactgtttgcctgttcctccactgaagacaagatgcaagagctggtttttgatggatcagttgagatgttcgtacatgttttttgcttcaaagcactgtaaaatgcatgcctgctctgagtttgagccaaggaaagtttcttttcagcggcttttccagctaacatgtttacagaagctcccctgagatcccttggaccatttgtgcttctcacagaagcagtaaattgtgtggatggggcagtggtcggctggctagcggcaactcggctgttgggtggtgaacctccagcaactaccccattttccctagcaggtttgagaatcaccagcttcttagtcgtatcaggcttgatctgactaccaggattagactgcatattaccgagcatcacagaggactgctgttgggtatttcttgaagaagcaagaccggtttcaccacttcgaaacattggtttggtcttggatttatcagaagagttatgaacctgagaagtcaaccaacatatactcaatgtagcccaaggtaactgacagaaaataagatcaactacggaaaaaacttactgagccctttggtgctgaaggcacaaccggtatcaactgcctagattgcctaatagctcggtcctcaagtgtttgtgcctttacagaccccaaatacaaaaatctgttagaaaaaacaaaaaaggtagtgtactattagcaatacaaagatacaaaaaatacctggggtggtgtaccagttcttcctggagcctgcaccaatgcttcagccatgttacgacaagctggtccagataaggtagccgaattacccacattagcatgggattcagcaccaccactcttctcaataacattgggaacctctgccagagccgatgtccaaccttccccgataatcaaggctggattagcaactgacaagctctgagcagtaggacttcgaccaggagatgagattcttacaacgtctgggcctccatttctctcttcacctctaagcaaaggaaaatccttattgaaacccattcttttggagctctttacagggctagttccaggaagtataccatgtccgttgaaagtattaatgtttccaccatttttatatcctactgtaaatccttgagccagatggtttccctgtttccttgttgtcattgaatgtgatcgtctcagtggctcctctcccctaccaatcaagaaggttccaaaaggcatagaactatcattgtcccatggatccatgtagctcatcctatccttctccctgctccgatctttatctctgttgctcctattaaagttgaaactactatatgcatgttttgtagacccattactagatcccctcctcgtattggtggaagaagaccggtcgagaaaaggagacccaactgaatcagcatcacttctgctcctagcattcctattcttgctattacgtaaagaatctaaaccaaaacgaaaagaaaacatacttacaacgctattcacaatgctatgaacaagatataacaattacgaactcgagcatacctgaaagagaatttgaactcccaacaccagaaccatgtcctgaacttctcaaccattcaggaactaaagagggttcgcgtttttccattatgaaagctatacttcatcagataaaaagaacaattcaatgacctctatcactctcaagaactcttcttaattcttcctaaacatctaaatcacctactaccacaaagggcagggaagaaaaatccaatctcaaatcaaaaccaaatgaatcgaatcgtctcaatgatgattaaaccctctacacatccatctctcacacagatggctaagacacactctaaaaccaacctagaagatcatcatcatcatctaaatccaccaataagggaactagcctgatgggcactaaaccagaaaccctaaccacctaatcactattcctagaattcaacaaaacaacggcaaaattcgtatcaacgcatcaacagaaaaaaaatctccctcagaagaaagaaaatcgaaacaacgggttcaacgaaagagacgaagaacacagaacccagaagaaaaagaagaagttttatagattcaatcgtttaaagaaaccaatggcttcttccccaaacaagaaaaaagagagaaacttattaaaaaaaccaaacgatggaaggagaaagcgagtggtgggaggaagaaacaattagggtttgtgagaagagaaaatcgaagagaaaaattagggtttttgcgatggtgcgagagagaagagactggtagcgaagaagaagagaaggaggcgaaatgtttttttttttttggtttgtttggagaaaacttgttcaaggaacgaaacgcatgaacaaacagcagcctctttcttctctccgagaaagctctctctttctcaagtttttatatatactattttttttttttttataaacctttttttgttatactaggtttttcctaatttgtgtataagttaaatttttagaacatagacaatgatcaaagttcataactgtatttttttttattataatttcagaattagaaaaattgcaagaaaacttattatttctatagttgtttatgtatttataaaaaaataaataattgtatttacttaactttgtttacccacataaaagactttcgtgctatggaaaagggttaagactatttacgaacgagaagagatttattagtttatacgaacggaaagagattcacctgtattaacgtacgaaaatgaggatttagttgaactcttacaggaaaagagaataaaacagttttaacgaacagaaaagaagtttatatatattttttctgttatattaggttttccttatttgtgtacaagttaaatttttggaacaaagacaatgatcaaagttcataactgtatttttttttctattataaattcagaattagaataattgcaagaaaacttattacttctaaagttgtttctatatatataaaagaaaaaaaaaagaaaaaaataattgtatttatctgactatgtttacctacgtaaaagactttcgtgccacggaaaaggtttaagactatttacgaacgagaagagatttactagtttacatgaacgaaaagagatttacctgtattaacgtacgaaaatgaggatttagttgaattttcgcgggaaaagagagttaacggttttaacgaacagaaaatgagttacttgtaaaaaatacttagcatatgtttaagtgaaatttctagttaactatgagaaactgtttcacgccctttggaatatatatggcaacttgatcaatgtatatgaccaattttagctaagttatcaattttcttacttttttacacatatcatataagttacttgtaaagtacactattttttgatatgatcaattttaaaaagaaaaatattattatttaagtaagatatctaaatattaattttaatatcttttgataaataatttactataattagttaatagacattagtgatcataaatatattaccagattatgtaatacaattattaataagtatttttaccaaatattaattgaattttagcctaaatagttaatcaacattaatatttcattaacatggtaccaaattgcctaattataatgtcaatgtgtctgaattttaaatatattaccaaattatacattaaaatattaatattttgttatagtatttatttgaataaagaaatttagtattttcttcctataaaaggatgactaggagacaaatttttagatttttaaaataaaaggctgactcttccagaactaaatatagatatattatttattaattaaaggttactaaagtgaagtctaagtgatttggtttaagaatttttgtttagaatttacaattttcagtttagttttagataattttgttaattggatattgacattttgtttgtagccagaagttgttgtttttaaaagaaaagctttatttttgctacccaataatgatgagaagagattacataaacaaattaaaatcaatacatgatacgaactaatctagctaaacgatttactcaataacttcacccaattcgtttcgaaatctaagcaatatatccctcaaaaaatcataactaacataaccaacataagtgtttccaattttgagcgaatgagaacaaacttcttccctgacacttaactcttcgtaagatgattaaaataatatatgattattgcttcttcacacacacgatctctaaagcaatttacccattaaatctttatatctatatataaaaataagtttgatacattactatgctctttgatgggcaaaagtaaaaaaaaattgctttgattttgtagacgagttttgggcatgcaatttttatttacatcttttcaacaaaaacaattaaacaaaacaaaattttgcttagacattgtccatgttaaagttcaaaaattgtacgaaaagtaagcggtagaaaattttgctctatttaggtttatcgaagtaatctttctatttgttatatgttgtataatttatagtaatatgtttatttagttacaatcttttcgtaggttaactatattacttctaacttttgtatgtttaacagattttttatttacctctatcaaaaccctgcaaaacacacaatcaaactcgcaatactctactacatcgattaactaatccacgacacttattttcttttgtacttaaaagttaaaaatatattaacacgtcctatagtaaagcggtgtatgcctcgtccacggattctaaagtttacacatgttttaagtttaacaccttaaaaccatctaaactctactttttaaaagggttttatgcaaaaaaatcctcaaactcgtctatttttacaactttattcttcagatccaaaaaatgcaaaatatcatatgaatttcaaaataatacacaatatagatttttcgttactatcaaattttaaaattttgataaataatatattaaatcggaacctcgagatgaagagttcaagtatatctttaaaagttttaaaaacaaatgtatgtaatcgtgaaaacatttacaatatatataaaattgcaaaataggctattttagatttcataagattattttgtattttttaaaacaacaaactcaagtctacataattaatatattcaactcaaaactccaaactgaaagcttaagaagcccaacaattgtaagcccaattaaaaagcccagtaagtgaacgcgtaaacaaaaaaagtaaagactctcatggaacaatcaaaaacgccgaaacaatgcttcgtctccgattattccacgaaacaccgcgtttttgtttacatttcttctctttctctctctctcttctctcatatctctctcttcgccgtcaggttttgcccaaatttctcggtcttcttcactcccgcgagttttttttctcgggaaaattttccaattccaagctccattgaagccaagtaagaggtgcgattctcttcaattttgacttggaacttgtaaatagcgtatggatttgagctggttatggacagaattctagctcgtatgaagaaatcaactggacgaagaggaggagataagaatattactccggtacggcggttagagcgtcgcgatgcggcgaggaatatcaattacgacgcagcttcatgttctagttcgtcagctgaagatctttccgtttcgacttcttcgttgatgactcgctctttggagtttccggagcctactagtttccgaatcggtggtggtgttggagagatggatcggatttatcggtctcttggtgtttctggtcctgatgatttggctatttcttttgatgcttgggaagcttgtaagaaacgttcttcttcagatgttgttaataggtttaagtcttttgatcttgataaggttcgtgatcaggatttgagtgaagaaggtcctagtggtgttgttgttggttctgattcaatgaatcataaggttcagggtcaggatttgagtgaagcaggtcctagtggtggaattgttactgagttgagtgagattgggaatttaatcactcctgtggataggttagtagctgatggtgtggtagagaataggcgtgttatggaaagaacaccaactattgtgaagtcgaaagggtatcttgtaccaaataatgtagtggctgttggtgttggtgttggtggtggtattaaggggctaagaccaccagtacttaagcctcctccggctatgaaacgaccccctattgatcatcggggatcgtcttgggatttcctgacgcatttcgctccaagtgaaacagttaagcggccgagttcctcttcttcttcttccgaggatggatgcgatgaagaggaaggcaaggaagaggaagcggaagcggaagagatgggagctaggtttatccagttgggggatacggctgacgagacgtgctcattcactacaaatgagggtgactcctcaagcacagtatccaatacttcgcctatctatccagatggaggagctatcataacgtcttggcaaaagggtcaacttttgggacgaggatcatttggttctgtgtatgaaggcatttctgggtaagtcttactggttgcttgtgtttgttgaacttgaaatcagatacttagtcgcatgatgttttaaaaaagtagacactcaatgaggaatactacagtagtcggctgacaaatgtggtccaaacgagtcttccattatgcgtttggctaatggatgtttatgttatatgtagagatggggacttctttgctgtcaaggaagtttcacttcttgatcagggaagtcaggcacaagaatgcatacaacaacttgagggggtatggaaatggaagtttcatatacatgggtcaatgatccgtagcatttatcacttctgtcattatctcatggagcagtcaaaagtaggttgctaatccaccttacctttgccatatttttcattttctacaggagattaaactacttagtcagcttcagcatcagaatattgtgagatatcgtggcacagccaaggtgtggtcctgttctctctttctttttcttagttgcagttgcctaactatttcattgtgcaataataactcatttcgctgttttcaggatgggtcaaacttgtacatttttcttgagcttgtaacccaagggtcccttctaaaactctaccaaagataccagcttcgggactctgtagtctccttgtacactagacagattcttgacggtttgaaatatctccacgataaaggttttattcacaggttagactagtaaactctcttggtacagctgtaattcccaagcatctatctaatttcctgcatctcatgggttacttatttttatcattttatgcaacaaagggacatcaaatgtgcaaatatattggtggacgctaatggcgccgtcaaacttgcagattttggattggcaaaggtttttttccataaatagatatttatagctttgctctaaagtaattacttggtccatcgtttagtaccctgatatgtttgtcatttttttttatttaggtttcaaagtttaacgacattaagtcctgcaagggaactccattttggatggctccagaggtatggttttgggaaactttcccagtgatttacattaatagaaatgttctggtctgggctttataacctcaaaaactcctggttatgtttgcttcaaatatttggtgaaattttctttatatcagttaatggtttttgataattgtaagtatgtatgttaatcgtacgtaacagatgtggattcatttcactttcattgtacttgaggctatacttgtatggttatatctaaatagaacataatcatttgatcaggttattaaccgaaaggatagtgatggctatggaagtccagctgatatatggagcctcgggtgcactgtgctggaaatgtgtactggtcagatcccctactctgatctcgaacccgtaagtcttcaagattttcaaacttttgaactgtcttaataatcttaaacgacatttgaagtgtctactttatgggattttatgagttaaaagtcagaatttgtgcaaacgcgcaggttcaagccctgtttaggatcggaaggggtactcttccggaagtacctgatacgttatcactagatgctcggcttttcatacttaagtgtcttaaagtgaacccggaagagcggccaactgcagctgaactgctgaaccatccatttgtgagaagacccttaccatccgtgggttcaggaggctcgggatcagcatctccccttctccgtagatgaggctaattttagtaaatttcctcaataggtgaagtatttagttgcttttttcatgaggatattatcagaatcaacaaaagctatatattcttctaacattgatgtcctaatgtacaaaagcaggcataacccgaagatttatgagagattagatcccagagaaactattgggagacacgagacatgattcttcgacacacacacacgtgcggtcgggttgcgcagcaagagccaaacttacttagtttctgtgtcattcgttggttatttgttgcaagttatgtgttgggcttgattttaaaactgaagagccttatttttctaggaattagaaatgtcgaccttggggtttttgggtgtataggttttgtttagttttttttgttaaattatagtgtatgtatgtctgtatctatatcatgtaatgtataattatagttggttcttatagttcctggcttgttgtaactgtgtacacacatcgatgggtttaagttctatttgtctcatattttaaagaaatctgctgctctaatcatctattaaaaagtatagtcaagatattttctataattcaggtcaaagccactttaattgaagtctatataattcaacttgtttttttttcttttacaatattgcccgttgaaaagttattggaaatgatggatttataaaaaaattcaaaagtgaccaaaaaaaaagataatcgaaagaattttggctttgaccattttcaacggggatctaaatgccaggaaaaaaaatacacaagatacctatacttgggattataccaagtttggagtacgactagatagaatatttgttagattcgctttgatccgttattctactcaatttaattataattttctaatcacctaattaattatttgaactactagttttaacattgaaaagagaaatataaaatattactatttttgataaaattttactatttttggattaaattttatatttttatatttttttaaaataaatatttaacaaatccgatatatgataattaaatggtttagattttaacggatattcaaaaccaccgaatatttggtctctctcaaagcaaatacaaaaaaaaaaaaataagtattctgataaagcaaatcgaatcacaaacaacaccaaaatcccggatatctgctctctgctcagccctaattcggaggctatactgtcaattctggatattgggtgctcacacaggttatacaaaacaagaatagtctccaagaggtttcatagccaagtctaaccctattttgactctttacgttatttctcgtgtctttttagtgtcttttcaggtattttatgcaataagacaatattggagataaggaaacattttgtagcaaaaactaacgaaaaggaagctaaggacgactttggttcaagaatcagcaacgagtgtcgaccgacacactcttggtgtcgatcgacactagtttcggcccagcaaaaaccctagacgctttcgagtttccagaagctcaactttgtcccagaagatttccctatttgcattattagtccctggacgtttttagggtctatatatattgtttttagacctaagtttcatttatcaagtcttttatcaagttctttgcaaaccctattgtaagagacataagctattcatccattgttattcagagtttcattcagatctatatacagtgaagagatcccttctttccccttctctattcattgtgtttatgcttttttatctcaattatgttgtttgtttcattcaatatgtctgagtaatctgcttgttaggaatagggtttctcattagggattcatatggtttagtatattgccccctttgctaagttatctgtagaattcttcatctttaattatacctaatgttatatctagagtaattaactagatcttgaatccagacaatagatatgtccgccataggtatttgtagttgaatctattatttgatcagtttggtctataggtgtgtaataagaatcggcctatttactaagatgaacaattgaactcgttaagaatgcatatttaggttgatagtctctcggcttctccggtcactattagctatagatatagggagtttcgcggcacgcccaccggttattccataattagagtttgagtttaagaatggttcgataacaacctagctttcattagatctactaaccaatagcttcctgagaataccctgttcctagctcttttcctaatcgtttacaacacaatcaatctgctgttttcttattttgttttcttaatatttcacacataccctgctagcttaatctcgatatttaactcactgtttgaacaaaagaactccttgaattcgatcctaaaatactgcaattgatctcttatttgagagagtagttctaggtaatttgaaccatatcaaatttggcgccgttgccgaagttcttgggaatcatcattgagtttagtttagagattttgtctagtttttacttctattttgttactcacgcgtttcttgttttcttcttttctgtgtttcaggtgtatgcctaggcaaacaaggagcacaaaacagaaggagcttatcaacttgtctgttctggacttgggaaaacttgaatgcaccaaacgaaaaactcagaaattagcaatggctgacagagtcatccgagctgatgcagaaggaattttgagagataaggatgggcaagcctacaatgaggctggtcagagattggatgatcatggaatcatcatacctgaggacgctaatgaggatcaggcgcgcctcaatgcacaattagctgctagagacgcagcagggctcggtgtcgagcgacaccaactgggtgtcgatcgacaccatcatgagcagcgcgcggaagtgatcggtgtcgaacgacataacagaggtgtcgatcaacaccaacaccagattcctgcagctattcctccagctgcggaaccacgtcgtacttttggggatttcaacaggccagacctgttctattctaatcgatcagcgattgtacccccaccattccagagaaacgactattagctgaagcctggttactttgctttagttggtcagcatcctttccatgacttatctcatgagcagccaatggatcatatcgagcgatttgaggatcttgttttgagcataaaggctaatggagtctcagagaactacttactgtgcaagcttttcccttattcacttgctggggaagcagcttcttggctgaagcaacttaaagcaggttccctcaagatttggagaagcatcaagatagccttcttgaccaatttctacgatgatgctaagtctgaggagttgcgaaacaagctgtctaccttcacacaaggtccagctgaagctttcaaggccgcttgggttcgtttcaaggagtaccaacgagattgtccacatcatagtttcagtgaggtacaacttctaggtaccttcttcagaggagttgattggagataccagatggctctagatgcagcgagcaatggtaacttcaatacacgttacccagctgatgctacagccctgatagagaaccttgcttgcagcaacagtaccaagaatgctgattttgagaggaagaagattgctggagctatttcaggaaatcagatagcagaggtgaatgctaagctggattcggttcataacttgctcacaggaaagaagcatgtccactttgcagctgaggaagagattattgagcctgagcctgagtcagaggaaggagtcttctacatagatggtcatgaatacaggaagtttgggcagccacaaggcaacttcagtggcaacaggtttacatggaaccagggttcctccaactacactccaaagcctcctttccagaagacttttcctcaaaacaactttcaaaggacctatggaaattcaacttactaagcccccccccctccaccctcatcagagacaagaatggaatcgatgcttgagcagattctggagagccaaacaaagcttgttgtggagtttaatggcaagtttgatgctgtctacatagatcttaatgggaagatcgacaatctaagctctcacttgaagaagctagatgtacaggtagctcaaactacacaatctatcaagagacaagagggttttcttcctggtaatcctgatgctaacccaaggaagagctgtaatgccatcttgatcagagaaggagatgatgtgtgggaggaattggacactgaagacgagttggagctcgcagttgcagagatggtgtcgaccgacaccctcatgtatcgatcgacaccatatgggatgctcttttcagagatgacacaatacgacggtgtcgatcgatatccctctagtatcgatcgacactggatccggactgcaccttgtgaggtgcaagtacctatgcagctcgagccggtttacactcctcatgtcccctatccgaggaggcgtcgttctaagcaggagattcatgttgctaagtgcacaaccataatggagaagatcctccatattcttcctacggatgcttcagagacatcttccgcatcactcaacaggtatgtcaagcaacttgttgacaatggaattagttcagatgaagctaagctgcttaccagagacatctgtgcaatcatgctgcctaaggccaagaaggagaaggcacagagagtagatatagctgagtacatccgcaccattactcctggtctgaccactgagaaacttccggatccaggtagctttgtccttgattgctctatctccacaagcagattcagccgctctttgtgtgatttgggatcaagcatcaacctcatgtccaagtctgttgttgagagactaggcatgactcagtacagacctactcgcatcactcttctcttcgcggatcgttccaagcgaatctctgaaggaatccttgaagatgttcctgttaaggttggtaactccataatccctgctgatttcgtggtcctggactatgagaaggaacccaagaatccccttatccttggaagagcattcctagctacagctgctgctaggtttgatgtgaagagagggagaatctttctcaaggtttgtgattcagagatggagtttggcatggatagtttagagcttactaagcctatcagttgcattgcctccagcaccgacacacctccccagactgatcagaatcccaccacagagccacacacaacgctccatcccgttcagctcgccaatgagagttgcagggcaacagtgtcgatcgacactactacctctgtcgatcgacacccacgggtttcacagacagaggattctgcacattctcttcagcccacaccacttgaggacctatgtgacaagttttcttctatctcctctcctagtttatctttgattatttccttggattattcgaagactgcttcacaagataacaagcctagagtccctcgaaagcttgtttctcctgttgtttttgcagatgacgagaagagtgtcgatcgacacaccactgagtgtcgatcgacaccagtagctgctccaaccagatccgtttacacaccgccttggaaggcaaggatgcagcaacaatccaccccaccactccacccacatcctaaactccgccaagtcaagctactaactccaaacaagcgcttagtgggaggcaacccattggttttatttttcttttccctttcttttattttcttttatttttaatttatttttcccgctttctctggatttgaatgccactggggactgtgtcgtttaagtctaggagaggttcttactaatgatgcttttatttttgtttcttatcatttttcgttttgcagttcatttggttatttattttatttcccaaaaaaaaaaaaaaaaaaaaaaaaaaaaaaaacgttttctttagtctagttaggaatcatgatgtttatttctcttgtttattgcctgattgatgagtgctgcaggttcgagtcaatccgactattggaaaatctagatgataaaccaacagacttgaggatatcctagtttccaactcaaccactaaggctggagctaatctcactgctcttccttttacctcttaaaacggttagtattcatagatcttgactccttgttcgtaccagatattgagaccaatgtgaaaaaaaaaggaatatgttcctctccccttataaaaagaaaataaataaataacgagagattgagacgactttcggatagtgtataggggtaggaatgtttcctatgaccccattattatacattatttggaatgatcaattacaaaggttggaaaatgtcgagggtgtcgatccagtatgcgagttcccctttgtttactctctaaaaagaataagtctaggggagagaaagaacaccgaaaatatatatatatatatatatatatatatatatatatatatatatatatataaagaatggtcaatttatcatggtatagtacaagaatgagtgtagaaggatcttgaatgttagcttgtttgatgagaccgagcgatgaaagcctggttttggcccagcaaaaaccctagacgctttcgagtttccagaaactcaagtttgccccagaagatttctctatttgcattattggtctctggacgtttttagggtctatatatattgtttttagacctaagtttcatttatcaagtcttttatcaagttctttgcaaaccctattgtaagagacataagctattcatccattgttattcagagtttcattcagatctatatacagtgaagagagcccttctttccccttctctattcactgtttttatgctttctatctcaattatgttgtttgtttcattcaatatgtctgagtaatctgcttgttaggaatagggtttctcattagggattcatatggtttagtagattgccccctttgctaggttatctgtagaattcttcatctttaattatacctaatgctagatatagagtaattaactagatcttgaatccagacaatagatatgtccgccataggtatctgtagttggatctattatttgatgagtctagtctatatgtgtgtaataagaatcgacctatttactaagatgaacaattactttaagaatgcatatttaggttgatagtctctcggcttctccggtcactattagttatagatatagggagtttcgcggcaagcccaccggttattccataattagagtttgagtttaagaatggttcgataacaacctagctttcattagatctactaaccaatagcttcctgagaataccctgttcctagctcttttcctaatcgtttacaacacaatcaatctgctgttttcttattttgttttgttactatttcactcatactctactagcttaatctcgatatttaattcactgtttgaacaaaagaactccgtgaattcgatcctaaaatactgcaattgatctcttatttgagagagtagttctagataatttgaaccatataattgtctttggagcttcccagaaatctaaatgtaaaaggttaaccagatgttaaggataacagtttggtttagttgataacaatatatactaaatgttatatttttgaataaggtgaataactatagattaaagcggtttcaaattaaatatgaaatagtaagttcttgattgttatgtttaaatgattatagtaagtttagtatcaccactcaggcactcacctctcttctctatcaatgcaaggtttaacatgtacctagagacaaaatcaaatggtaagtagtttaccttggtacaaccttaggagtgtcttctttacatgttggacaccaaaacattagtttcttacctttcttgattgacaatatcattttcaattgtgggtacattatgttgtcttgttccacttagacaacacaagatacctaccataatctatatcaatttttaagatggtacacataatgttgaatttagctacacatattcaacaaacatgggtttaggcatttataaaatgaatataaaaacaccaaccatactctgtcaattttaaagatggtatacataatgttgaatttacctacacatattcaataaacatgggtttaggcatttataaaactaatctaaaaattccgcaaagagatggaaattcgacttataatagttcttttaataataggatctgttaatgatagttataagactataaaagtataagttttatgtgaaatcaaatacaatcttacatatatatcaaccacaatcattttcattgtttcctagtgtattgagaccacaaagacaaaattttcacttggaatttccagcttcttttgaaaggtttgatgtgagcaagagcggtgatgccaagatttggagccattttatttgaaggagtagcaagagcaaatatttcgtggggaaaaggttagtgtgtgtattctatccttctgagattaaatgtgagtggatcttcaatagcaacaattgccacatatttatattaatccaattcgtgggacaaaatttagggtttagctataaatcatcgagaatgatagaatcaaatattatttagtttaggtatatgcttgatttacttggttgggattattgaaattttgactttttgggcaagataataactgataaatgatataaatagatttaagtttaaattttctataaaataatcaatggaattgaatatatgcaatcttcgtaagtgatggtaaaggtttggtgaaagttgaatttgattctaatttgaatttagattttcgaatgattaaggaatagcttagacgattttgattcaaatttattgcttgctttatttgtgcaggctgtagatgtttttttgttagtattttaattaaaacatagagtcgaatattagaaactaagttttattataatcatcgcaatttaggggattgggagattttagaagttatgattttattcttgattgccttttaacaacgtttgttatggaaatatattgaagatgatttcaaatcttatttattgctatttatttgcgtgcaggctaccaaaaaacgtacgaaggctatgttagttatccatatattcacgaagtccatttagcatatagcgtaaaaccatttaaaatttcacccgaatatagaccagagtatgctccaagatccgcgtttttatgttatgtaaaatggccaatgtacccatggacgaatctttcatttcttctttgactatataaaaaactacccttcacaatgttgtaaagtttccaatgatttccaattcatagtatagattcttaaaataaacatttaaatatgacaatacataattttactgcaaaaaaaaaaaaaacttcaaacgattacaaatatttttttccaaatacttttcaagttttttattaagaaatgaatacaattgttttgtttttaactcttctaattcttgtttcttcatgtaagtttaaatttatttaattaggatatatgtaagatatatataatactcatggaatactaattgaataatttaaaatatggttaaaattttataggtacatcaatagttatgaaaagctcaaactcaaaagagagaacataccctgttactccagcattgaatcctctaactggtcaacactctctccgtcaacgccaactgattttttgtgatgagtgtgcaaatgcttgttttagaaggaagaagcctgtgcgttcttgtcaacgatttatatgccgttgcgcgattagagatgttggatattaagacattctaattttgttgtaagatttataaataattttaaaatataaattaattactagttaatgttcttccttgtatttcttttacagtattgaacatgtacaaaagtatgaaaagctaactagtattaccctaatctaataggaacatgtaattggaaactcaagttttcccgccaaatttttgccgtcaaaaaaatattttccgccaaacatttttcccgccaaattttttttttcgtaacaaattttttatcaaccaaaaaaatagttttaaaaatccttgtaaattttttttggcggaaaatagatttacaagggattttaaaagggttttaaaagatttataatgaattttaaaagggttttaaaacaattttaaaactcttttaaaacaattttaaaactcttttaaaacaattttaaacccctgtcaaaacaattttaaaccctttaaaaatctttaaaaaacctttgtaaatctattaaagtcttttaaaatcccttgtaaatcttttaaaactcttttaaaatcctttgtaaatcttttaaaacacttttaaaatcccttgtaaatattttaaaaccctttaaaaattccttgtaaatcttttaaagcccttttaaaatctcttttaaatctatttcccgccaaaaataattttggcgggaatttttggggggaattttttcgaaatttttttggcgtgaaaattttgtcgaaaaatttattttggaatattttaggtaaagaatattaatattttattttgttaacctaaaacaattttcaaataggggtaaaatggtcaattaaaatttaaagagggtagaaataaaaatggctaaaaaaaggtagagttgaaaaggggcatcgtgaaaagagcattagaaagaatttttaataaaattacacatattgtaaataaagttttttgtaaaaaattagttctgaacctataattaatattaaaagaaaatacaatttattttcattgataacttataaaaaacataatatatatacagtaaaacctctataaattattactcgataaattaataacctctataaattaataaattctttcggtcgcgagttggtaccagtctaaaaagtgacacaaatcgataaattaatcaaataataattttttgaaaatcctatataaacatatggtctcattaatatcataaattaataattatataaaaatatcaactatatatatatatgttataattatatataataactttaatgaaatataattttagtattgtttctttttgcttaaactcactttagttatttttaatttgattttagtaatttttactatatcaaaaactgttcgtgttgttttttaaacatgataattgattttatttgtaattagttctagaaaaatatttcaaataatgaatggaagcttatattttcataaaaaagtttttaaaaaacttatcaaattagaaaaatctctatataaattaataaatattaatttatcgataaattaatacttccataaattaatagaattttgcggtcccaacattatttatttattgaggttttactatatatatatccctatatattataaagaattttgatagatttaaaactttatttacaacccctgttagacgacaaagataggcttcacaaataggtagcaaatgaaaggttaaattggcatgtagcatatggaccgaaaatatgcgaataagtactaataaaaactgaggaatatcgaatattttcaaataagaaaccacaatgtcactttaaaaaatagtattttagctaatggcttttaattttgcgactaatttgcaatatctctatttttttaataaacaattaaccatttatatttttaaaatgggaacgatagaaaatgatacttatggtgattggttcaagctttgaaggctttaacttttttcttgtaaagtctttaaagattgagtttttaccaatcacacttttttattttaaataatttaaaagcttttaaagtctttcttataaatctgaactgtaacatataacaataaaattcacacaaagaactttataataaggtttttatatataatatacatcaaatgtaatatttgatattttttaatatctacatatacatttttgcagccactttgtgaaataaattctcaagttgagaattatttacagtggctgccactggcatttaataattatttttgataattagaaagtaaatcttcgaattaaatatttgacatttaactatttttccaaaatctctctacattaactacacgattagttactaaaataaaacttccaaaatatttaacatcatttaaaaattacaaaattatcatttttgatattgtttttttgtatgactataacaattcgattatacgcatcaacctacatagatatttgatagcagttaattaatacaaaattacaaaatatttagataatgattcataaacatatcataaataagatcaacattaataaaataaatagttttttttacggggcggattggcgagacgggtttggtagaacgttacttaataacaattgtaaactataaaataaaaatattttataaatagatacaatttgcaaacttttatatatactaacttaaaaaaaaaattgtccacgcggtataccgcggataaaaaactagtttttatatacataagtggattacttaagaaaaaaatgattaaaaggtactctttactctttactcctttagaagttacaacactatactggattacttaaaaacaaaaactttcatgaaaaagagaaaataataaaattgttgactggaaaataaaaatacaattaatataaagaaatctctctaacaactttaccaatcatcgtcgctcacatgaagaagtcgtcggataagtcaccggtgcggcaacatgacacggcgacgcaaatcaactctgacgcagtgtcttcttctacttccttcactgattccgactctacttgttcctttttgactccctccatggagttcccggatcgaatcagtttccggagaatcgattttagtgaagcagctcctactggtgtcgttcttccttctacttccagtgagttaactcgttccaattccagtgagaataagattcccaatgaagatatttccgtttcaacttcttctcgctatttggtgtttgataaaattctagctcttatgaagaaatcaccaggacgaagaggagataagactagtccggcgcggcggttagaccgtagtgatgcggtgaggaggaatatcgattatgacgcaggtgaagattcttcttcgttgttgataactcgttctttggatttcccgaatcgtactagttttcgagtcgatggagttgatgatggagaaatagatcggatttatcagtatattggtgtttctggtcctgaagattttgctatttcttctgatgcttggaaagctcgtatggagcatgagcgttcttcttcagatgttgttaataagttaaagtctcttgatcttgatagtcgtgaagcaggtcctagtggtggtgttgttgcttctagttcaatgaatcataagtttcagggtcatgatttgagtgaagcaggttctattggtgttgttgttgcttctaattttacgctttctgagtcgaataagattgagaacttaaatagtttgagggataaggaaattgttgatggtgatatggtagagaataggtgcggtattgagcgaaaaccgactattttggtgaagtcgagagggtatcttgttcacaatgatgatgtgggtgttggtggtggaattaagggtgtaagaccaccagtactaaacgttcctcgtgcggataaggaagttgttgatggtggtacggtggagagcaagagtggtattgaatggaaaccaactattttggtgaagtcaaaagggtatcttgtttccaatgatggtggaataaagggggtaacatcaccggtactaaatcttcgcccgacagataaggaagttgttgatagtggtacggtagagaatagacgtggtattaagggcgtaagaccatcggtacttaagcctcctccggtgatgaaactacctccagttgatcttccgggatcatcttgggatatccttactcattttgctcctgatagtgaaatagttaggcggccgagttcctcttcttcttccgaaaatggttgtgatgaagaagaagccgaggatgacaaagtggaaaaggaagagacgggagatatgtttatccagttggaggatacgactgatgaggcatgctcattcactacaaacgagggtgactcctcaagtacagtatccaatacctcaccgatttgtgtctctgggggatctatcaatacttcttggcaaaagggtcaacttctgcgacaaggatcgtttggctctgtgtatgaagccatttcagagtaagtcttactggttgcttatgtttgttgaacttaaatcaattacttagttttacgttatgcctttgctgatggatggttttgctgaatgtagagatggggacttctttgctgtcaaggaagtttcacttcttgatcagggaagtcaggcacaagaatgcatacaacaacttgagggggtatggaagtttcatatatgatcggcagtatatatctcattgatcagacaaaagtaggttgctaatccaccttaccttagccacatgttttcattttctacaggaaattgcactacttagtcagcttgagcatcagaatattctgcgatatcgtggcacagacaaggtatggccctggtgtccctttcttgttctcagttgcagttgcctaagcattttgttctgcaattaataacttatttcgttgtttgcaggacgggtcaaatttgtatatttttcttgagcttgtaacacaaggatcccttctagaactctaccgaagataccagattcgggactcgctaatctccttgtacacaaaacaaatccttgacggtttgaaatatcttcaccataaaggtttcattcacaggttagactagtaaactctcttgtcacagctgtaattcccaagcctctgatttcctgcacatcctaggttacttacttttctcatctgatgcgacaaagggacattaaatgtgcaactatattggtggacgccaatggcaccgtcaaacttgcagattttggattggcaaaggttcttttccaataatagatgtttatagcttttactctaacttaattacttggtccatcgtttatcccccttactcaatatatatgtcatttttttcatttaggtgtcaaagttaaacgacattaagtcccgcaaggaaactctattttggatggctccagaggtatacttcgggatccttcctcctgttttgattgttgtgaatacaatgacaaacatatcatatatcaatagcaatgatggatgttatactgttgcttatatatgttgttgcaaccgttgtgatatgggcttgatagcctcaaaaacccccgattatgtttccttcatagtttgattaaatttcctttatttctgtttataactgtaagtatgtttgtgtaattatacgtaacagatatatttgaattccttccactttcattgtagtttaggctatacttgatcaggttatatgttacagtttttcctaaatggaacataataatttgatcaggttattaaccggaaggataatgatggttacagaagtccagctgatatatggagcctcgggtgcactgtgctggaaatgtgtactggtcagatcccatactctgatctagaacccgtaagtcttcaggattttcaaacttttgaactgtcttataatcttaaacgacattgaagggtctacttaatgggattttatgagttaaaggtcagaatttgtgcaaacgcgcaggttgaagccctgtttaggatcagaaggggtacgcttccggaagtacctgatactttatcactagacgctcggcatttcatacttaagtgtctcaaattgaacccggaagagcgtccaactgcaactgagctactgaaccatccatttgtgagaaggcccttaccatcctcaggctcaggatcaacatctccgctaatccgtagatgaatctaattttattagattgcctccataggtgaagcctctagtttcgttttattgagaatatattaggatcaaacgctatattctaacattgatatcttaatgtatgagagcaggggtaaccagaaggtttatgagatattagaccccatagaaactttaggggagacacgagatatgattctttgatacatatgctgttttggttgcgcagcaagagctaaactttctcgagacatatcttcaggtagtttctgtctcattcattggttggttgttgtaagttgtgtcacttgtgtgtgttgagcttatatttaaaactgaagagccttggttaaattagagttttgggtgcataggtttgtttagttttgttaaattatagtatcatgtaatgtataagaagaaccttagttgatttagagtttcgggtgtataggcttgtttggttttgataaattatatagtgtatgcatgtaacccatatcatgtaatgtgtaattatagttggctcttatatagttcctgcttgttgcaactgtttacacatctcatgtctcgatggatttaatctccaatttttcttatatatatatctgaattatacatgcatacatacactataatttaacaaaactaaacttttcttttgggtgcaaaaacataacctatattcatctcttaattattttacgctgaagaaatctgctgtttcaattaaaaaagtatggtcaaaccaacattttctttgaaattttggtgaaagccactctcattgaagtgtatatatgattcaacttgtttcttacaatatttgccccgttgaaaacttttttgccatcgatgagtttctttaagggcaaagttcctttaagaaatgcttttagatttctttgtatacctatgaatttttaatcaagtgatgaagacacggagaaaaatcctaaattgatgctaaatattttatctgtggacttaaccaagtctcccacaaaaataatacaagaatctgcaacaatttttaaaattcagtattcaattattattcagatactattactagattgaaaattcaactcttgtcataagtcgtcgtcaacttcttttgtttgcttcttcctttttctctaacaggtgcagtgttactgccagttgtttggatatttccacttgtgtatttattctctctatctctttgacgtcgtctacagactacaatggacgtaactgctatcttcgccggtgatattttggtgcaatccagagagtatcttatccctaatgatgttgtggatgttgatggtggtattaaagcggtaagaccaccaataattcagccccctccgggaagaaaactacctcttattgactttccaggatcatcgtgggatttccttacgtattttgctccaagtaaaacagttaagcggcagagttcctcctcttctgataatacctctgataaagaggaagttgaaacggaagagacgcgaggtatgtttgtccagttgggggatacggctcatgaggcatgcccattcgctacaaacgaggctgactcctccagtacagtatccattatttcgccgagttatgcctctagaggttctatcgtcccttcttggctgaagaggaaatttctgggacgagtatcattaggttttgtgtatgaaggcagttcagggtaagtgctaatatctgtagcattatctcattgctatatcttttattttctatgggagattgcactacttagtcagcttcagcatcataatatcatgtcttcttctagttcctccgttggttccgagtcgacttgttccttgatgacgccttctctggagttcccggatcgcatcagtttccggaaaaaggatttcagtgaaaaaggtcctagtcgacacgtttgggaaaagcgtaaattgacgcgtgccaagttgattgaaaatttttgcaatccggaggacattgaaccagtcacatcttggctgaagggtcaacttctaggagaagaatcatttgcctctgtgtatgaagccatttcagagtaagtcttactggttgcttatgtttgttgaacttaaaattagatacttagtttataggaaaataaactttaaattgggaaatgtgatgcagtgcgagagtttttctttgtgtgttttgttgatgctttttgatggatgtttatgttatcctttagatcaaattatacactctttagttgggaagaaaagaacaacatgcctatttacaataagatgtttaatgagttgaaaaatacggtgcaaagcgacttttatggttgcattaccattgtggcattatctcattgtcttctctttcattttttatgggagattgcattacttagtcagcttcagcgtcattatatcatgtctttttctagttcctctgttggttccgagtcgacttgttccttgatgacgccttctatggagttcccggatcgcatcagtttccgaaaaagggatttcagcgaagaaggtcctagtggacgtgttaaggaaaagcgtaaattgatgcgtaacaagttgattgagaattttcgtaagcctgaggatatcacgtcttggctgaagggtcaacttctaggacgaggatcatatgcctctgtgtatgaagccatttcagagtaagtcttactggttgcttacgtttgttgaccttaaagtaagatacttggttgagccaacatatgcttttttggctggtggtttatgttaaatgtagagatggggacttctttgctgtcaaggaagtttcacttcttgataagggaattcaggcacaagaatgcattcaacaacttgagggggtatgaaagtcatatacatcagttatccgtagcatttatcacttctttcattgtagcattattgcattgatcggtcaaaagtaggttgctaatcgaccttacatttgccacatttttcattttttatttttctacaggagattgcactacttagtcagcttcagcatcagaatattgtgcgatatcgtggcacagccaaggtgtagtcttgttctctctttcttgttctcagttgcattttgttgtgcaattggtaactcctttcactgtttacaggacgtgtcaaaattgtacatctttcttgagcttgtaacccaaggatccgttcaaaaactctacgaaagataccaacttagctacacagtagtctccttgtatacaagacaaattcttgctgggttgaattatctccacgataaaggctttgttcacaggtttgactagtaaactctcttgtcatagtatttcttaaaaatctgatttctttcatgtgttacttacttttctcatctgatgcgacaaagggacattaaatgtgcaaatatgttggtggacgctaatggcaccgtcaaacttgcagattttggattggcagaggttcttttccattaatagatgtttgtagttttattactaattaataatatggtacatcgcttatcccactgacatggtacctgtgtcattttgttatataggcgtcaaagttcaacgacattatgtcttgcaagggaacattattttggatggctccggaggtaattgtgttgggatccttctcattgttttggattgtgtgaatacaatgatagacaacatatcatacatcaatagcaatgttctcggcattgataaccttaaaaaaacccgattatgtttccttcaaggtatttggttaaatttttgtttatggtgagttggtaactgttagtatgtttatactcgaggctatacttgtatggttatttctaaatagaacataaccatttgatcaggttattaaccgaaaggatagtgatggcaatggaagtccagctgatatatggagccttgggtgcactgtgctggaaatgtgtactggtcagatcccctactccgatctaaaacccgtaagtcttcaagattttcaaacttttgaactgtcttagtaatcttaaacgacatttgaagtgtctactttatgggattttatgagttaaaggtcagaatttgtgaaaacgcgcagattcaagccgcgtttaagattggaaggggtacgcttccagacgtacctgatactttatcactagacgctcggcatttcatacttacgtgtctcaaagtgaacccggaagagcggccaactgcagctgaactgctgcaccatccatttgttataaatctttgattcttacgctgaaacaatcaaactatgcaatagtatggcgaaaaccatttctttgattctggtcaaagccaagttaattgaagtgtgaagtgtctatataattcaacttgtttcccgttgaagagttatcgcaatgatggatttataaaacttattcgaaaggttttcgactccgtacaccgtacagatgtacgtatgaccataatagataatagtacacacatgtagatagttcctttccaaaatctacattgtagtagtacgaggatcacttggaccgtttccaaagatccgtcattttggaaacaaatgtaagaatgaagaaaaaccttctctaacgtcaatcgaaaaatagtaatttaattaccgttatctaataatactaacaatctgaatatatgctttttgcactgtaaacagctacatctttttatcgtaacttttcgctaaaataattatggttatttttttactgtttttttgttcaattacagtcgtttcttttcgcatatgaatagttacatctttttatcgcaattttttattaaaatatttacgattttgtcttttaatagcatattttcgtttaaatatatttcgtgattcttttttgatagtcaaattttttttaactacatttctatcttttcggtttacggttgtaatgaagaaaaattctttctaatgcccttttcatgatgccctttttcaactctacctttttttttaatccatttttatttctatcctctttaaatttttaatgaccattttacccctatttgaaaattgttttaggttaacaaaatgaaatattaatacttttcgcccaaatatttcaagataaatttcccgcaaaaaaatttcaaaaaaatattcccgccaaaaattttcgaaaaataatttttccgccaaatgttttcctgcaaaattttttttttggcgagaaatagatttacaagggattttaaaaaggttttaaaagatttacaaagcattttaaaagggttttaaaagatttataagggattttaaaaaggttttaaaatatttacaagggattttaaaaaggttttaaaagagttacaaaagattttaaaagatttacaatggattttaaagggcattaaaagatttacaatgtttttttaaagatttttaaaaggtttaaaattgttttaaaagggttttaaatatttacaaggtattttaaaaaatttacaagggattttaaaagagttttaaaatatttacaagggattttaaagggttttaaaagatttacaaatgtttttgaaagagttttaaagggtttaaaaatattttaaaggatttacaagtgattttaaaagggtttaaaagtgttttaaaagatttacaaaggattttaaaagcattttaaaagatgtacaagagtttttaaaagatttacaagaagaccctttaaaaactcttgtaaatctttttaaaaccttttaaaatcccttgtaaatattttaaaactcttttaaaattccttgtaaatcttttaaacccttttaaaatcccttgtaaatcttttaaaatcccttgtaagtatttttaaatccttttaaacatcttgtaactcttttaaaatcccttgtaaatctatttcccgccaaaaaaaatttacaaggatttataaaagcattttttggctcagaaaaaaattgttacgaaaaaaagttggcgggaattttttttttttggcgagaaatttttttttgcgggaaaaaagtttggcgaaattttttttttggcgggaaaatttcagtttccaattacatgttcctatttgatgagggtaatttaatcattatgttcaagggaaagagtatttttaaaaatgaacaacatgaacgggtattgttgcaaaaggtagtagaaaaatgatagttttgcaaatctcccatctttttatcgtatttgtttgttaaaatatttacggttaatttttttgcagttatatttgttcaactacagtcgtatcttttcagtttgcggttgtgtctttattgttgcatctattcatttaaagttacgtctcttcattagatttctttgcattttttgtcactattttcggataaacaaagttgtttattcaaagtcggttgaactctatatttgtctttcttcctaaccatatttttgttcattcacacatattatttgcttaatgatcaattcaaaaacattaatctggaaaacggctccacattctttactctctaaactatttataaacatacttacatacatcattttaatatgaaaataatacctctagttcttgatctaaccaaagttttttggaatctaatagcaataacaatctcaataaatgtttttgcatttctaaacggttgcattttttatcataacttttcgttaaaatatttaatgtttgttttacagtcgtgtttttttgtcgtatcttttcgttaatatatttatggttatttttggtggacagttatacttattcaactttagtcgtatcttttcgattctgaacggttacgtctttttatcgtaacttttcattaatattatttacgattacttttgcggttgtgtcttcttgtcgcatatttttgttaaaatattgcatattttgggaaaatttatgtaataattcaaatatttgaatatatttatataataattaaatacataaatactaggcctgggcattcggttcttctgttctatagcctcttaagatctacgagggaaccgaaaaagtttcggtttggttcagatacttagaaagaaagccgagaaattaccgaactctaatagataccggtttggttccggttattttacccaaaataccaaaaagaaaaaaaacgaaataaccaaatattcgattaacaaaattgtaaaatattaaaaaattaacaaaactctattgggttataggtttgttaaaaatgtagtgggcttagatgtagttttgtatagggttgaccaaatattttttggttagattttggatttccatagatattcggtttgttcagttatacataatattcaatggatagtgtgactgaaatccgttcgaggatatttagtattatctagaaccgaaccggattcctttttcggtttggcttggttcggttcttcggttccggtttttatgcctaagccgttctaacttctatggttaattgaagaatgtgaaatggtggttaatattcaagaaattttaggaagccgaagtactaaatttagatactgaagaaaagaagaagaagcataagaagaggcctaaatgcccagagaattaaacaaatgggcctttaacaatatttttaacaatcagatctcaaaaagctaaagccttaatatataaacaaacatcaatctctggccgtcaaaggttacatctatcgccgccgctgagaccgccacttaaggccgtctcctccgcaatctccgtaaccaaaaccaccggcatcgcctggtaagctcgattttgtaatcatttcgatctcatatgatgtcgatctgttaaatcttgcgaaatcgatctttgttttgttctgagatttagggtttcacgaatttgtgttctaggttttctggcttaatcatttctattgttttttgttcttattggttcttatgcttttggtgacacaaagatctcgactttttcttgactctctatgcgaatttgtcaaaagtcaaaactttgtaacagtttactctctttcgtgcttgtgtttatgtatgaacaatagcttcgctattgggattgtttatttcaccacacttgattaattatacatactattgaaaatgttatcaatcttggcgataaaaaccgtcattttcatgtgtcttagctctagtagcaccttttgtttagagatcctgagtttaaagaagcagtagctagcatctttggtatagtaaattgtttcactgacaaattgtatatcatttggttataactagattagtgaaatttaatggatgagattatgtagcattgttttaattttgtatggagagaactggtggtgggcttatttccaaaattttcctttgattaagtcaagaccctttattttgagaagtgagagagaggattgtctgagtattgtcgctttctcaaaatctttccggggctaagcagagaaaagctgatagttaagcttaggaatgtgatcttggtcttttaagaatcttgaaactagtgggtaacttggatccatcgaatttgttttccgtaggtgagtgttctttagcctatttctgagtctgaattatacagtgtagacatgaaaataggtttttatgtgatggactcttttgttttatggtttaatggatatgttgagttttgtttttcccatgagtctcttataaagttggaatttgattcatggaatcttggatccagattacttcgaatatataaatgaaagaacacttagatgtatcaaagggaacttaagcgtgtgtactgtttagtgtctcacaacttggaatttggattagcgctttcatgttttggagtttgatttatattcgtgatgtttggatttggatagtaccttggtccattgaactatgtatcataataatgctttggatatggatatcgttttgatgacttacttgataactgctcatacttaaaaaacatttgttctagaaatctagattctcgtctatgagtgtttatatgttgaattcatgtcgaagtcatagtttagagatctcattgagcatttccccttcggaagagtgaggagtcttgttttggggattctttttagggctagacctgtgaggaccttcattaattgagttcgttttattttgtacccaaatatgttttttcggcttatcccattggcattgaaaaagttattgtttacattaaaatgttatttttttctttcattgagattaccttgctagtcattggattttatcggttttaaacttttaatagctgaacaaaaggggttttattctaatgtttacttaacactagtctggtcataaacaagtataaattttgggtttaagttatacttcttttattggaaatacatatcaaattagggcgtttcatagatagttgatatattttcttcacttgcatgtagttatgttcggtattatcgagaacttactgtgtttgaagttcctcggcaggaaaatcctgtagagtttgagccaatgttgtcggtgtgaacctcaaaagttgtgggtgtttttcccgccgataaagctgctggcaagatgggttggggttgggtagaatggtgtgtagggcaaggtaaggatgcttcacttacaaaagaatcatttagaaccgtttctttctttgggatctaaatgtgtttttttcggcttatcccattggctttgaaaaagttctctagtttgtttctttgtactaggagcattcttaccattctttaaacattgggcagtgaaagatattttcttggattagtattctgcttcttgtggtgttgtgtgacactcctagactatgttatttcctgttaacactgtctttgtaggacaggatgtgagaaatatgctgtttctgcaggataccctgaatttaccagtttaccggaatcatatcagaaacataaactcttatgttacaaaattgtaatggattagttgatgcgcattctgtgttttttcagttgtaaatttgcagaattgttgaatgttgattgctcgagaagagtcttgtgagtgaattctatttcttaatatatctgattatcgtttttgttgttgatttaattagcagatggggagaactaaggagcaggcaacattaactcggtatccaccctgtcctaggaatcctgctaaattcaatgatataaacaaagcactccaggaaaaaggatatggtaaggctctgaaaagaaaaccttggacgggtgtgacatgccctgtctgtcttgaggttcctcacaactcggtcgtcctcctttgttcatcttaccacaaaggatgccgtccgtacatgtgtgccacgggaaaccgtttctcaaattgtctagagcagtacaaaaaggcatatgccaaggatgagaaaagtgacaaaccgccagagctattgtgcccgctttgtaggggtcaggtgaaaggctggaccgttgtggaaaaggaacgtaagtatctgaattctaagaaaaggtcatgcatgaacgacgagtgtttgttttatggaagctatagacagctcaagaagcatgttaaggagaaccatccgagagccaagccaagagccatagaccctgtgctggaggcgaaatggaagaagcttgaggttgagagggagaggagtgatgtaatcagcacagtcatgtcgtcaacacctggggctatggtatttggagactatgtgattgagccatacaatggttatgatcatcaagatgacagtgacgattacagtgattcgtcggatgacgaaatggaaggtggggtattcgagcttggagcattcgacctgggccgtcttcaaccgcgttcggctgccatctcaagccggggaattcgcggtatgatcataaggaaccggtgggctcgaagcagaggtgcgagcagaaggcgacaaacataagattgatgattggaagcttggaaggcagatgattctacaccgtctgaccaagttaacctccgaactctatatatcggcagaggggaaggcgagtgggaacaaaacagagggttgttgattaaagtttttagttagcggtttaggttttcaggtttggaagatttgagctgtttgttcctctctacctttgatttaaagtgttaaaacgtttcatttgctacttttatttgatttgaaaatatctccattggcttcttttcttaatttctttagcatggtttcaaactggtgaccactaaaatacattcttaacaacgaacactaaactccggtcgatttctagtgcttcacaaacacaaaccccatgttttggtgaccctaaccatactatacctaaaaacgaaatgaaggtaaaccagaatctactcttgtttaggtcgacaataaagaaaatttcaactagttttgctcgtactagttcctccagctgccgtattaacctgtttcgagagataggcttcataaatttcaacgataagacgaggatccttctccacgagctccatatattcctctcttttagtaagtttatccatattttctacgatctgcgacaacgcagcatcgagaacatgtttcgcgttgtgctggtgtgcaaaggcataggtcatgagagagttatccggactgagtttggtaaccaaaaacctctcacaataactcttgagatgtttcacttggtatttctctgacatgaccaaaagatcacatgccatttgctcatcaagacatgcttcagctgtatagagataatatacgaaagtccgaagagcgtcataagatacgtcgctgatcttgatcgtgccgcttagactctcttccatttcattctcaagcattgctttgaaaactggagaacgactcacctggtagcaatattcacacatatcatcaatttcagcacaagtgtacaaaaacactgctcttcttcctaaaacatagaacacaagaacagaccctaactctcaaaattagccaaatggttcctaagtaacaacaaaccctaatattttttctttctctttctctctatttctaatctatcaaatagattcatatctaaaccatcaaaaacagagattatcacaagtcaattctacaaatttcaaatcaaattaatcaaataatttcagagaaattagggttttagtgatgtgagaacgaaccagaacggatttatgagcgggaataggaggagatccggcgttatcttcagaggcgatgagaacaacatcagtgaaggatctagaggttgaactagttccatgatcaagagaagaagataagcgaaggaaagcaactttagctttgaggtcatcgatctcgcgtttgagttcttcttcagtttcgccggcttcgacgtagcattccttgcaggtcccggcgttgcgagggaggtactcttctcgacaagagatgcatcgcatcggcgtgtcggtatcggaatcggattcggatccggtttcgctatcggagccgatttggcatcggtggtggtgtctcctcatctgaaaacgatgtcgtttaaggtctctcttgcgattttgctttttttttggagtaattaacacgagtagttcgtatccgcactgtggttataattttatgatatggaattatggatctatttggtggtaaccaaattaactaaacataattactaatatagcattttatttgaaaaactaagatgaggattggaaaaattaccattttttattaacttattattaataatttgagcatatatatatatatttttaaatgcaacattttaaatctattttgcgtaaaacataatttgaatttttttaaattagatatgaaattagataatggtcaatagtgtttatagttataaacaagttgtacgacatataatctatatgaatataatgttgtattatactattttccacgaatttacgcaaattaactttaactttaaaatactaaattctaaacttctatgtaaaaacagtataataaattttaaacttaaaaaatgatatatatctttaagcgacgactttttctctcaaatttaccaaagcttttcatcgtcttttccgattgcctctccagtgtccggcgctgcgaaagggctacctcttaatgaggcttactgttgctgaggttctcagctttcttcttcgatttggcatcagggtccgagtttcttcaggcgtgtgagtgatggtcgccggagcttgacggcatggaggcaagtggtgctgcatctttccattctgatccaacttgcgtgacgacgaaagtagatttttggagggttgttgaggtctctttgcgtttacgtcagttctgagagcttccttggagcttggttctcttgctgctctcaatccggtgattttgctcggattatatcggtttggcgtctggttctcgtattttctgaatgttgcgggtgtgtgtgtttggagcttcgagcgtctggctcctttgatcaagcgtgtagcttgttacggctaaactgcataggtgtcttctcatttctcgtgtttcatcgatcctgctctcggtttactttaaaatcctgcttctccgttttatgtccaagcccctttgatgttgtcttgccttgtttttgatgtgttcttttgtttgctgcctcgtttcggagttgatatgacgcagatggagtgggtgtttgtttgctccttgtttcaacaccgttgacggctcaggttcttgggttaccagtgaaaggcttcctttcgttttagtttctttgactcgatctttaccgtttgacagcatgatgcttcttcttgaggtgttataatttagaaaacttcagactcgttttatcgcttcattgatttcaaaagcgtcactgcttttatcgatatcaatggaccgattgtttttgcttccatgtttttaatcctttttttgccataggaccaaaccataggatctacttcatgtaattcctaaaactttttcattatatgaaatatttacattcttagcaaaaaaaaaatgaaatgttgaaatagtatagaataaaataaaatgtttttaataattgaacatttttcaaaatttggtagtgacggtggcaacagttgaggtgacaagaatagcgatggcggtttcttccaaaaagttcgagagagtcgagatgcaccacccaataaacttgaggcatgataagattgaagtcacaaaggtttgaacttgaaaccaataccgtgaccaaactcacgccaaatgagggtaaaaatagagataaactaaagcatttcaagattatactttcatcgaataccaaacgaatcagtctatccaccagatttcgtgaatggtaatgacaggtccaaactaaagccatcactactgttctatgaaggagtcctttactctgtataaacgagtatgagatcttcaacattgaacttggtaagataaaagaataaacaaacctaggcctaacaaaagataaggaaaatttccaggaatcaaagaggcaaaaggcggtctcagtgtcaaccatctactctttgtagacaacatgatgatcttttgtctatttgatcctaagagctgcaaaatcctaatgataaccctgtaaaaatatgaacactcctcaggccagatgataaataaggaaaaatctgcctatagattaatataacagttttattatatgtaaattttaaataatagattttgatttagatccaaacttctaataaaatttatagttggttcaattgaaagtcaacataatatttgcacaaaattgaaaaaaaaaacttatgaaacattaaaaaaaaaaaaatcagttaacccatgtatcactcggattctaacctagtataagataaattagaagaacagtaccaaattgtttattcatcccatttttattattcaactcgttctttttattaacaaaccatttgcaggctgaataccaaaatctcactaaattttttaatttaagacttaaatccaaactaaaattcacattgtaatttttttgaattagtataaactatacatttgaaacataaaaatataacataaattatagaatgaaatttatatcatatcaaatcttttttttttagtcatcaataatttaattttgcaataagttatttttattacaaatttatggtaagattttgaatttgcatttctcaagtaaaataaataagataataataatgcatagtgtgcatcacaatcttattctttgtggttcatgagaagtcttttgatcgtccctaggagttgcctaaattgcacttttagttaattaacattaaacttcttataaaaaaatgatacttttttgttcaacaaaggaaatgttcgttgtcaataattacgctatgtactttatacggcacacataagctt

SEQ ID NO: 552 - DNA, 107183 bp, Arabidopsis thaliana
aagcttcttcatcaaagaggaagatggttattaaggggttttgattgatcaaaaagaagaatctagttaccaatatgtccttaggcacgtccatacataaaatagaaatcacactcggaaaaggtggacaattagctagagcagcgggttccacattaaaattaccttcaggagaggtccgtttccgaaaactgctactatgtctactacaaattttgttttgctaagacaagtatttctactactatgaaattcataaataaaatagttaatcgtgtggtaatcattccttttttttttgttatcttgcaagtggtcctaaaaaaagggaatttgtcaaattttcgaggtcttaaagagtgtggaatcacataagaaactcttgaatgtaattggaaaagagatgtaactccagttcttttggaaatagaaagatctttgacgcaagaataaaggatttatccgtatcattttgacttggtttttatttctctatttttataagtttaagaaaagaatatcatttctcttacccgtatcgaatagaacatgcggagtcaaatcttcttcatgtaaaaccagattgatttagatcgagagaatcatacagttttatgaaaccatttgctattgctcgaatccataatcaattctatttgtgattggagtatttagagccgacaaagagaaaagtgggaccttgagcgtaattaaaaaaacagtttatatattatatgtgcataggtttggaccttttttacataacttttgagaaaataggatcctaattgcttaaagaaatctcacttaaaaatagtggatcctgtacaaatgcaccgttggcacatcctctaagctggccctgagagtagtgggcagttgaatccaactttccattatttctatttcatactcgtcgtagtgcgtaaagaaagcccggctccaatccaagttgttcaagaatagtggccttgagtttcttgactctttgacttaggattagtcagttctatttcttgatgggagaatatatatatatatatataacttagcggtagagtgtcgcctgattatccctaaacccaataaatgtgagtttttctattttaacttgcttcctcgctgtgatcgaataagaatagatatcggctacaaattgtaaaggttttatcttcctctttaaatgagctatcaactcgagcaaaagtttcattagatatcttacaacaaaatccctcttttccgatccagttcttccaccaccgcaaacttcagttagatttaggcatgatacgcttttgagttattaggagacaccaaataccttgaaaccatattaacaatgaaaataaggaatttatgtcgttaactgaaaatgataggaaccaatgttggaaaaccaaacatctacttgccacttttgttaggtacaaaatagggcatagcctcaaactattacaaatcctgttattatgcatgcagtctcgacctctccttatgccatttcgtttaaccttatttgaacaacatgagcaatttggctgataagagaagagacggttgtggtacaacatgtgggggaaaaatgttttgttttctaacattagaaaaatgtataattggttcaaaccttcctcaaactctcatcaagcaaatagatggcaatatagttcgaaattagctttcctccctttagagtttagatgcagggctcaccaaaactaaacgacggacgacgtctttggtttggcttgagaacatagcaattgaatgactttaagcaatatataacttctaaattctttcatctttttaaacacacggttgcatatatcgtaaaagtaaagtacttttttagttaaaataaattttacattttaaaaaaaatatggaaacataaatgctttgatattaagattgttaacgttcaattttgtgattaactcggcataaaatgaatcctaggaggagttttttaagggaaaatattacacttaaggctcttaattaatttgctagtttaagaggtgattggttaggacttttgatttagacttttactttaacattatactattgaagatgttgtgttgactgagttttagaagctatctcaacatgtcatgagattaaagatgatacaagaagtgactctgataaatgaatcagagataatgaagcattacttgtatcagttgttcacacaaagaagagaagatgatgtgttgaatcaagaaacttgcagtcagttatatcggaggatgtatcagacgtgtgaataagttcttgtgctacttccgacattaatacatggaatagtacatgaagctgagttgtgtgactactttgaagagtttgaatacagaagtttgggccaacttggataagccaagaggcagttgctgagctagatgaacatcttaaatatactattcaagatggtaacatgaagataaatttccttatttataaagaatttttttttgtcaattcttatttgttgtaaaaaagggaaattcatattagcgaagaatagaaaaattgtctattctaggggttgatcaattgttataaatactaagatggcgcttcatggagaatgcacacgcctcagagtactcgagagatgcacacaaagtgtgtggcgtcgtccaaccagatatgatgtaagatttattggtggtttattcatctagaaaagaatgataggtatagtaatgtagtgtatcatacgcaattgtaattgtaatcttgttctagtggatttgttctggactaggtcccagggatgtaggataaaccgaactcgttaataaactctttgtgtcgtttactttgtgctcatacatactcgcactcgaacatacacgtactcgaacatatagatttagccacaaatatgtgttttcaactatgacttttatgctgtgatttttattttaaaaataaaactatgatttaaaaaaaaatgtcacatataggttgtgaatggtgagtggaatttagggtgggtcaaccacagtgtgggtgaactgtggttttgtcaccattcatcgaatgaaaggtggtacaaaaagatactttaattaaataataataaaaaagaaaatgcatacttactgtataagcggctcagattttgtgaagaagaagattgaaataccttaaacagtaaaactacatatggtgtggagtgtttggggtaggcatgaccaaaatctaactgtaaccgtaattcggaccgtaaccgaagcgtttattaactgtaacccaaccgtaaccgtataaaacggttaataaccgtaaccgtgaaaatcgatcatttacggttaagaaaatatactaaccgtaaccgtatcaaaaccatcggttaaccgtacggttaaccgctcttttaaccgtattcttaaaactttaaaaatatagttgtaagtgtgtatagttgtaaccacgcggttaactaaataaataattatttcactaaaatagtactttaaatcgtttaatatgcccactactacgatcgaagttactctactactctttttaccataaatcaaatcataagtagttcatattatctattatttatactcttaaaactgtttcttaatgcttacaacatcttttctttagtattgtttttgtttacgtgattatttaaaacatataatcacgtaaaataaatattatttgatatattactatttatttatttattttattataaagattaaaaaatataatattttatctcatatattaactatatcataattatcaaataacagtaaccgtatacaaccgtaaccgtatttaaccgtaaccattttaaccgtatatataatggttaaggttaaggttaaaaaaatttataaccgtaagcgtaataaccgtaaccgtggtcatgcctagtttgggggttcttttatgtttttttataaactaaaaaatgaaatgacaatcatcaacaaaaaaacgtgttattttcagaaaatacgggacaatagaagtttcagtcattttcatgtgttattttgtatttatttcatgtataacatatacaaaacataattatatttatcttttaataaatcaaaattagatataattacacctgtctcgaatatatatacataatattcttataattaatgaaacaatcatttttaatttttagtataaaattatatatttgatatatattaaaataactttcagttttaaaaagaaaattttccactcatactattagtctttctttcttcctttttctcctaaacaaaacatgttaaaatctagtattaattttagatttaagtttagaagtataataaattaaactggtgtcatgacaaaaactaattttagaatttaacatatttatgcataagacatagagaaaaaaattgtatattaagatgcttttaacaattgaggaaaggaaaaaaacaaaaaacaaatacgtgaaaatagaaagaacgtaactttagaaatatagggtttagtatttttagtgtatttaattaaatatatagttgtaagtagtgttttttctatgcttctctttgtccacgtgttataagacttctaaaacaagataaggattgtaaagatcaagggtattatcgttatttccggcccattcttctccttcaagtttgcagtagtcactctcacatttctctagctttcctattgtcgtccaaaggactttggagagctttccagggctctttctccgaagcaaccaccgtatatcaaggtgagaagcttaagacctagtagctataggttttaatccttttattttttttcgctttcaagatctaaaaaggtcacttttttccccatggttggtactcttaacatttcatttttttcttccagcggattttagagaactttcaagggttctttctttgtccgaagaaaccaacgtatattctttaatctatttttattttatttaaaatattaactttcaatattttgtaattatttttactacttaaaccgcttttctattatttcaccactcaacatagatttttaactgcttgatccgcacttttttaacttgatccgcctaatacgcttgatccacagttgactgcatgaactgcttgatttgcctgctccgtaccgcttgattcgcttgcactattcgaaaccatggaggaatattttttttcaaagaacatatacaaacgtaggaaaaaaggtttgggctgtgaaaatttttagggacttcgtagttactttgaagtagctaaaacttgattgatatacctaaagaaacactctgttagccaaaagaagcgaaaggtaacgtttgaatagattggtcagatctggttaagatagtgtcttctccgacaaagtggccagccttcttaacataccttgaagcgatttagggtgacaactatgagttttataatttttctttatttttggtgtcttgtaatgcgaatataaaagtggataaattggcatgaactgttcgtaatcaaccgcatattataacttatgtaaataatattctccaaaactagcttgttttagtaatctaataaagttgttaacaaaaataaataaataaaatagttgagaaaattattatttatgtaatattttagagcatattctattggtaagaacacttaagagcacctccactgcacaatagaaagaggatgtcttaaacaatattaaaatattaaatttacaaaatattaataatcaaatatgaaagatctttaaattggagacatcctctaaaatatgtctttacttagacatttaagacattgtgtctttattttaaagacatccaaaaattaaaataatattttttttgacatattatattttaagtgtaggaagacactctccttatttgtgcaatggagatgctctaagagagtatcttatcaaactaatattaatatttcgttattgaattaaattttgagttaataaaaacaagttgaagcatacatatggtgagggaaaacggataatttcatcccaaacttagttgttttatcgtatttatacatagaattttattgtgtgcctaaaactacataaactcaagttaaatttgaatttcatacacgaacaaatgaaatccggtcggtcttaacccacaaatctcaaaacgatgttaatgttccttaacacgacgatgattaggatgcacaaatccgacaacgtagtttagttttcaaagaaaatgttagaaaaaaatgaaacattaaatcagatacacgaatctgtggctccaaagacataactgccgactcaataccaattgagccaccatacttttatttattattccaaacgaatatattattatatacatagtgccctgtttcattctcttaaaacataaatcgtatgggaagagtttgaaaatcaacgagcttatcatccctcaattcatcacacactcttcaattaatcaagccttgcgattgttttcctaatcttcaaattcttgacattttctttgaaagctccgtaatttgaaggcaatcttccccagaaatacttgagaaactgagttgaggtagggaagaatgtgagtaaatgaaaagcaattagtaatgaagaagagataatggagaattggtttcgttcttcgcggatttggttttgggaacatacacgaaggaagaaaactaccatagttatgaataaaaatatatttatctgcaattatatcaattgttacagttgtgatgttaatataggctaacccaccccatttaaaacccaccccatttactctaaactcatttaacctcatttaagtttatacctcatttctcctccctatttaaatacatattaattatatttgacccattaaaaaatttatttagacccatataacataatataattaataattatttaaaatatacagctttttatgggtgaatatatattttttggcaagaatacaattttggcgagaaaatacgggtttaaggtttttgctgaaaacacggtttttcgatttgagcagaaaatgtgggtttacgattttggtggaaaaaacgtaattttatggttttggcggggaaacatcagtttatagtttcggctggaaaacatcggtgaacggttttggcggaaaccactttttgtgatttgtacgggaaaactttattttatgggaatatttatttttggtaatataaaacgcaattttccgatattggcttaaaaagggttttgcgattttagcggaatatgcggatttacgattttggtgggaagatgcgggtttactattttagcagaaaacgtgattttacggtttggcgagaaatcgtcggtttacagttttagcgggaaaacatgatttcaattttagcggaaaatatttttttgtgattttgaggaaaaacttcacttcatagaaaagtgtttttttggtaataaaatgcaattttacgattttggctaaaaatatgattttgcaatattaacaaaaaaaaatacggctttacgattttagccgaaaaacgtggtttaacggtttggggggggggggacatctgttttcggttttggcggaaaaatattaatttatggttttgcgaaaattacagttttgcagttaaaaacaaatatttatacaaaaaaatgaatttaagttgaataatttagttttaatgtattaatatattaacatttttaataaagataactaactaataacaaaagaaatataaatgagtttagttgggtacccaattatttgtgtgaaaccacatttaataaatgagtttaaatgggtcaatttctcttctacatatccatttattaaatgaggttttcatacccgaattagcaacactagttacagttgtacagccggtataagtgtgctttcagctttaataggttctgggttaaagtaaggtcattgatttcatcttttttttttttctttttttttttttttggagaacaaaactacgtcgttttgtgtacaacgtgacatcctaatgagcttcgtgttaatagaacattaacagctttatgggtttaggccgtatttgttttattcgtgtaattaaaatttaacttacgtttatgtagttttacgtacacaacaaagatatatgtatgaatccgataaaacaactaagtttggggcaaaattggccgttttccccatatggtgacatgtatatcaagagtttaaaaaaaaaaatcatgaattattatttaagaaccccttccagtgtatctctcctactttctatgttcttattattattatgttaaagaaagtatctaaattatatacggaaaaatgtcatgttaatcattagtttactattttcgttggtttaaagcatgaactttggacattgtgatttaaatcctcaattttatgttgactttcaattttatcagaaattctcgttgactaagccaattgagggacaagctcttctttttcggcgccatcagttgacctagagacgagagattactttgaattcgaaaaaagagaaaaaaattcagaaatcgattttgaagatctaaggttttcgattagaagaatttctaacgatgtgccttaacttgcttagtcaacgagaattcgtgattaaatcggaagtgaacataaaattgaagatttaaattaccatatccaaatttcatgctttaaacccacgaaaatggtaaattgataatttaaatgacattttttcaaattaaatatctgcaagatgctctttttacagtccaaaaattctcacaaccacttacatgattactttacttgtacaatcatacaaattattattttaaagataagtaatttaatttattattttacatatagtcattttaatactatatacaatggcagaatcaaatgcaacgttcaaaaaatggtaagttgaccctaaaaaatttataattttttaaattataggataagtttcctaagataattagaagttttggattaacgtattcacaatgacccctatatcatatgatcaattctttctttgatccatgcatattcattttttcacttaacaaaaacctataatatctttactataaatagatctataatatttatttacttatatcaaggtttatttttatttttagacatatcatgtttcattccttttctctcccaaacacaattatcaaggtcacctttacgacaatgttttccggcgtcggtagggctcctgcttgccggcgccgggttttctctcctctccgacaactcgttttcaaacactctctcatctatttctttctttttcatggctttcttctacttttttcgaagttgtacccttatatccaacattatcacgaccgatgcaaatgaaatctttatcaaaactgtctctagatcaattttctttaaaatcttcgcgattctcgtcgttcgtccctctcacaggttctcctcgaagtcaagaccagcacctctatgctcctctttctgggactcagatcccctcaccaagtgttttgcttggttgcgacaggaacggagctctgcgttgacgctggagccgatgaagtacatgacggtagaagaatcatcccaaaacggcaccacaaccacagatccgccgccgcagtcagaaaagaagtcaaaggaagggttaaccctaaccctaattctactatttttcactcgtaatgggcctggcccaagaagtttattttctccatccagcccaccttacaatctatcccagctcagacataaactaaggggcataagcccatctattataaggcacaggtttgttttttctcttcatcgtgctaagtacaattctgaagatctcttacttatttggactcctacctaagaaagtagcgatggatttagattggacttgttattatccttctcgaaacctggtggattgatttgctcgttttgtattcgatgtaagattaatctcgaaacgttttggattgtggttagacatgtttgaattcaagctgaatcatcttgcgtcatttgctttgaggagcaatgcatctcaactctttcaaaccttactaaagaacacgcctccaatctctcaaaccttaccgaagaacaagcctcaacgctctctaactttattgaagaacacgcctaggtactttcaacctcacactttctcaagcctttttgaatcattgatttgtggctgcgatttgattgaacgacaccaatctagtctcccaatgttcctttggttatggccttgtgattatctttggcgatttcgacaaatcttatccggcatttggaatatctttccaccggcagtctcctcgatggagcattctaccaaaagctcatttgcgtcaatcgcgcaagccgtctatcaccaccagttggtcgggattttctcgaagcttgtcttcgaatttgaatctcctatggcatcaaaagatttttcaaacattgcaagcttctccaagttgagcatctttttaaaaacacattgagcctttagctttcttttccatgcattatcttaatttcagtttgtatgaattttcctctttttgaggttttaagtgaatgaaagttcttttgtccaaaaaaaacccgacatattatgtttctttcctataattgtttcaaataaatttaaaatatatattttctaaaggttatgaatcaagataaacacaacaactaatcaatctccacaataactagtatatagtttgacaaaaaaataaataaagataaaagtactttttacggggctttatagatttgggtacatttaagttaaaaaagtcagaataaatcactttttgtttggtttatagagataagcattttctgttagacaaaattaccattttgccctcaatctccttcttctttctttattctttctttattctttctttctttcttcatcgcttatttctcttcttaatatttccagaaaatctcaattttttttttggtttttttttgtttttgatcacaaaaatccaataataatgaaatctataccctaagggatagtaaaaagtgaacccaaacaaaataattaaaccgatttgataagaatataagaacgctaaaacaatttccaaatttgataaaagtttaagattttgagattttggttttgcaattttgttggttcgttgtctaggtttagagatttatttgggttttgtctaatctatttatttttgaaatttatttcaatttaatttgtttgtatgttgttgatgaattttgttggaaatttccggattttcttctatatagaaaattcttcaacatgaattagctagagaatccaaaatcataacaaaaatatcaattttcagttccttaatccaaaacaaaagaactgctattaaaaatcagcttgaattttgatctggttcgggaagggaaagagatagtgatataatttgtaggtggaaaagatttgggggagactaagattaaaacggtaaaacagaaagtagaaaagtacatgaagctgtaaggcacaaaaaaaatgccgatacttacaaagggacaaggttttaagtgtttttctcataattgatcctactttatacaactataaacaaggagaatcacaagtatctttaatttgaaagatgatatatgaaatattttagatctacaactatgtatctatatatttatttagttattgatgttaagaaaatactttatttagttttattttaggtttaaaatttaatattttattggatatcatctaagttacaatttacactttgaatatatcatttaatattaatataatctaatttaataaaattaattaatatatttatctatatatatatattacgcttatatatatatatatttttaataattatatattttatttttaaagcctgcaaataacccgtaaacacacgggtttgaccctcaccaacctcacggtagagcagtcagggtgggattagaaagctttagttctgacaaacctaacaattaccactaaaattggaaaaaatgtcaaaacaaatcacaaattttaaaatttgggacgaaaaaaccatgaagttttgacatgtcatttaaatctcaaagtttaatttgactttacaataaaatggttaagttgtgttgattgagtcattttaggcatgccgtttttttgttatttaaaagataacaaagttaattttctataacatctaacaaaaagtaacgacaatgcctaaaatgaccgaatcaacaaaacgtaaccattttattgtaaaatcaacctaaattttgagatttcaataacatttcgaaaattaatatttttttcgtctcaaatttcaaagttcatgaatttttttcgttacttttaccactaaaaattgtaaacattggtaataaaataacaaaagttgaatactccatattttgtcacctacccattagatcagatctcaatgacaaacagtatcatttatttataaaatagtccaacagattttcgtcatttctctagctttacatagtcaccattttttttgtttgtttgacctcaaaaactcctacgtttctaagctcttctctttgcttcgattcccaaaacgactatttccaaaaggttagtttttaatcttcaaatccttcttcaatgtccatcttcgtgatttaatagtcatctcctttggctttttttttttttttgagtccgtactttttggattgtagacaaagatcctcccgaccaaacattttgcttccgtgaaaaacgattgtggtctctgtaagattaagatcgacattacacaaccactgatttgtcttagctttaatgattagattcttaattaattagtcattactcttgtctctgtaatagttgacttgggtttttgaaactaatgttaaatttaccaaactaaaatttttgtagggtttaaagaagttatgaacactaatccagtgactaatgggtttgttaaacctgttcctactgaagaagaacaagcaaaggtaacttaaactttgttcattattttagatttatgttctgataagatttgtgttatttgactttagattgaggaagtgaggaagctattaggtccattaccggagaagctttcgagtttttgttccgatgatgcagttttaaggtatctaagggcaaggaattggcatgtcaagaaagctactaagatgcttaaagaaactttgaaatggagagttcaatacaaacctgaggagatttgttgggtacactattgaattatgaagtaacattgttgatatgtttgagtttatatgaccaatgagttgtgttttcgtaggaggaagtagctggtgaagcagagacagggaagatatatagatcgagttgtgtcgataaacttggacgacctgttctcattatgagaccgagtgttgaggtttgtacaatgcagagactttctttagttttaagctctggattagtttgtgatcagaattttttgagttgtgtcagaattctaaatcggtgaaaggccagattagataccttgtgtattgtatggagaatgcagtacaaaatttgccaccaggggaagaacagatggtgtggatgatagattttcacggttatagtttggcgaatgtatcgttacgaacaacgaaagaaaccgctcatgtattacaagaacattaccctgagagattagcttttgctgttctctacaatcctcctaagttctttgaacctttctggaaggtaaagtttgtaggatcactcacttttagaaatgttatgttggtctaaagtgtaatgggtgtgattataggtggcgcggcccttcttagagccgaagacacggaacaaagtgaagtttgtttactcggatgatccaaacactaaggtgataatggaggagaactttgatatggagaaaatggagttagcgtttggtggtaacgatgactcgggttttaacatagagaaacattcagagagaatgaaagaggacgacaagaaaagattggcttcgttggagggcattgtttccgcttctctagactcgctcagcattttatcggtctctgatggtaccgcctctaacagtgctcaccctagctctcatgatgtctctgaggatgagcattaaccacagagaaaggactcatcaaatgtttgtaacttcaagcacacttggaataaatctaattccacttcatgaggttgtagctgcaaccattgtatgttttcgaaacctattctccaccgcgatgagattcaatatgtatttttttcgcgatgagattcaatatgtatttttttcgattagtaataaaaccgtcacagataaaatgcacataacacaagctgcaatacattttaataccacatacttaacaaaacagagaaactagtcctcggtttcttggtatagcttcatgatatccgcacaacccggcatagctgcatcccttagaaatcccatgttgttagcaaaacggtcgtcagaagcaataccgttgaagcgagtgagagtcacacgggcacggtcatgaccaggggacacattggaacaccgtaactgagagctacgaaccaacattgcatcacagaactgctcatcatgatcctcgttaaccaagatcttgtatgatcctgtcgagtcagttctcgcctcgtggctatacgttaactccattgttctcctgtctttacattccaatctaaccactgcacctatattattcatagtatagtatataatcaattagcctaatcaccttaaagatctcaaatctactttagtacaaaacccgaaaacgtagatcatattcataactctatagatccacaagtccatacgaacattattggcaaaaatgtgaacatatcaagatccataactgaatttgtaaatacgattaaagtagatcttggatgtttatgaacgtaccggagatgtaagtagaggctggagtttcgaaaccagcgaggcaagtgtcgcaatagacacggcctcgcacgacgaaagggttcttgttcggtctagccgcgatggctagagccggtaaaaagcagagagcgaccaatagaactgctttagacattgcaaaagattttaactggaaaagtttcacagaggattaggttttaaaagagaggacacagacagagtaataatgggtgtcaatggaagtggccagtgggcacttaagtgtcgtttaaatgtgaaaacaaacgtaatgattgaggcgcgtgaagtggtgtttttcttgtacgagccgaagtagagaagccgttacttatgtaagtaacagtagtgtcggggtatttgatgacgtggatgaatgtaagtcgtcgaagtgttggttgtgtaaaattcttagagtagtggattagtcgttgatgcggtggatttattaaaagtgaaaatgccataattcgttaataagaccgtatgatgatgatcaaattttttggattgaggagtattccctaagtaaagttgtcttttagactatctctaataatgcttgaaattttacattctttcagtaagataattaaaatataaattaattatggatttgccattttttttatgtcgtttgtaaaatttacctttttttgaatagtttgtgaagtttttcctttttatgcaaaaaaatatgatttttgtggtatattgtaagtatttttaccaaaagaaaaacttaaatacttctattaagtgttagaaatggcatattcgtaagatttaattaaaaatgacaatttcaaaagattttgagaaaaaatggcaaaattaacaataatcccttaacatattacccaaaatagttatatttactctagacaaaatttatcgaacatttgcttgttataaaataaatggttacagtttataagtttgaaaataaaaaatgttgttaataaataataataaattagcgattgattaaacttataatattttttttgaagtagaaatgaagaaaatcattggaaaactcttaatcatttttttctttattttgaaaaaatatttgaagccaattattggagatgctcactatgaacatcaaaaatgggttaaactttttggggtttttggtaatatggacagttttttaagagatattggaaaatatcactccatatgctcagaaaactcaaaaaaaattagttggaggaattgttgaatatttcaatagtaaaagaactaatgaagttactttattatccttctctatttttctttttttaattaaaatctcacatcttattttttttactaaatattttcattgttagcaggttaaccccgttaacaattattggtaaatattatgtataaattatacgttagagtaaatattattcacatatcgaatatcttaacgttttcatataaatattattccgttatataatatgttagcatgttattattctatatatcatgttgttataattattatcatgttaattatgtaagaaaaagtctaattcccttttattgtgcttaatatacataataaaaaataccaatttacaattttaaatcgataaatatgttttaacaaataatttataaacttatcgcgatatttttattcaatggcatttttgtaattattatttttttaaaggatatttttaatttatatattattaatctttcatacttacctaaataactaatatttatgcatagatttttaatttattcatcctccaggcatatcaattaatatagccctactatattagagaccgacctaattatatccaaaaacaaaattataggtaaaacacaaaaataaaaataaaaataagtgtgaggtaaaaaaacttaaaagaatacatttgtaagctgtagccacaacataaaattttttaggaaatttgattatataatttacatgtctaaagacctattttaaaaattttccttatctatactattaattgggaagcattttgtgaactacaacattgtgagggtagtttaaaactaactcaatgaatttttgcatgggtaatttagtaaattaacaaatactacaattaaaaaaaaaactaccaaatatttttgtaaatcatttaataaagtttccataacaaattatgctatttaattcaaaatcgtttatatgtaaacttatttattttggtaataatctattagatattttcggaaacaacaatataatttaataacaaattatcatttagtttagatttttaaaaatttccttaataaaactaaactgattaattatgattggtacacattgaaaaaacgattttcaaataagaaaaaacatttattatatttgtcatatgtaatctaaactaccatcatttaatttttaatatagcatattcaacaaatactttttggattttagatttgtaaatatctagaaaataattctagcataaattcaaatattttctattttaattaaaatttaaagattgctatccttaaaataaaccatattttgcggatttgttaattgacaaaaaaaaaatcttccgatttgtttcaaaaatcctagctaccaattatttttttctttaaatgtcattaaccttaaaagatagtagcctactttctgatgctataaatatagggtttgtgtgcatgtttatcacttactaatcatctcttcttttaattttattgctttatcgttttcatttccaaagattgatacaaatcaaagatgagatgtattttgattttgctatctttgatgatatataaaatgagtatgggttgaaccataatttcttgattcgtaattatatattttctttacataaatacatgaggttatataaatttaaacactctcattataaaatgtcatatattaaactatatctttatacaagcaaaatagttatataaacttatatttctgattttatattaagatgactataattttttattttttatttttaattatccatatctgtaatataaaattaaacaataaataaatgacaaaatgtaatttttgagtgtcattactttgaaaagtttactaatttatttagataaaaatagttagagataaatgtatacaatttcattctaaagtgtaaatgtctaaattttttatctctttgcaagcaaaatattatatcataacaaaatttgagttctattattagatcacttaaaagaaagagcaaataatagaacaatcttaattttccaatagtttaggaagttgaatatatttttacggtgacataacaagaatcatttaacttagagaattcttactatacttatgcataaaagaattcaacatacaatgatagaaaacatgacttagctcatctgtgcaatcgaatcatacttacaaaacaatttacaagttctacatgggccaactatagataatatgtttagtgattttagagttttctctttaccattatttagtttaaattactttggcaaaatatggatttacaagcagccaattaaatatagcccaaacacatatacaaaaaatgcatcaatatttaaatagtttaacatggtaacacaaattcttatttcacacataccattaaaattttcaaattcaaaattaacttgtgtttcaccatccataacacaaaattctattgcaattctctaaccataattttttatataacaatactttacatcattataacctaagataattttccatctaagatgttttttaatctacttttcagtttaaaactacagaatttgacttatagttcacaatattacctattatgtcataaacaaacataaataacaatcgacaattttctttacatatattataatataataaaacaaaaaatctatattaaatataaatttcatacaacacatttcttaaaatatgaaatgtcgcacgttcgtgcgggtcagaatctagtagcctataaaatgttcagaacgtactatttgaaattaggaaaaatgggagagaaagaagaatatgtgtctgtgggaaaagatgtgagataactttagaaaatcttaaaaatttagatgaaaatcttaaaaatttaacagattttgatgagcaaattgttcataaattttttttattacaaaaataactttagaaaatataagtgtagaggatcgagctaaacaatacgccttataattacataaacgagaaataaaagaaaacatctatactattaattgggaaacattgtgtgaactacaacattgtaagggtagtataagattatccaaatgaatttttacatggatagttttgtaaattaacaattactacaactaaataaatatcttggattttgttttaaaaaaaaatcgaattaaatcaaaaaattaataactacccaataattttggaaatcatttcaaaaggtttccataacatttcaggcaaatttaattcgaaattgtatatatgtaaacttatttattttagtaatatgttattagataattcggaaacttcaatctaatttaataccaaattatcatttagtttagattttaaacaatttccttaacaaaactatgttaattgtttctcattagtacacataaaaaaagattttaaatgatgatttaacatattcaaaacataatttttggattttagatttataaatatctagaaaatattttcagtatagattaaaatatttaacatttttattataatttaaatgatataaacttttaaagtattttttaaaacaggtaattttcattattttaaaaatatatcactaaactaaatttgaattataaaaaagaatatatttttaaacgtattataatagttacaagcttttggaatattcataattataagaactacatcttattgaaaggtatataataaaaatcggttttataaactacaatatcataaattaataaatcacaaattatttttaaatatattaatccaagatgtaccacaggtcaagccctcgatttttttatatattacaagaaaaatatttgaaaataacaaaataatatttaattttatggaatgaagttatatggtggaacgagtttgagttgatattaatacggaaagataatcaacgagtgatatcttaaaagggctgcctataggagcccccctcaagtatattgtttcaactgggttccacccaaactcttagcctctttctatttccccctaatcaacttaaattcttctcaattccacctaatatatataatcccacgtaattaaccaacattaatcaagctgctaaaatacgatttaaaatcataaaatcacgttttaaaattaattagcctcgattaaaccgataatcctaccataatctattaacccaaattgaagccactgtatgagaaagaggcttcaaattttcttcttaaaacccaaaacaaaatcaatttagggattagacacacaaaaaaaaaaacaatttggggaaaaactttattagggtcgcactcgcatattcttcttcttccttgcgacttttttttttttctttggtgtgaaccctgcaactctattactcgaacatcaaattcgattttctttgattcttcttcttattcttcgtcttgtggtggtgcttcgtcgtgtggtggtgcttggaatcttggtttgatcgaatctgaaacgtaatttggttggagtctcataatttccacaaagatgtcgtaatttggttgattttgtattaattttatcttgttcggaattgtatgtatttgtttggattagttgatatttgagagtgataagtagatgtttgacgatgatgttgatatgttttacaaatatagtgacggtgatgtcgagtacaatgggggtaacgaatcagagagtgaagagcggattgaagaagaaattgttagaagtaagaagaatacgaagaagaataagaaagagaagaagaaaaaggatgaagaagatcctcttgagcgttttgactttgaagtagatgatggagtagcaaattttgaagacgagataccgataggccgagatataattcccgagagctcagatgaagacgaggatcctattttggtgagggatagaagaatcagaagggctatgggtgataagtttgtgattggaagtacattcttcacagggattgagttcaaagaagctattttagaggtgacattaaagcacgggcataatgttgttcaagatagatgggaaaaggagaagatttcattcaagtgtggtatgggcgggaaatgtaaatggagagtgtattgttcatatgatccagataggcaactgtttgtggttaagacatcatgcacgtggcatagttgctcacctaatgggaaatgtcagatcttgaagagtcctgtaattgctaggttgtttttggacaagttgaggctaaatgagaagtttatgcctatggatattcaggaatatatcaaagagcgttggaaaatggtgtctacaatcccacaatgccaaagaggtagacttcttgccctcaaaatgcttaagaaggagtatgaggaacaatttgctcatatccggggatatgttgaagaaattcattctcaaaacccagggtctgttgccttcattgatacatatcgaaatgaaaaaggtgaagatgtgttcaataggttttatgtatgttttaatatacttagaacacaatgggctggatcttgtagacctattataggactagatggtacatttttgaaagttgttgtgaaaggagttctattgactgcagttggtcacgatccaaacaatcaaatctatccaattgcttgggctgtggtacaatctgagaatgccgagaactggttgtggtttgtccagcaaataaaaaaggacttgaacctagaggatggcagtcggtttgtcattctatcagatcgctcaaaggtaagaatctcatctcattccctttgtatattggtatgtaacgaagttctcattatgtttttcaaattgtttaacagggtcttctgagtgctgttaaacaggaattgccaaatgctgaacatagaatgtgtgtgaagcatattgtagagaatctaaagaagaaccatgccaagaaggatatgctaaagacattagtctggaaattggcttggagttacaatgagaaggagtatgggaagaatctcaataacttgagatgctatgatgaagcattgtacaatgatgtcttgaatgaggaaccacatacttggtcaaggtgtttctataagctcggtagttgttgtgaggatgttgacaacaatgctaccgagtcattcaactcaaccatcaccaaagcaagagcgaagtcattaattccaatgctagaaacaataaggaggcaaggaatgactcggattgttaagaggaacaagaaatcattgcgccatgaaggtagatttactaaatatgctttaaagatgcttgcattagagaagacagatgcagatagaagtaaggtatatcgttgcacacatggcgtttttgaggtatatatagatgagaatggtcatagagtggatataccaaaaacacaatgttcatgtgggaagtggcaaataagtggtataccttgtgagcattcttatggtgctatgatagaggctggtttggatgctgagaattacatatccgagttcttctcgacagatctgtggagagacagctatgagacagccaccatgccattaaggggacctaagtattggttgaattctagttacgggttggtaaccgcaccaccagaacctattctgcctggaagaaagaaagaaaaatctaaaaaagagaagtttgcaaggatcaaagggaagaatgagtcgccaaagaagaaaaaaagaaagaaaaatgaagttgaaaagcttggaaaaaaaggtaaaatcatacattgcaagagctgtggtgaagctgggcataacgcattacgatgtaaaaaattccctaaagagaaggtaccgagaaagagaaagtcaaagaatgatggcaatgatgaggtatgtttctgttgtatagtatctttcttcacattctctgtatcttagtatctttacttgcttactcagattgaaaagaaggctaagaaggctaagaatgataagaaggatacaaatgagaaggactctaagaaggagaagaagtctaagaaggagactcacatgccggatacaatcttcatcacacaaccttctcaagcaacacaagagtagtttatatgttatgcttttcgagaaatggcatttgaatgtgttgtcatgttttttggagttactttaatgttaacaatattattgacgaattggatgtgttttggttctagactaatgatgatgttggttattttggactaattggcttgtctctgattcttactattatgatatccttctctttcattcagattttaattttttccgtgacaaaggttttataacagaacaacaatgctactaatgatgtgttttaagaagaaaatttgaagcctctttctcatacagtggcttcaatttgggttaatagattatggtaggattatcggtttaatcgaggctaattaattttaaaacgtgattttatgattttaaatcgcattttagcagcttgattaatgttggttaattacgtgggattatatatattaggtggaattgagaagaatttaagttgattagggggaaatagaaagaggctaagagtttgggtggaacccagttgaaacaatatatttgagggggcctccaataggtagccctaaataattaacaattataacacaattatataatcataaacactaaacaaaagaaacaatatttacaaaacaactataacttaacattcaaatagttagttacaaaaaaatcgaccaacggtgtatcgccgagtaaattttacattatatcatctaattgatcaaatttcaaacaaaaacaattaatttatatatacatcaaactaaataaaaatacacagattttccaaatatctttatattattcagaaaatcaaaacaaatctaacaatctatttactatgcaaaatataaatataatatcaataatataaattaatgaaaaatagctattatataataaataatactatatacttttctatacaccttataatttatacactacaatatctttcactaaaaatgtattctaatatatttcttaaaatatgaaaccccgcacgtatgtgcggatcagaatctagtataaatggaaaggagatacgaagcaaccaaaatcctactatattatttgggaagtacattttaaatgtaaccttaatttttgtaagtaattacataaatatgccattagaaaaaaaaattaaaagagtaaattaatttatctctttaaggattaaaaagtcaaatactaatttaattaattaaatttaattaaaaaacgaaataccttattaatttccaaaaataataaccaatcaaaatcaacatataagatttgatatctaaattttaattaatttaatttaattagaaaaacaaaatacattattaatttccaaaaaagtaaccaattaaaatcaacaaattatattttatatctaaattatcatattatttttttattaattattatagttcacttctcatctttatatgattctatttttgcggaaaataatatcatcattataaaagaaataattagagttatttcgcatatgccacaatttgaattcttaaaaacgaatataaactgttcaatacatgaaaaaatattataacgagtgaaaaatagatttaagaaaactttctactgagtaacgggtcataatttgaaatatttatattcaatttcatacatattatattgaaaatttataatcttatatactacaataattaataacatattagatgtgattcaatttttaatacaagctggaaaatcctagaattgacgggtttagatcgatattaatacaagatggaatactatatgcgaaactcttaaattaacaatcaaagtacaagtgtataatcttaaacactaaacaatatagataatatcaacaaaacatatacaactcacaattaactatacatttaaaatcaaataaaataatatcatatatttttaaatcatctttacaataaaagtttttagtttaactaaaatacaagcctacctgcggtatactgcaggttaatatctagattatagggcttattggatctaaagacgggtcatcaaagatttcctaaactgaagcaaaatatactgaatattcaaatatctatctgttaccaaattataaacaaataagtcaatttaatattttatatacaaaatcaattaaatcttaatcacatataaaattagcacaaaaaaaattattcaacaattaaaacattatcaaatctctgtgttatataagttttgatactatattcgaataatgtaatataccttttcaatttgtattctttaactaatttaagctaactaatatatttgttaatcttatacctatcaaaaccgactatcgttttttatctttatagtatttttgcaagacttttttggtggatttggataaaagtgcattcggatcatatggtacattcccctattaaataaatatggtgcacacctatgttattagcaaaaatgtttagaatataattcaaagtcatatcattaataaaattaatattaataaaataaattggtttttggcaagacgaatttggagggacgggtttttgaatcaacattaataaaaaataaaatataattaatccaccgtttcaatacgggttaaatctttaatttattattttttaagaccactaatattaaacatatcaaatcatcctaatttagaaaagattatataaaaccaaaaatgttatgtggtatgtataatgttactatatataaaattaaacaataaaatataaatgtattagagaatgatacaatttgcaaaacttttatatataaaaaataattcttaaaatttaaaaattactactttaaacaaaaaaatcacgggacgggtaaacaaattacagaacgggttttattttggaattgggttatatggtggatgtatttgaatcaatatttataaaattttaaaatattattaatatgctgttttaatagggattaaaacttcagttttttaacaattatctcatggattcgtggtatagctttacttaataacaattataaactgtaaaataaaaatattttataaaaataaaatttgcaagttttaatatatattacttttaaaaaataaatcgtaccgcggtataccgcaggttaaaatctagtcgtttagtagatttgagaaagcggatcatttttcaggaaactgtataatcgagactaactttgaatcatttgtttcaaacgcataacaatcaacttttttttattctttataacacaaagtaatgcttcttactccgagtgaaggggtgaggggcacctggaaaaacactttgcaccaagcagtaaagtataatcattttcttgaaaacactaccaacataggcccataattggatccatgaattttcatgaaccatcaatccaacatcttatattttgatttgaactatccaatttttctctaataaactaatagctctagattcaataggatccaattgagttttttcccacattgctacttcccacaattggactatccaaagctattaatagattttctatatttttttttattttttttgtcttttgaactatgagtgattagtttttcgaaaatgttttgaagaacgttaacaatctatttttatacctcttagattctctcggttccttaagtcatatttcaatatacccattaattatcagaagagaatctctgacaattaacattacacaatctatttattttattttgatttaaacaaaatgtttgtcaagtaaaacccattgttttcttaaacaaaaaggcaccctactagctccaacgatttatcatcattttccgttatttcaaaattaaaatgaatatgagaagtcaaatgtatttatttttagtaatgtttcacgtattttactaaatctgattatccaaacagaaatcatcatgataacagataatgaattaattctataaaaaaaaaaacagatagtcaaatgatcacaaaacattaaaatcgatgacaacaaactaataacctattcaacaataatctctaatctccaagattaaaggaacaagaataggacttcaaaatcaaagaaaaaacaaacaacgcaattcttatcttttctttttcctaacttcacttccatatataaaccccattcttctatcatcatctcaatcaagaaaacataaagctaattaacaataagaaaccaataaactctaacgctcttcaaagcaaaaaaaaacatcaataatgaagcaatctcttcttctatccttcgtgttactactactctcatcatcatcactcgtgacaccaatccatgcacgtaacaaatcaaatccggcaaagtctcctgttggtgctccagcaccaggaccatcaagttccgattgttctacagtaatatatagcatgatggattgtctcgggtaccttggtgtcggatcaaacgaaactaagccagagaaatcgtgttgtactggaatagaaactgttttacaatataacccacaatgtatttgtgctggtttggttagtgctggcgaaatgggaattgaactgaatagcacaagagctcttgcaacacctaaggcttgcaaactctccattgctcctcctcattgtggtgattttttatatttatttctattgtgtctcaatattaagtttttttttttttttgctttcttttgccttatatttttagggtttgaaagtaatattttctttccttgcaggtataataacttcaggcgctacgacaccaggtgcatctcctggtacgtgttgacttattttcatgttatggtcgtaattaagattgaaggcttttgtgttttgttccccttgaggattgtctctaggaaaatgattgaacaaatataagttgaaaacaaaatgagttaatagtttttgaatgttgaatcattttttcagttttttttttttaatttcaaatgagaaaaaaatttggtcagttagattttcaacccagttctgttcctccaaatgtgggtctttcatttactttttacaattgactaggtctgggcacgaagcggatatccggaaaaattgtgatatttgttattcgattcgttttaaccgaatacttgattttgtgatttgctttacttcgaaatttccagatatccaaaatttcgaatatccggaattatttgtgatatttgcgaatatccgctttgatacatttaaatattaaaaaaatctgtaaactatataaccatatcagatattcaaagtttttatttaacatgctttcaaaataagttctaaataccaaacataactattgttgatttgtggtacttctattaagtttcattttgttatcaattcatatcaattagaattttgaaatactataacacattgcatttgtgtcactcctttctgttttttgttaaataaatagtgttttcgtatgttacaagatataacgtatgaatgataaatatggatgcagtttccccatcggctggagcacctacgacttcaccatctgcagccaagtcaccggaaacttcggcaacttcgccatcttcggatgagacaccgtcaatgactgcaccttctccttcatcttctggcacaaacatcctctcagttcctgcactcaccattgttttcgttattgtttcttctgtcgcttacatttcggccttttctaattaaccacagcttttacttttattttctttgtttttgatctatgaattgaattctacattgttatggttgtgatttggaagacatgttatgtttttttgttgcttttaatcatgcaaccgtaatacaatgtgaaatatgcgctgggctgcttaatttgataagaatataagaaatgggacttattactttaaaaaatatctacaagatataaaattaaatattacaataactgtctttatattaaaagtatgaatgtaaagcttaattaaaatattggttaaacaacattaaacaaaaatggtttcgtgtatagaagaattgctctttatctatatataaaaaaacattcaagaattgtagtcctcggaaccgtttttcccaaaaatgaattccatcaaataaagaagatttactttgatgggtaacaaattaggtgttattaataaaacaagacaaaacttttttttaattattatgatatttttgtctttttttttaatacccagcgtgtctctactaaacgttactggaaaaaacataattatatagaatgccactgccacgtcaaaatttgctgacgtggattaaatgaactcagccgtaacgcgatacagcggcagttacgcctgagttacggtatattgcggctgacttacgacaaaaatctatgagtcataacaaaacggcgaagtatgagtagaactcagccagacgttacggctgagttgtaatataacccaggcaacggtatggttgagttaaagaatgttggtcgagttataaaaagttatacgataacccagacaacgttatggctgagttatgataaaacggctgacttatttccgcgacacggccgagttatatttttggacggcttagttatggaatgatgtgacggctaagttatggtcgagtgttataaatcagccgctaatagctggattacggtaaaactcagccttgttatggctgacttatttgcaaaagattaattactataatagcatgcagttacagccgagttgttaaacgttacggctgagttagtttagttacgacataccacgactgacttaactttgtttttctcctgttttaattactgtaatagtattcatgttgcgactgacttatagatttgcttgatggttgtgttatgaactgttcgtttggtggcttacttgccacctcatcacttcaaaacgacgtaggctgtaattttccatgtcatcattccatgtcagcatcctcaacggaaatacgaaacgtcccttgcttctttaactcgtcttcccagactgtgtttaacgcctgaacgttacaacttcttcattcatcttctcatacatcttcaatttctttcatctttctctcgatatggctgatcccgttacggtcatagttgtttccggttcgtgggttaagaaacagagattcgtatttaaccccgacgaaagagggtgtagagttgtgcagctagaagcagaaagagcaacgcacgacagtcttttgaagctggtggtcgatgattacggtttgtatcagtcgacccatcagttaaggctgagttacatgttctctaacaagactctgaaaaatatgtcgtttgatactccaacagtttatatctctaatgatcgacaattgcaatgttatctaggtttgacaaaattcgagcagctacgtctctgtgtggagtttacggctgaagattcaagtgatattagtcggaaggacggatcaagaggaaggggttcgaaacgccctatcgaatctgactcaagagcagaatctacattcaaagttccgggtggggggtttgaaggcgtctgttacgattatcaagacgatgaagtaggggacgatgaatcaggtgatgatgaagaatgggacgatgaatcaggtgtcgatgaagcatctgacaaagaagcaggtgacgaagaagaagatgatgaattttctagccggtttgatgttttcgacgactccgatggtgcctcatctgatgatgaggactttgctgtatacggcgagcctaagaataaagacgaagattcaccgaaacttactcctacgaagagaactaagaccatggaaatgatcggatctactgggagcctgactgatttaaagttggagctgtctacgctaacactcgcggtaggccaacaataccgtagcaaatttgagttggagtatcgactcaaacttcttgcgataagggatggatttgattttgatgtaccaacttctaataagactacagtatattacgagtgctgggtggatagatgtcgttggagagttcgtgcatctagacaaggggataatcctaatttttatgtttatatatacgatacggaacacacatgttctgtgacggaacgttctgatcgatcccgacaaacaacaccttttgttctgggagttctttacagggactatcttggtgacgttggtccgaatgttaaaccaaaaacagtcggaataatcatcactaagcatttttgagtaaaggtaattacaatgtttcggctgacttattttttatttgttggcggacttatacatattttacggttgacttattgatatagtatggctgacatataattacatttcggttgagttatgaccctttaaaggctgacttaagatcactttgtggctgagttgtggtatagtttgactgcgttgtaaatatattatggttgacttatcgattaatatgtctgtgttaacagatgagttattcaaagtcatacaagacgctgaggtttgcaagggagctcactctggggacccatgatagtagttttgaagaactgccttcttacctatacatgataagacgggcaaatccgggtacagtcgcgcgtcttcaaattgatgagagtagaagattcaactatatgttcattgcatttggtgccagtatcgctgggtttcattacatgcgcagagttgttgttgtcgacggtacgtttctccatggtagttacaaagggacgctcttgacagccctagctcatgatggtaattttcagattttttcgttagctttcggtgtagttgacactgaaaatgatgaatcttggcgttggtttttttacgcaactcaaagttattattcctgacgcaacggacctggcaataatatcggacagataagtcaatagggaaagcaattggtgaagtgtatccgttggctgctcgtgggatttgtacttaccatctgtataagaacattttgctaaaattcaaaggaaaagatttgttccctctggtgaaaaaagcggcaaggtgttataggctaaatgattttgataacgcgttcaacaagattgaagagcgtgatcttctactacatgcatacctccaaagagcgggtgttgaaatgtgggcgcgtgctcatttctccggtgatagatacaatttaatgactacgaatatagcggaatcaatgaacagattactgtcaaaagccagaaatcttcccatagtttgactgttagaagcgataagacagatgatgacaagatggtttgctgaacgaagagatgatgcaagcaaacagcatactcagctcacacgtggtgttgagaaactgttacaggtaactcagctgtaactagtgcataactcagtcgtcaaataatgataacccagtcataatgagaataactcagccataacgtatttgttttgtttcttgtttcttctcactaatagacccatgtcacctcgtcaagacttctggatgtacaaacgattgatgcttcccgcgttcaagtagcttatggagcatctttgcatgttgtaaatgtggatgaaaaaaatgccacatgccgtcttttcgagaaagagaaattaccatgcatccatgcaatcctagctgcagagcatatgggtgtgtctcgtatatccatgtgcagtccttactataagagcagtcatttggtcaatgcgtatgctggtgcaatcatgccttcagatacggaagtccctgttcctcaatttgtaattgaccaaccgtgcttgcctctgattgttgtgaaccagccaggcaggcccaagaaactaaggatgaaatcaacactagaagtcgccgttgagactaaacgccctaggaaggaacacacatgttctcgatgtaaaaaagttgggcacaatgttaaaacttgatgtgcatagtactgtttgtactctatatgtttcttcttttccttgtttggcaaccgtgatatgtatttcgtgacattgtagactctaagcaccgtaatatttgcaatttctttaacgtcccgactgagttatttgcaaaaatattctggccgttttacatgttacggctgagttatttaaatagggaagtcaaaaggttcggtcattcggtgatgttacggctgagttatataaatatggaagttgaaaggttcggtcattttacatgttatggccgagttatataattagggaagtcgaaaggttcggtcattttacatgttacgtccgagttataaaactacggcagtcgaaaggtgagttcattttacatgttacggctgaattacttacgactgagttatattcgtattatgttacttagcggctaagttattcaattataatacggctgagttatgaaactgaattttgaaggcaaacacaaaatgaaattcccagaaatatttgtttgaaggatacataggaggatatgaaaagtaaacaatggtaataacccgattccttccatcttgcattactcgaggaccatttttaactcttgcagttcttcgatattgggatcgacagtcacatctgatatatctgcataattttggatcttcacatgtttggggtcagtatgatacctaaagatcttccaccatgtgagtgcaataaaaatattgtcaataacaatactgtcattgcgaaaagatcgaaatttgctatgcaagtcaacggccatttggccaaaagcctcacatttcaacctctccttgctgaaacatataaaacagttttataattatacccctctcaggaaaaatatatgatgaaaagaaagaaatttagaagtaattgataaaaaaaaattgtactatttgtacataatctcgaaggtaagtgtgaatctgtaatcttgaaaccattttctgtaatatttgtcagacatccgacatcgacgagtgcaccaaccaaatatgggagtatgaaataaagattaaaaacaggcatgtgatttgtgaaagtatgaaatctgcattagatacgtattacttacctaccaaattttcagtatgagcggtgtcttcaataatgttgtcaaaatgtgtgaatctgttaaataatacagtttcccttgggtcggaatgagttatctcagttgcattcatgaactcaatcatgtatttgtgggttgttgacagacaaaaccacagttttcaatgacaccaaaagttctgctttctttccactgattctctttgagcatgtcgaagtaacgttgagaaaaacgacttccgattatagcttcaatttggattccctatgaaaacaacattggaggatgagttatatagggaataagataagaacaaggttaagtacgacttgtatcattagtgaagattccattacccactcatcgacaaagacgacccgtagttcgaatgagttatctgtgaaaaatgatctgtacgttctaagaaccataacacaaatcatccagcaagttatgcaaggattcaagtcgcggaggccgtcgtaacccatggtgaaattccgagtcgttgaaaagtaaagaaatattttgaactcgtgaacttttgtttgtgagagtttaggctttgggagtttatgggagaagccgtttttataggcgtattaaactggtgttaattgggccagatataaccgtaaatcggttagtcagtaaatcgaattgaacgtcatactttattgacaactcagccgtaatgtggtttaacccagccgtaacagtacaatttgccgccaaacacagccgtaacctatacactttcccgccaaacacgcaaccttttgtattcctttacctgtctttttttaatatttcttgacaactcagccataacattgttacatgtcttgagtgtaactcagccgtaacaatatattttgccgccaaactcagccgtagcacggaaaattttcccgccaaacacaaaacctttcgtattcctttacctgtctttttttaataattcttgacaactcagccgtaacattgttacatgtcttgagtgtaactcagccgtaacaatatattttgccgccaaactcagccgtaacacggaaatttttccggccaaacgaacagacacggaacctttcgcattcctctacctgtcttttcttttctatatatcagttacttgaactcatcatttacacgtctcatcctcacttcctaacgacatggttcctcacattgacggacagtttatcagagatgtcgaagccgtgctcaccgctcctgatcgggcgaatctcccagttttaaaccctggattgggtacatgggttgacaaaaccattgttacgtggttcacattcaatcaccaactatttgtcgcgattgcagatatactccaacgcaactttcaccatgcgtggccgacgtaccggatgattcctgttgttttcaaggcaagatgtttttttctcctcacggtaagcatcgagtttttatataaagcacttcctgtaaaccgtagactaaattcttactatttgctctctttgtagtgtatgtaaacctgagattcaaggcacacactaacggtgtggacgcagtttaatttgttggctagaacgttgtaccgggacaatatgcgggcgctgaaacggggatgagcgcgtggtttagataagtcgtggtggatgacgacaacagtttggaatgatttggtggacatgattactgaatttggcccagatgatgtcggtttcatgtgttgaatgcttttgtgtctcttacttctcttccctttatctcattcctatgaactcagtatattactctcttcttttttttggtaatggctttatatctcctattatctacgatcgccttctcagtaaagtcagttgttatcgcttgaggtcacttgttaaattttatcataattcaggcctaactcaaaattaactcatccatatcaattgattaactcagccacaacattataataactcagtcgtatcaatagattaacgccttctcagtaaagtcagttgttatcgcttgaggtcacttgttaaattttatcataattcaggcgtaactcaaaattaactcagccatataaattgattaactcagtcacaccattataataactcagtcgtatcaatagattaacgcagacacaacaaagaataactcagtcatagcgttttattaactcagtcacaacattaccagtataactcagtcaacgcgttgtaaaaatctcagctataatattagcttaactcagcaataacattatattaactcagccacaacattggattagcttgaccgaacacaaagttccatttcattgcaagctaatatttgaaccaaaaaaacgaattaaccctagacgctgagataaacatcaatgacataatggattccaaaagcaaacaattcatccaaacatcaaacaaactagtagccaagaagaagcctctgttccttggtttttgggaacattaagataccaagtacaatgacaatgataataaagccaagacaaaagcagcaaagtttgatcatcaatttccatttctggttttccctttcgctcctcatcacttcttccttcagttctttcaccatcacctgtaacgcttctagctcgacagcaacctcggacttggctgcgtttatctcactgtccatggcggacaattttggccaactgtctacgaccatttcgtatgtaccatcttcaatccatttaaacaaatggtcctgcatattcaatcacaaatcaattaacaacgaaaccaataaaatcctcaaatcaattacatctttacgcgtaggacaacggaagtatggtcttccacggttctttgctggcgtcgatgtatagatgaccacgtctaatccgcaatgacacttcgatggtaaccgacgtcccaaacggctgacggattgtgtactcgcaatcgaattctcagaattgctactcatttctttaatttttagttgggaaattcggagacgaaaagcaagaaggaatgcagctccagatctgaaatcagaaattggaattttaaaacttagggtttgattttggggatttataagtgtgttcgtgttcatttggtttttgtcacaacgacgtcatatctggtaaataacagagactctggaacaaaccgacgtcgtatctggtcaataacagagactatttttctctgtattctgacctaactcagctacatcacaggcataactcagccatcactttgttataactcggccaaaccctgaaattgcttttcttaaaccatcagttgggacaatcaagtaactaacatatcataatcacattccaactagtggaatcatgaaactagctcattttttatatacttcatccaacatcctactttatccaacaacatactctatccaacaaaagggaagtcgcaacaacatcagtcgtagaagtttggtcaacatagtttatcaatcgacacttagtgcattgtgtctttattttctgtttggatataatagattttaaattttgacacaaaattgttacaatttgatggctagtttgaaatctgataataacacttggtttctcataaatcggccatatcacgaaatcttctgcaataactcagttgtaacgtattggtattctaccgccaaacagaacatttatatttgagggtttagttattcgaatcaattcaaactcgtttgaattattatcttttgacgtgttcgtgtgaatatgaaaccaatcattattggcggtccccataaaaacacttttttaatctcgacaataacataataattgtttcttgataaactcagcaaaaagcaaaactcagcaatattctattctacctgagtaagggacatcaatagaaccaacaataatgcttgtatacaaatctcataataacatttggttttctcataagtagttcgaacatcgaaatcttctgacataactcagccacaactcaggaataactcagccatataactgttataactcggccaaaccctgaaagtgcttttcttgagccaacagttggtagaatcaagtaatttacatatcataaccacattccaaatagtggaatcgtgaaactagctcatatcctataaactttatccaacatcctactttatccaacatcatactctatccaacaacatcattcttagaagttttgccaacatagtttgtcaatcgacacttactgaaaataaaagttattttctgttttcaaattacacatcttcacgctactaatataaccaacaatttgatggctggtttaaaatgtcataataacatatggtttctcataactcggtcaaaccacgaaattttttggcatagctcagccgtaacgttataatattctaccgcaaaacagaaaatttgattatttgagggtttagttattcgaataatttcgaacacgttcgaattattttgaatattaactgctggcttgtgttcctgtgcatgtggacccaatcattactggcggttccccataaagatgctgtttgttatgtcgataatgatataataaagaattttgataaacccaacctaaagcaacacgctaagtaataacatattgtatcccgacataactcagccacaactcagtgaaaacccagccgcaatgcttttataactcaaccacttctaaatttattcagccaatacaagaagccgtcgtttgattagtgctttttgtagcagacacgactatatagaatcagtgctttagtaccatactaattgcagccaagatgatggctcaagggtctcttttccacggtgactctagtgtcgatgaggtatttatcttcacatctgaatagtacaaatcgttacccatctaacgtggagtatatcgtgtttgtgttaatgtaggagctcgatcgtatggaaataaggatgcgaacgaggtacgacgaaaacaggaggcgcgataagggcgttccgatcgagtgtgattgcaatgctaaggttgtcgttgccacttctcgtgatcctgttacaaccggaaaactttttttcagttgtccgtatgaaatatcagatgtaaacatcttttgttgagttatggttctttattttatttcttttattttgtatccctatgaatcaaacgtttggtcctctaacgacgtttgggttcttgactattcagttgtcgtaaaccggtgtatgtatagtcctacagtgacgtttggtttctttgatgggatggaagtttgggtttgacaagtcaaccaccacgttagaataactcagccatcacacgatttgtgtgatgacaagtcagccaccgcattagaataactcagctaaacatcgaattaaacaacgataactcagctgtgacggtatcataactcagtcgtagcacgatttgagcgataacaagtcagcccttacgttagcatagctcagccgtaaaacgtatcgagcgatgataagtcagccattacattggtttttgttataattaacataataatagattcatacagacataattctggttatcaatcctaaagtgtaaatatttagtacaatcacatgctaaaattcccaaaagatacagacatgttcgaaaaagcaaatcactgctcaaaaaactgaaggggcattcttacaggtagttcatcgaagatctctgctgccatcttaacccgtagaccctggatatttgaattagtaatgccatcaaaacaaacaccaagcaataaacagtcaagaatctttaacgtgtaaacgccgcagtccccggtgataatattttgctggacctttgtcatgtgcctccgccggaatgaaaattggtcgtattgcgggatacaaacttcgggaggaagaatttcactcatcatctgtggaatcatcctcgtgaacggcctacaagcttccaggatttttccatcgctaatcggagtatgctctccgacgatgcaatcatagcaatcgatgtgagacctaggcaagttcacgtgaagggtcacccaatgattacctccggtttggtggacaagaaacaagtgatccacatctgttattcacttcttatttgttgggtcttctccagccgtaccgttcatccaaccttcatacggggtatctctgaaagaaaccctcttcggtttcatcttccactgtttgtaatcattaacccacattgtcgtgaaccacgggtctagaatcatgacgcgttcgctgtggtatggggtgggatctcgcaagagcctctgggcgaggactttcatatacgcaccaatatgctgtacaaaaataaaactaagacaaaacacaacattaactcagccgtaaccaagtaaaactcagccttaacacctaaataaatcagccattatctcctttaacttaggcagaacgacacgataactcagccataacgttagacaaactgagacagaatataacaataacttacatcataaatcagccattatctactttaactcagacagaacgacacgataactcagctataacattagacaaattcagacagaatataacaataacttacatcatcacccagccatccatgtttggggtctgcccagttctttctttcggccatgataacaaagtagaaatgcacctcgtctatcccactttccaaccattttttgctaacaaatagtaaagaaagttaatataaacaaatagtgtaaacatgtcgtatttaacaacttattaaggtataaagggccataccagtcgggacttgacaaataagccttaagattctgtagtttggccggatcaaccggtgccagaggatcatagattgctcgtgaaggcagacaacccttcctcatgcagctcagcccgttgtctccaatgactggaaaactgttagtggtcattagatcgggtttaatcaatgacctcccatccggggctagcttaacagtttttatcctcccatcttttactctctgcagcctctcggtttcctcctcatcttcatcagactcagaaaccatttgattatactcagatacaacctgatcagtgacatcaagtatagaatcatgtccttggcttcctcaaatttttccttagcttcctcagatgattttgggtttttaattgtaatctttggcacctttggaggcacctttttaggctcctttgcagcagcctttcttcttcttctctctggcggtttctcgattagctcatttaatgttttctactttttctgctttggtggtggcttcgctttggatattttccccgctgccgtcgtagagcgtaaacggcggttgagaggagaagtctcaatgaaatcattatcagacacgatggaggccttagcaaattctccttcaagattcctacttaccccaacctcagcaatatcagcatcattctctaccattacagcttgtttcgactgcataaacgtaacgaaaactcaggcgttaaataacgaaaactcatacctatgtataaatataactcagtcataactaactaaaaattataactcagccgtataatatgaagataactcagccataactaactaaactcagccatataatatgaagataactcagccatatctaactaacatttataactcagccgtgtaatatgaagataactcagctataactaactaaaatttataactcagccgtataatattcaaataactcaaccataactaactaaaatttataactcagccgtataatattcagataactcagccataactaactaaaatttataactcagccgtataatatgaagataactcagtcataactaactaaaagtttaccgacggaggactagtagcagattggttatttgtaggtttctttggaccgtctggtgtctgttgagttcggggcttaaggtagccttgctgtgttttgggtaaaaacatatctctaatataactagtagagtttaattctgagtcagctatgccctttagatgctctttaatttgtttgacatcgttctcaatagatgcaaaccttctttcaaactttgcttcaaccttcgattctacttgaactccaatcacatccagacgggaggacatatctttgatgctattatcaacggtgtcaaaccttgagtttaagggagagatcaagttggacaccacatccacgagcggctgctgttctccctgaacatcctgctcgtcctcgtcctcatcagattcgacagctacttccttcttcttattcttcttcttcttcttcttttgtgcatttttctcacgagaatgaacaccctcactgtgagagactttctgcttctttgtgggagattcagacacatccgtttctttatcttttaagagtttcttctttttctcactcgtcttcacatctcaataacctttaacaagcttaagctcatgtaagtcttggatcaagttatcgagtgttgggtcttctaattggtctggccaagaatgaaacagctcgcttaactcagccttttcaaccattttacgaacacgcagctacaacacaagagataataaaacccatcagtatgtttaactcagccatcacttaacataactcagccattatagaacataactcagccgtcacctaacataactcagccattatagaacataactcagtcgtcacataacatatttgccaaaacaagaaaacataactcagccttcacagatcataactcagtcgtcacgtaacatacttgacaaaaaaacaaaacattaactcagtgataaaagagcacaactcagccgtaacataaatatttgataaaaaacagaacataactcagtcaatgactatcataacagagccgaaaacgtacctcaccaccattcactttgatatcttcagcaatggtcgattctattgttgcaggggtacggttgccaccccatctaagcaacggaatctcatccgcttttagaacattcccaaaacgctcgccgatggtgatgattgaatcatacgcccaagcctgcaacacgaaagccataccactgacggtgtacgtcttgccaataggcctcggcaactttatagaaacgacaagggcttcaaatgctgcccaaccccatgaataagtcttcatggcttcgtcatcgaaaactcttttggcactctcaaatggtatcctagagttagtatgcaagccataaagtccaatggatagaagagtcaataacccaaaccatctacgcttttcaggaggccatgctctacacattactaagccttgcctaagttcatctagaataggaccttcaccggttggcacacgcaattccctgaagaacgttttgtagtcagcttcaggctcaaacttttatgtaggtagttgatctgtatttaaacccgtgatatgttaaaattcgttcaatccaaactggatgggttgaccagccacgatacatcaaagctccttcttcagtattctcagctgtctgcatagtagataatgtacagtcttaccagaccatacaaaatgactatcaacaagcttagcaattaatccaagcggtgtctctttcagttcttcccatatatcttttcctattgattctctaattgcagggaaatctcccagctttatgttgtgattaatgcctttactctccagattagaatcctcctctgggtaaagtcttggagggtaatcccttgcttggtcttcagacatctgtataaccataaatcagccgtaagcattcaataactcagccataacataaaacaaactcatctacaaataccataactcaggcaaaacataaacctaactcagccatagataacataactcagtcataacataaacctatctcagccacacataacataactcagccataacataaatctaactcagctatatattaacagaaactcagtcaaaccataacataacaacaactcagtcaaaacataaacaaactcaaccatatcataacagaaactcagccataacataaacaaactcagccgtcatataacagaaactcagccatcgatgtaaggttaaaccataactcaatcacagcataaaacaaactcagacacagatgaattgataaatcataaatcagtcagcaaacaaacagtaactcagccgtcaaatcaaatagatctaacaaatcagccaccatatgtcaatcaacgacgaccttaaaaaccatcgttaagcaacggaaaacgatttcagtgacgggaatcacttgcgattgaacttagatgtcggattcttgtcggaaaattcgaaataaagtttggaatcatacttaccggaacttagccagaaaccacaaatgcgactccagatgtcggatgtgacttcgcgaaaccagaaattagactccggcgtatgattttcggtcagaacagacgagaacagcgaaaactgcgacggaatagggtgaagagttcgttccctatcgagagagaaagaaagagagagtttttttttccgccgatgaacagtaagaaaccgaaacgtttgtgcattttggagttgattaatgacgtggattatattaatgacatggattgatgacatgtataatcactgttttttcatttaattttagttaaaacgaattaaataataataattaattataactaatcaggaatgttaattgtaattacacaactactgaaaacatgtgagtaataaaaaaaaaatgtattctgtttctttttttttttttttttttaattcataattttccattcaactaaaaacatataatgacaaaagcccaaataaaaaccacaggcccaagacaggagaacaaacctgctcctgcaagaaacaaaagggaagacgaaacctgcaacactggaaaaccaaaacaaacatccctgaactagaaaagagaaaaccaagttcctagcaaggacagagcgttagggagatgcgccgtgctgcgagacaaaggatccagacgagcgcgaatggtgagctggatgtccttcaagatagactcagtagagcgagagacgccggagtggagacgttggtttctttctctccaaattgcataaacacaagcctgaaaggcaagcctgataatgagacaaatatttttatcccttgagggagataaaagccagataagacagtccattaactgggcaggaggattaaggttggttgaggctgtaaaaaacctccaattgtgttctattctagaaataaacatataattgtgttctatcttaggaattatttctaaaataaattatgcatcctgaaatcgttttctaactttgatagcatatcgtgcgtagcatgaaacgaccaaatactgaaacacatacactaacaatttgatggaaatttacaggtacccatttctccactatttttggagttatgcatgtataatacatctttattactttataatctttgatacatgaatgaagttcacctttttgaaaaaaagattgtgacttattttataatcagtactgctgtgctggctggaccggcccaaagactaatcatgtctaaagcccaataaaatttgatgtccatttacaatcaataaacatagaaaatagttaatgttttcggttgccaaggatcgaaccatccaccgtctacctataagacgtttctgtaaatattgttctctttaaaattgatataaaatttgctgcctaaaacatttgcttgctgagctttaggtctggaccaaccctgagtattggaaaggcaaatgaaaaattcgaagaccaccgtccgtaaatcatcgtctaggctctagttcgagtaaccattaaattttgagcaagccaaatttgacattagtttagagaatttcaaaatttttaacgtgagttaacgcgtttcaaatgagatggttcactgttttaaaactcgtaactaaaataatcggtgccttagactgaaacctatttcgttcatgctagctagattgtgtacataatcgtttgtgttaccaatttaaaaaatgattctgaggaatagtaggaaaacatgttggtgccccggcccaacttgttcgtgtacttgagtcattgagtactttaatttctaatgttcacttatgttttcatcacgtagatagaaacgttaatcagaaaattttgtgactttctattagtaggcctaattattagttagttgtagtataatattattgtttagttggtcatagctatggttaacgtttggttaatcaatcttattaatgtcaatcttatgccagagaacaatgatggatgtatataccctcctaagcggctttatgaacagtatctagctgtcagctagtcactcaaatcttaatctatttttaaaaatgccaattagtaaattaaaaatatgattaactatttaggttgatgcagataatatctgatatgttatatagattgatatgagactcttgtgttgaccttctcttggtttcttagtttttctttttgtttttatacaacaattggattgacaaattccaacctatcatcaatccctataatgcatgataacacgatttattggagtcgaatcatatacatgaaagttggccaactctctccatattaatgacacattattacagtagagagagccacatattattctaaatttaaattatttaaaaattaataaaagttagtgatgaaaaattaaaattctcacattgcattaaaccatacatcaatcccactcttaatgggaatttaatgaaaaaaaccctcaattttggccagatccatttttaaaccctaaactatgtttttagtaaaacaaatcctgaactaaaacctgttaataaacttaagaattaaatattaatgggatattaatttccaaaaaaaaaaacaatgagacatttgtatttagcgcaaaaaccacatgatgttctttaaaactgttttgaatttattacaaaaaaatgttctaaatgattttgaattgcttaattagtttggattttagaagctgaaagaaagacacaacaacttaaaataatccaaagagtcatgcttaaataaatccaaccaacataactatcgaagctgttgcaacacaacaatatttgtcacaaaaaaaaacaatcgtttcagagggacaaaatattctaaagtaaagacttgtcaagcattaactttgaagagaagattgtattggctgagtgatagggttctcttcatccattgttttctgttttttccttggtcgtctttgaggtttcttgggtggttttggcactgctttacgcttgcatgaacgtttgttgtgtccgacttgttgacagttgctgcaagtctaaatatgcaaagattaaattaaataatttgaaaaggaagatcttgtgaaacataattcattgttctctattttaccatttgaactttttcacgtgtataaggaactttttgaggtggacgatcttcagttggatcacggattctgtcattgttctttggtcgatttttggaaattaatatcccattaatatttaattactgtggggttaagtttattaacaggttttagttcagggtttgttttactaaaaacatagttcaggatttaaaaatggatctggccaaagttgagggtttttttcattaaattcccactcttaattaactatcttcaaaataaaagaaaaaaatacaaatcatatgaatgtataaaacactacttttcttctactttttctattttgctattcttttatagtcattacccggtatttgtagcttagttgcttggtagttaaccttttttagtttagtattttaacttagtcttttcttattattacatttttttggtgtacatgatatatgatttcttttttgtgccttatgataaaccgataacattaataatgacatacacgtttttcaagtaaggttttttgagatcttagatataccaaagaattcaatacaagacactttctccaacatgggtatatgcaaatgcaaagagagatacctaaaagtgttgacttaaatgactctttaattattattatttttctcttccttatgaaacttttgaagtaaatgagtagttagttatacctttgttattcaaattattacaattcaatatttagtcatgagcttatcatgatgtgatcagagtactagattaggagaatacatggaacaaggaatagtttgcttataatcaagttagacaagtttcaaaccacataaataacataattgcatactattgtattatatattgttgttgtaagtatttcatgatagttaaaaaagaatagaaacttgaatatatagataagaagatttatacatgaaaagtataatcgattttttaatcgaaggtaaatttaactataaaaagtattattatagaaaatgaatataaatttatcaactacataataacatacacaaatataaacataaactagtaataaaatagttagaatataattattttaaaaccattttcaaaataacaactcatgcgtagcgtgggtacactcctagttccagtaaaagaagctgtagaaatagacaattaattagccatttgattataggcactttcccgatgtgttaagtatagtttagagcatctccatcaatgagaaacccaaatagtttctcaaacaaaaaaaaaaataatattttattataatttgattttatgattaaattttattttaattaaaaaattaaaccaatggtaagaagaaaaatatcatgatgagttgtagagagtatctcaaagttttctacactctctctttcattttaataattttttatttttaattgtgagaaaatctcaatggagatggtcttaatactataacatagttggcttaaccatccataataattataaactcttttagaaatttttggaatattcagaccagtggcggatccatgaaaacaatttatgtagggcacaataacatatgattaatgatatttgatttacataataatcatattaagaactattttataatattaaattaattatacattgtcacccttaatatatttttaaattgacatcgccaaacacactatttttaattagaaagatgcatagttagaagtacaactcactacaaaaatgtaacttatatatatatatatatatatatatatatatatataatattatttatatttacttgaaactttaaatattaaattgactagaacatgatatagcattgtttactaattccctagtttttattatcatttttaattaaaatgtaggtatactttacaatagttatgacttcaaatttgttaaagttaaactagaattacaaaaataaaaatagaactgaaaaagaatacttttatttttgtttattttcagcagaacatagttttactttaaaaaacgataacaatgaataagaaaaatgcatctaattacatgaagacgctaaacaagaatgtggaaaacaaatataaaataaagagaataaaagccaaaaacattgtacacaggggtatcgaacactgcatctaagatgtggcatagggcacttattgctaaatgatgtaaaagatataaccaatcaattgttactagctaaagtttaagaagtagtatggggaacgtgccctatctcatgctaatgtagatccgcccctgattcagacacaaggattccaagtcatatagatcaaatcaagaatcaaactaaatttcaaatagatatcaagttgaattattatttttatagttagattatggaaactgatgtaaaattcaaatgttatatgaagaaaatgaaaggtagttagaaaaggtgatgccagtaaattttcacacttggtgtcagtatggattagttactcaatttcatttgatgacatcttttcctgaaaagaatctcttgatttgttacaattaagctatcattgaattacactggcaaatttgaattttttatttggactagcctatcattttatcatagttgttgccaatcttatgtgtattaatatacaagatttgttttgaagttagataatccttgtacaattttattatggtatgcatcccatcctaatttgtgcatccccagcttcgacttgcagaagataagtgtgaagaatcagatgctagagctaagcaacttgagaaacaggtatgcaggtggttcatgcctcagtatatcatacaaatctcttcttacgtactgtttatattgtttcattacctcgagattttatcacatttgtaaactcaaaaccgatttttattaggttgaaatccttggagaaggtgttactatgaacgcacgtctttaaagcaggtaagcttccgttctatttaaattctggataacctttgacaaaaatttaattctgtgaatgtgtttcttgcttcagagagaggttagtgtcttatcatttatctacatggtctcatacattatttttttattataaagttccatgaggctttatgattctagtttagatcttggcctataaaaaagtagcataatccatagaaccaaattcttttcaggctgctttgagagttgcatcacaaaatcatggaggaaggagggtagatgttttggctcttcacacagaagctgaggtacttcaagttttgatatgttgttgttcttacgggtatttgtactaacaccttagatcttggaatcgttttagattgctagggaggaggcaacatcttcgttagagcacctttataaagttgaattcgagcttaactctcttaagaccgtgactaatagattgatattgactcgagaggagtatttttaaaggttcatactttttgtttccatctagtgtattttttaaatcgatagtttctcatctggagctctctttaggaagagattgttctgaagaggtgctggcttttacgttattggggcttatgcgttagacatggttgtacattgctttcttacacattataatctataaatatataaactttgataatgtattccgtctatttttgagacatgacaaaaaaatgcctcatgatcctttatacagagcaaatacttcaaaaatgtctcttaaataatcatctaataacagacctctgcttctaaaaaaggatagagtcgacaaaaagagttcacatgttaagatttttttacctttagtgaagacagctcccgcaaaccttttaagaacaataatctctacattactctaagtcattcattacatgataaaaagaaacacatcaattatctgatctagtttcaatccttctttttctcagcctggagcttactcttaaacttctctgctttcttctgagaggctctctcagccctctctgcatctctctctgccttctttacagctctcttggctacagacaagaataactaattcagtaaatatacaagtattaaattgtatgtattgattccatgagtaatgtagctttgttgtttggttaagactttccatttcgttccacacaaagtgattgttgaggaattaccaatctctgataatgatgtagaatccatgtatccaagatgatgaggttggaaatgctgagatgaatcaattgcaccaactattgaacataaactgttaatatcaatgtcagaagaaatctgtagaaccattatcctaaaaaaaatggtattgccaacactgtatttatcaaaaggttcagaaaaaatgattcaaagtaggttcaaatgttagagattacttacttgtaaattttgcagaaacgtagtgtcatttcacaaattgatgaccgactaacaataacttttacattggaaaaagcaatatctttaaccaaagtctcaagcatggcttcctttgactttccaaagttatgtacctagaagactagaacccaaaataaaggagaaaaatagtcaacaattaaaaacacaaccatccttgagaaagacagttacaaaggatgccatgttatgcaagatttgttcaacctggtctcacctttgcatttttcaaaggatgcctaatgttacctacatcgtcacttttaaagacgataccacagacaacgcaagatttgcgagagtctactcccaatatcttggcaacatggacatcatcaatgttcatggtcattgcattcgttaggacttaagagcatacctgtaaacagatgaaccattctattgcaataacactgaagaaatgagaaataataaaaaaaatcttacatgaataaaatacctcaagtactaaagaatttaaacttttttggttaaactgcttgctagttatcatcctcattcgggaaagaaaagtctcttgcacaaccatagtctctcagatatcttaacttgttcttgaagtatctcaagagcctaccgaacaaaaaaacaaatatgatatttatgttttaactctagaaataataaatagtaataaggacgcatcattcaccttttccaaggattttgtatatcccgaaatgttatcagtctcatctctttcaaagaatctttatggttgagaattgatctagcaaaaggaatggctaaatcatctctttcatctttctgctgcttagaggctatttcggatatgataaaaagctcatctatcttattaaggattgatgttgccaagcataaaaacaacacagagataagttacacttacgtattacaaagagagcaaaagttagagatatcaagtaataaatgaaaaaatatgtattgcctaataagtaattaataatttaataagaaataaaaactatatgaaaaatattttttatcatacaacatatgctataatcactgatcataagtcataactagaaatataaatttctatatgccgttgtggtagacgaaacaattacgagctaactatcaaatcaaataatatatctcttagttacttgattttcctttttctattttacaaaccgtgagaaaactttaaaaactgtacctaaaccataaacaaaaagatgataatgctattataattggaaaagggtactttggataattattacacaatcgtgggatgaaaactataaaataaataaatttaggtactatcgataacaataataaattattggggatgaaagtataaataattaaagaagaaactgttctcaatccgaccgttgaaagccactcgcaatttctggctaaatgaccgaagatcagtcagagagagaaatatgtgctgccataaatggcaaatttattcattgctttttcttttgaaacattctttgagatttctgttgaatctaattttgtaaggttctgtttaattcacgcatttaattctttttccatttttctggatttcacttttctgtgatttccaaaattttgacaaatttggtaactatttttttaattcaatgtgtggaatttttagttccaatcaaactgccattgatgtgaatgtgatgatgaaaatcaatgtgcttaatttttgtagttgacgatgagaaacacgagacctattcatgttaggaataagagtacggaaccaggaacaccatcttcgcctatgatgacgtctcctctaatgcatcgtcatacacgttcaggatcaaatgctgggccagcttcgaatgctaagaaagctcagacaaaagcagctgctcagagacttgcggctgtgatgtcaaatcaaacaggggacgaggaagatagtgatgaagacctttcctttgactataatgctatcggaacagggagcattggactcgcagctggaagatctcatccttctcgctctcctgtggtaattaaaattaacagactcactttttcactgtaatgagggttttgcaatgtagggattttatgtgatagtgttttctggactgacagattaggaatcctatggcaaggcgtcaacagatggcaactccacagttagttgatgaggacaatgaggatgatgatttttcagtggatgtaacgagcagtagaccaagtattggacttcctggtggaagagcaatgagacctcagtctcctgtgatggtcagtctagttttaagttcttttgcctgccaagtgtatcttggtttcagctttcatatgttgttactcttttggtgcagactaagattgcacctccgagacgtacacaaccaacaaacgaaggaaataagaatgacggtaatgatgatgatgatgttgtttctatagattatacaattggtagaccaagtattgggcttggaagtgggagggctatgcggccacaatcttctatggtattgatcgactcttgaaacttgttgtttctaggtttttattattattttcatattttaactatttctcaaaatttcaatattttggaaagcacagaacaaaacccaaccacaagggcgtccggtgatggcagctcatcagcgagcagatgaggataacgaagatgatgagactccatatgtttatacaagcagcattccaagtgtaggacttcctggtggaagggctgcacggtcacgttctcctctggtaattagtttgttaaacacactcattttgaatcttgtacttgtatatcagctataagaatgttgagagtcatgttgctagtagtgaaatttttgatatccttactgttcttgctagttattattcgttaaacttgatatttcactttgtgtattacagactaaaaaccctccactgaggcatccacatgcagtagctcagccaccatccaatggagaaagtgatgttgattatgatgagtcgtatactagtggcatgccaagcattggacttgcaggtggacgatcaatgagacctcgcactcctttggtaattttagttcgtagctattctgtctcacattgatactttctctatttgaacttagtctctataatgtcccctctaatatgaatcctgaactagtacatgttttactacaatgatattttgctagcttttcagaaatctgtcattcaagaacaggttttatattccaaaatatcatagtactagaaaattgtttattggtgttttgaagtttgtaaaagttttatcagcattaaccatgaaagaagagtgtgtagttaacgtttttgagtatatacatcagcattaactttatcacgcctcaaagtgttttgttgcttttacgtcttctaaaacttcctttaattttccattagtcaattcgtactaaggaacaacctcagaccggacttccaacttcaggtagccgatcttcattatatgaggattccacagaatcttcagctatgtcaactttgacgcatccatctcagacaacaaaccaagtggagcaatctccatctgctcgttctgcaatctctaacaaatcatcccagtctctcagtgctatggaccaacctccatcagctcgttcatctttcaatggtcgtccaataaggacagctcctttaatgccatcttctgtgcctatatcactcaaaccagtgactcctgcatttcaatctaacacgccaaccaatcttcgaaaagataaaaggtaactagccatcattcttcacattcacctactcatttattgtcagtgtgaccttaattagtctagtgatttctgtctattagcaggttttccatggatttgggaagctcaggcaacttaagagagttagggagccaacgttctacttcagctttgcaagatgaggtttgacttctctagctcatgccttttatattttagatttcttaagttcataaatttttgacttttcgtttcatttcaggttgatatgctacaggaagaaaatgaaagtttgttagaaaaggtgatgccagtaaattttcacagttggtgtcagtatgcattacattctttgtgaagttagataatcctatctaaattttttgtcatggttgttggcttgttgctaagattctttgtaaagttagataatccttgtacaatttattatggtttgcatcccatcctaatttgtgcatccccagcttcgacttgcagaagataaatgtgaagaggctgatgcaagagctaagcaacttgagaaacaggtaaacatgtggttcttacatacaatttatattgtttcattgcctcgagctttaacacttctccaaactcaaagccgcttttggttaggttgaaatccttggagaaggtgttactatggacgcacgtcttttaagcaggcaagcatcagttctttttaacttttgggtgacctttgacagatttctaattttgtgaatgtgttgcttgcttcagaaaagaggcagctctacaacagagagaggtcagtgtcttatcatttatctgcaggtctcatatattacttttggctaataaagttccaatacttatgtatgccaaccattatgcgtttcattattggcgatgtctgcaaattctaacaaagtgtccaaatctgaactgagtaacttgcctcatcgtttttttaattgagcttattctccaactctgtacatgtgaaggcactttttcagggtagattgttttgacagctgactcatgtactttatgattctagtttagatcttgacatatgaaaaagtagaataataaacataaccaatttcttctcaggctgctttgagaattgcatcacaaaatcatggaggaaagagggaagatgtttcggctcttcacacagaagctgaggtacttcaagttttggtattttggtgttctaacttgtatttgtactaacattttagatcttggattggatttagattgctagggaggaggcagcatcttcattggaccagcttcatgaagttgaattagagcttaactctcttaagaccgtgaccaagagattgatattgactcaggaggagatggtacgctatgattgctaaagattcatacttttcgtttctatctagtattttcttaagtcgataccttctcatttgtagctctttatcttaggaagaggttgttctgaagaggtgctggctttcacgatattggggcttatgcgttagacatggtattacattgctttcctacacattataatctataaatttataaacgaataagatcgagtgacgtaaaacagaaagttacactaacaatattgttaaagcttctctaaatatcgtacataatgagctaaaattgggtgaaatattgtggcaggcattcaaccggacattgcaggaggaaaacacgaatactggtcatcatttgcacctcttcctctagagattgttctttctgcaggacaaagagcaagggacggagtttcacaatgtaatatttttcatcttgctgcagaaatttcactagaactgtttggaattgttctgacttcacttgttcttaccctctggtctcctcaccaagcagctaataacacttatggcgaaagagaaaaatcattgcaaaacttgcaagaaacttctggggaaggaaatctcgaaaacatgatatgggtcgagaaaggtttgcgggagctggcttcactaaaggtgaataatcttaacattctcatgtgaactcttctctatccttttttagaatcagagttctgttattcaagagacagatttgaagtatgattctttgcgttgtctaaaggttcaggaggcagttgcatttgtcatggctcaaaatagacggaacacatcatcaaagttttttgtttcaggtgataaccaaatatctaagcttaagccatgcttaaatttgaatattttcctaattcatgttttcttttcttgaacaattcatagacgaagtgaaaatgccaatggatggacaatttgaagcctttggtaagtcaataatttgtacattatgatctgttctcgttgatcattatcacaccaagtactgatgtgatgtgatgagaccctactcaaggtcattcattacatgataaggaagcccctgaaattctgccctcaaaacattctttctgcattttggtttttccttttcagagttgagcgacgaagaagttgaagatgtgaattttaaacaggtaaagaaaaacagatcaattctctgtttccattagctgtcatatggtcatctcactgtagctttggatataggcctggctttcatatttctggagaagagctaaaaaccatgaaatcgaatctgatctagtagatgagcgactccagtattggataaaccaagggactcgatctgccacatcacaagatgctgtcgatggtacgctctaaactcactctcattgttaacgagatgtatccaagaaaaaagagttttaattatgtgtttttatctatgaaacggcttggtatataatgggtgtgaaatgcagttgaaagagggcttatggagctgaggaagctgaacatagagtcacagttatggcaaaaatcaaggaaagggcttgaccatgaatctaacccttctcatcttgaactttccttctgattcctcgcttcttctctaaaaagaaaaaaactatttatttttctcatctttttcattttcaactgattttaggagagttgattattagacatgtgatgtttaaaaattttaaatgttattcttttcaattctgtatttgaacttgaaagccttattacaagctgatctaatttgttgttctaattttaaaatcaatcttcttctgaaatgtaaagttctaaagtgctattcaataatcaatagtgtgtaattctttttagttaaaattataaaatgtgggagacaattgtctctcctttgcccaccaaaaagaataaaattaaaattcctaaagtgctattcatataattatttatatttctctctcatattgtacaagtgtatattttgtttggtaatagaaccaattttcattgtgaattcgttgaaaattgatttttaaccataaatcatcagcattgagtaccaaaagtaatttccattcacttgaaataaaattgaaccaagacgatccggtttgaatgtcagagttagagagattaaggttattatgactgtttaagaaattaagtcgcatatcagaaataatacaaaactatttaaaaataaagattgtggaaactgatgtaaaattcaaatggattatgtaattgaggtctttggttagatagataaacacatctggcatatatatatatatataatatttggatgaaataacacaattgttaatataagttgaaaatacaatttattcatcatctcaaacgaaacacaaatcacgagaaaataacatttgaaagattaaaaaataaaaataaaagtcaaacgttcgactttgttcccatctcaccattgtgtgaaccaaacaaattcaacaatcatgcatatattacacacataatatcatatcatctcaaaaaaatgaaaataacccatagttcttaaattagtttctttcatatatatatacacatacatatatggatgtgtttatgtatatgaatagacgatattaagtttgttgctcagccacttccgtagaacaaactgcgaccgcgtcgccaacagtaaggaagatatttttctctccaatctcctcgacgaactttgaagcataaagtttctcaatcaccactggtcctggatttgctagaatcaactgttccatttcaagtcaattaatcaatcagattagtcattgatatcgtctaaatatatgatctcatattaatgaagaaaacacacaactaatttaagtaaacatgctagacatatattttatttgctttattgtatatattaagaatcttttttactttagtcaaattaatccaaaaagacaattctctaaagtaccacatttttaagtatatatttcaatatacaattcttgttttcttttaataatactaatgaatcaaaatctcttttgaatggtgaaaatatataccctaacttacaaataggaaacccaaccataatattttagttttatttgcaatttatttttgtagaacaaatacttttatacaaaatgtgtggtattattattgaaaacgataaactaatgatgaattttgttcaacaaaaaggggggggggtgttgagttttaatgtgtttagagatgatttaggtgagttttggtgaattaagaattttgttatcaaaaacttttccacctcaaaccatgagagttagatgtttgaattttttactaatcactcaaatttcgcctaactcaccaaagttacttcaaaaccattacttaaaatatttccaataatattgaatttgattatatattttaaaattattaatacaataacacatgatttaaaaagctttttagaattcatatttgaataatataggatttttcattttaatacaaatcgttccaaatcctatattactctaggagcacctccaatggagagttctctcaagaaactggctgagttcttttgattaatttgaccaaaaataattcaaaacagaaaaaaaatgagagagacaactctcttgagagagttttttttgttgagagaggctgtcacgcagctgttttattggctgcacgttcttaaaaatgttcgtacttaaatttttttaaatctttttaagtccagttttgtttatattgctcaattttttattttgtttttattgtgtttttaaattttaatcttgttaagacatccaaaatattttattgttagcaattaattttcttacttttgatgactatacatattatttaacatatttattttgtttagtttatagctttttggattatgatacatatccaatatttaatgtagagtaaattaaatgttcaataaatctgtatatatatgtatataaatattctacaagtacgccaacaaatcttagagattgtttggtattcgaaatcaagtttgcgaatgagagatgcatttattattgaaaggtgatttggttgagtatatatggaatatatttcgcaacaatcaaaaaacaactgatcgttattccgacttttgttgcacattttaaaaaaattgtttcgaaataatgtatgtttaatattttatgatttgcaataattattaagttttatgaaataaaataattttaaaataatttttttttcagagaacccttgtaagagtgcttaccattggagaatgaaaaaaaaaaaaaaaaaaaaaaactctctaattccttttataaaaattttaatcatacaaaatggaaagagcctctggaggggctctctctattgggatgctcataatattgtggtattttagggtacttctcagtccgaaaatgtatctcttaattaaaaaaatcaataattagcattctcacaagaattaattattaaatttgttatttcatttataaaaagaaaaaaatagaacgatctaaaattctagaacaaaatttatcaaaactagtattgattgttttgtttatggctataacaaatataaaataatcaattttaataaacattgagcagtagaagaattggttacctgaatttcttgcttctcgaggctcttgagaagttcttcgatggagtggataccactggtatcgatatcggtaaccgctgctcatatacattaatacttccatcaataattttgtaccattaaaaatatttaatacttagaataattgatatttttttttggttagagaaaattattcttacgtgacatctcaataatcacaaatctgattgccggcatgccatattccttagcattttcttgctcctctcgcacccatcttgatgccctgtcaccaaattttcaattatttcatgacttatacatatatacatcaaaatcaaaacgtgttagctcataaaattgccccgacgactaattcaattaatataaatataatcgttgtgttatgttagtgaggttttagttttcttatgttctattcagaaaattaaaataaaagtaataatttcacagaaaacggcatagtttacaaaatcatttactttctactagttataatttgtaacatatacagtaaaaactctataaattaatactcgataaattaataaacacgataaattaataaattttgttagtatcaagtcgggctaatgtataaattaaccaaaatcgataagataataaaataatattttttttgaaatctctatgtaagaatgtgattccaataaaattattaattaatacataaatcttaagcatacattctaagattaattttatatgaaacttttcttcaagccacaattgcaactctttttagagtattaatttataggataaatatttctataaattaataaatattttatcccataaattaataagtattaatttataggataaattaataaaatttcatggtcccatcattattaatttatagagtttctaatgtatttaaaaaaatgttttgtcagcttgaatttaaaaacgttttgttaataaccagatttcagttttgaatttaaacctaaataataagttagaaaatgttgatggatgatgtgtagatatatatttacctttctcggacatagttggagttggaaaagtagatggccgagtcaacacggatgatcaagattccgggaatttgggcagcgtccggatactgtagagtgttccgatatacattcgaatttggcagcttccctagaaccgtggttcttggtctcgtcacttgaagcaatatctttgcaaaagagatcaccacctatatgaatagtttcaccaacaaccaaaaatataagtttgctttatatagatatctattgtagataacaatctattatataaatgatcttacagcgatcaagagaccgatctcaaccgagatgaagatgactcctaagaaagctcccatgcaagccaagaagtcgagtttatcgatcctccatatgagaatcgctgcgtcaatatcgataagaccgaggacagccgatataatgatggccgcgaggatagcatttggagtgtacttgaagagtggtgtgatgaactctaaggttagagctacaactatggccataactatgtttgaaaccgccgtttcgactcccgccatgaagttcacggcagatcgcgaaaacgaacctataatttttcataaatgttcatcaagatagaaactaaaatatcattcgttttgttttttagaattatgttacaaatattgaagtttaacaaaactcaataaaatttaatgttttcgtagcttacccgtggcaatgtaacaagaggtcattgaaccgacgacgttcatagtccctagggcaatcatctctttgtttccatcaatttgatagtctttcattgccgcaaatgttcttgcaatcgctacagcctcctggagaaggaaattatgttgccataatgtcgcgaatgagactacacatatattaaggagatcttacttaaattttatgcatatgtgacttaccgttaaggcgaccatacccgcaatgcctccgattcggattccttcggtgaaatattttccggagaagaaaatcttatgaacggaaatcggattgattccttgatctatatgtttcaccttcatagtttatatcataaaaatattgttggtaactatagtataatctatcaaaatattattcatcaatcaggtttaaaacgtatgtttatgacatgaatgtgtgagcttacaatttggactccttgtttatcagcacgaaaaatgaagacaaagaaggtagagataatgactgaaataagaggcgcaattgccggaacccaaaatagtttcctgtttctcttcccctgtaatgaaaatttttatattagtaaatggagataacaaagatgcacgtacacatatatattggagatgaagaaaaaaaagtgttacaatgaatttggtgacgagaagaaaggtcaagaaactggcgccaatgactatagtttgccaattccactggagaaatcatgaataaaacgaaaacgaatatgagatatttaagtattgagcctaggcttggaacttcttgatgatttagagtagtgaaaacgtaccccatgctcagcgtttttgaatacggagtgcatgacagaaacaatatcagttttcttggtaaatgttttgatgccaagaaagcccttaagctgttggagagcgattgtgatggctgctcctcccatgaacccaaccacggccgcatgcgacagaaagtctatcaagaatcccaaccgtagaaatccgaggccggcttggaaaatgccagcaaagaaagtggcagtgaagacaagtcggagataatcctccgggtttttctttgggtcgatcacggcctggcacaaagttcccacaagaagagacaccacagcgactggtcctatcgcaatatccctagaactccccatgcccgcgtaaatcagcggtggcacgaaactcgaatctacaccaaaaagccatgcattcaaatctttgcacacaactatggatctaccacaaatctcgtaattgaaaaaaaaaactttagtttaaatgttttaagactcacaaagtccgtatttcggatcgacattcgcgagttttgcatatccgatatcctgtcatccataaaagataaaaatggaatatagatatgggttggctataaaaggaaagatatgcaccaaaaagtacgtaggagtcttgaatagtaaacctgagggatacaaagactagcaatggtgagaccggcgatgagatcacctctaaatttgcgaagagtgtattctctggcccacccgatgatcgggaagacagcctggatcccgagcaacgcttttttagctggggtttggcccttgaaatccctaagcggagcatcatggaagaaagtttcttcaaccacggacttgatgtcctttagtaaacccgctttcggaggagctagcactctctgacgaacgactggtgggtttcttgcaccggaccctcctccgtccgggggattaatagtcccggacatgattgctgaaaattagttgcctgcaattgttatcaataaacattatttaaaatatagaaatgaagtaatgactagcttcttaatgtgttaatgaggtatagttttaaaccttagagggagggtattattatttggaggaactgtagattttcttgagagattggaatgttgctgcgtatttatataagttgtgatatatttaaaagtcaactctcaagatcacacaacgtgaatttctttttatttttttgtaagataaaacatgttgcactttgataaattcagcgaaagccaacatgataatactattaaacaatattgaggtgtataaattaatatggttttgtgaggaatgaaatatcaaaaggttgactttggcaatttatgcggtgtgaagataggtacgaaaaaagttatacataaaattactgttccaaaatatttgatatttaagacttatgcacctaaatgttttttttgttaaagaacttatatgcacctaaattaagaaactatctaacttttaatttttataaataaataattatttattattagctaaacattgttcgtcaatgatatataaaacaaattcgtattttttttctttcttgtttggatgaatagaccaacacttaatttgacacaataatctttttcctaaaacattatttattttgaaacaaaaagagtatttaagttgtatatgatatgcatgcaagagactactatatattcacgtatatactacacatcgatatttgttgaggataactttgatctattaggcaccattcgatcaaccgattacgacgtggatgtggaacatcttaaagtatctcgttgtcaataagcgacaaaatagctacttccgaggtagtacaaaaaaacataattacgctagttaagtaggcaagcatgataacaattaacaaacccatgactataaaatacaccacaacgttcagtaatctcgtatccaaacacatgaggcaagtaaagactattttgaatatggtattattgtaccattcacgatcactaattacaaaagcaatgtacatctgttattaaaatctttactctgaacttttttttatacatttttgggtaaataacatatgtctcacgaagtttcatacagaaccacaactacacatattttagatcttgtttccagtcttgtatcctcaataccaaaccaaaaatctagtatagtaaaccgaattgcaatccgattcgatttattcacaacctaaatttactatataagttaaagaaaattataagaaatggcaatcatctttcaagtttggaaaaacaaaattgttgcatggaagtcaactttttgcatggttccaccaaaagttcatgcacatatttgttattattttattaaataacatgttttaaaataaaatatctcaactatgagtgattataaatacaacacattgtagattagataaaatagcatcatactacatcattatcataagaacatattatttgcctttaaaatatattaaaaatattagtattatggaggtaccattgtaaatttacacctaaaattactttgttagttaaagaaaattataagttttcaaattgacccatgaattacgtattaaaactttaaaaccatttggaggtaccattttattttgaattattgtccaaaaagccattttttgctcaaccttttaataaaatttgccatttttctacattttttcaaatttaccatttggccgtttttaaaatggaaatttcgaaagtttttttgacaaaatggtaaagattataaaagcagtcaaaataaattcttttttcttaattgatatgatttattttggttctttatataaaagatatattttaacaaaaacaaatataaaaaatatctgagttatttggggaaactttggacatgaaaatggaaagtcaaaggtgtagtacaattacaactgttttgtcttctactgctgtcatcccattaaattgtacaaatacaagtgtgctcatagaattgtttctctctcactccgtccaggttcattgtgtcatttataggaacataaaacaaattcaactatactaaaccctaaagaaacagctatttgtgagaattgcccttcattttcttggttttttttgtggataaatcttatttattttaattctttcttagatatttgaagaaattgcttatgatgtgaaattgtaagcaattttcatgtcacatataaatcttctcgtctttcttcttaattctttttcttccaaagttcctccattaaaaaggtctattggtgggacagcttttataaaataatcaaaagaatagaaatatgtagcaaaactattcatcttctgccaatagattattttagtaacatatattattttatgcaatctattagaaatgattgatgtgcaattgttttgtcctcccatgtttttgttttgtccaagttcctttatatttctgggacaacatttagagataaactaaaattatataatatctagcaactatacatgttctttgtattactatacttgaaaacaacttatgtgcattggcaacataaaatagaggttgacttaacaatttgattatagtatttgcgctgtaagcaacagattcttgaccaataggttgtgaaacgtgggtcccagaatctgaatagatgccgccacgtcggataaaatgcatttagccctaataatgtctaggttcaagttcaatccttaaggctttgtctccttcatggtttcttcaatagtggtattagtatactcattcttttgatgtttaatatgcctcttagcctctttcttaggccaagttatacagaatcaaaatttcatatatcataacatacgattctgcgagtagactttcatctaactttttaatatatcaactggcataactagataatttaacagcgatatacagttgtctgtaataaaaaacactatacatattattcgtagtttagtttgatatcgttttacatgttcatacctattttaaatactgagaatatttagtactttacaaacaactttttgtgagtttaagaacctagttttgtgccatttgatatacctataaaaacattctttcactagattgcaagaaaataaaattgtagagacttttttgggtaccatagttcagattctagtaagaaaaggttgtaagaatgattaaggaatcatgtataaactaactaaattatgaatagaaggcatattttggggaataatgtagaaaaaatgcatattaaaaacctattgaaaattacgaagttaatatgatattcttaattatattgttttttcaaggctttatttgttgtagccgtcctctaaacacaatctttcacatggtcacgattgaacccaagtatgattaattccataatcagctaagaacttgattaagtggattccttttgtcaatgatttaagggatcttatccatgaaggaacatgtgccaactaatatgacttccgatacacttattctaacttatagaatataaactatgattgtttttttttttttttgtaaaagatataaactatgattgttgtactaacgaactaaatatatatatttttcatcgtaaaggaatatgttcgttcatatatggtttcgtctcctaagctgcaacgtgttggcatgacgcctttcttttttttaatccccaccaagatataggaattggaatttaataaaagtaaatgatacaaaaataaattcttttctaaataggtattttgaaatgtatacaaagtttaattaacctaaggaaagcaagcttgtcggtaagatatttcgggctgcgtcttgctctagtgagctatcaaaagaaaattgagtggtctaaagcttatatatcagctgttctcgtggatttaaaagcatctaactatcatagtttttggagctttgcatgttttctctcgaaaatgtcttcaaataaatattataagtaaaaggttgggttggcgatctatttcccggcaagaagtattatatatcatcgaatgcagatccaactgagccctagtgtgctatatttacccgaaaacaaagttcaaaatctatatctctctcaaataaaagtttaaaacctagataacacacataatcatactttggaacctctagccaaaaaaaatggatttagtcggtttactgtttgccaaacaattgttaaccaaatatgatactaaacggattttaaacccaattacaatttacaacaaataatcgtgaaaatataactccatattggatcttgatgaaacatttcagccaaaacattgcctaagaaaacatcaagttattcttgtttcataatttgtgtgatcgttttaaaaaaataaactgatttaaacgattacacaattttcttttaaatcacagttatttcctttgaaattgtgacaaagcaattatttgccaaaatgtaatttggcatttttaatcaatatcatatacaacgcaattccacaatttttaacaaaagaacacaatcaatcaacatatataaaaacatagttccactttttgccaatcgcggttttttaatattgaaaaccgattccacaatttgcaaacaattgtgtttctctagcttaattttaatttaacgtgtttgttacataatcgatgaaaatgttgtttgagcaaagtcaccttatcaaaactgcaattggaaaacaaagcaaacatgttacgttgcattaaaaaaaaaaatgttctattgaaataaattaagtgctgcacaaaaaaaaaagtttcatttgcaactcagcccagcccaggcccaataagaaagccaactacaggcccacctatcatcaaacagttttaccttgtcattcaaacaaccacagacctcaacgaagacaatgacaacttcttctttttttgacagcgacgacttcttcctcttcttcgtcatttttttcgattaaaaattgaaggattatatgtgcaaaaatgcttttgatttatcttctgattatgactctcgcaggaccggcttaatagaaccggagtcccggtacaaaattttaaaattggccttgtttagtactaatttttttgtatacacaaccatatacctacatataaataaaagataaaaatatatataaaaatttgggccatcttaacaacataattacaaaaataagaagagtatttgggattttttaacaacataattacgaaaaaagcatttgaacctttaaatttgctcaaaaagattagacgtggaacatttgttccataagctcctcctcaacgtcggcactggattctgaagcagaaatcaaacttttttaaaggttttccttagaaagctatcattaaatatagctctagttataaaaatcttgcgttttcatataagtaatccacatttttatacctgaacatatcaaattgggttctagttgcagttatccatcctaaaaactcatacataccacataccacataccacataccacatatatacgaatatttgaacaaaaagaaataaaagaaaggaattactcaagcttttaaaccatctcttaagctcagttgatatcttagataccaaggtgcttctcgaagttggctttatatatctctaaaacaacacttgcactatcagaagcaccagttatgatctcggctatcttcgaatcgagtcccattctattctgccactatttttgaaaaacaattctgacgtaccactccttgatgtgcaattacatctctctccttaatgaataactgaggagaatttccaaaataaagagtaaatgatttagtaaaaaaaaaaaagaatcacggttacttacgttcatcccccaaaatcgcgaacctactctccgacgtgatttttttttacttcgccgtcggcgacttgagctccgatttcgccggcgatttgagctccaatttcaccggcgagttagcttccgagatcgccgtagcttccaagccgataatctgctcccaaagtgagcttcctcctcaacggcaaaagtaaatccgatctccttttgatttgtagattaatgtgaatttcttattggagttagttgttaataacataaaattgttgtattgttcattatgggctgttgtattgttttgaaacaaagagtttagtgagtgttcaatcgaaattaacgatttgtgaaacccagaattgacgaactaggacaaatggtaaaactgagatataatagtataagcggtacaaatgttttattgagatacaataggacaggtggtacaaatggtattagtgagttataatataggtgcaattatgtctaaatctgaatgattacgtaattgtgtttttataatttatttgtaattacatgagacgatgaagaacaagcacacattcatacaatttgacaatgggtattattcaaaagagcatgagtggatttctaacaattctttaagcggtgtattgttgaggacgtcaaaggtaacatactctatgttagtaaaaaagatatgcaagaagattggaatagatgaaacctcaaggaaggtgacattgagttatattctatgcacatctcagagagagacatctattgtacatgatgatgactttttagggtatctaatggtagtgaatgcgaagggaattagaccagctttgaacgtggaggtagtaaataaagaatctgagagggtggaacaaatttcaagggtagagggaagaagttcagttggtgttaattatgaggagttgaatgcatttgatgtggagaatggtggagtagtgacgattttaagaggagaaattgcaggaggtaattgtgtgaatgatgaaccgattattgaagagcctaatagtgtaaaagaggctattgagaatgcggatagccgggtttttgaagaggctatggagaatgtagttattgaagatagggagcatgtggatagccggatggatgttgctgaagataatggtgttgatggtagaattgagtattatgagcttccatgtgttggtgaaggaagtcagagtagtgagaaaagtcagagtgttaaggaatgggaagatggaacggggattgaattgaaccaagaatttgtttctaaggaggtcgtgcaagatttggttaacatagttgcaaataagtattgttttgcgaccgcaactatagtgttagatccacagcgactcatgttacgatgtcgacaatctaaaacaacaggttgtcaatggtatttacgatgtgcaaaagtaaagagttcagattgttttagtgttagagttcacaggaagatgcacacatgcaagcggtctgataagaactcaagcaattgtaaacataccggcacaccacgattaatcgcgtctattttgcatgaggattatccatgtgagtttcaaactccaccacctaaaagcataatgagtattgttcggggaagaatgaatttgcattgctcgtatgctaccacatggagagggaaaagacaacacgttagtgatgtgcgtggtagtcctgaaaaaagctacaccgacttgtaatcttatctgtacgtattaaaggatgtgaatcccgggacaatatcatatgtggaagtggatgcacaacaaaagttcaagtacttattcgtttctttgggtgtttgcattgaagggttcaaagttatgaggaaagttgttattgtggatgccacttttcttaagaccgtatacggcgatatgctagttttcgcaacagcccaagatcctaatcatcacaattatatcattgcgtctgctgtaattgatagggagaacgatgctagttggtcgtggttttttaacaagctgaaaacagttataccggatgaactaggtttggtttttgtgagtgatagacatcagagcatcatcaaatcaattatgcatgtgtttccaaacgcgagacatggccattgtgtttggcatttgtctcaaaacgttaaagtacgggtgaaaactgagaaggaagaagcggcggctaacttcattgcatgcgcacatgtttatactcagtttgagttcacgagagagtatgctcgatttaggagacgatttcctaatgccggtacgtatttggatatatgggctcctgtggaaaattgggcaatgtgctattttgaaggggataggtataacatagacacgagcaatgtgtgtgaatcattgaacagtacgtttgaaagtgcaaggaaatacttccttttacctttgcttgatgcgataattgagaaaatttcagaatggtttaacaaacataggaaaaagtctgttaaatattctgaaacaaggggtcttgtgccggttgtggagaacgaaatacactccttatgcccaattgcgaaaacgatgccggtgaccgagcttaacagcttcgaacgtcaatacaacgtcattggcgaaggtggtatgtcttattctgttgacttgctaaggaaaacttgttcttgccgacgttttgatgttgacaagtacccgtatgtacatgcgattgccgctgcccaaaactttgtggggaccgaatggatatcagatggtctcgaaatggaagacctaacttcgcatttttaccatatgaatacgtggatattggcataccacagaatcatttatccagtcccgcattcatcagtttggattattcctgatgagataagttaattgatagtcttacggtcggataccacaattaaaccggagagaaatcaagaaacccggttttcatcaacaggggaacgtcgtcgaaagaagactaataacaagtttcagcctgggattaatatcaacgcgtggttgcagcccgaggagtccgactcataattaaatgtgtattttgtgttgtgttgttatgtctgtaccgtgtacttgtgctgtctgtattattgcttcatgtattatgtcttcatttttaagtactttggaattttgttaagtattttgttgttatgtctgtaccgtgtaattgtgccgtctgtactattgtttcatgtattatgtcttcatttttaaatactttggaattttgttaagtattgttatgtatgtaccttgtacttgtaccgtatttactagttctttcatgtttatctcttacaataaaacccctataaattaagactcgataaattaataattgtacaaaaatatcaactatatatataagaaagaaatattattttactattgtttctttttacgtaaatttgcttcaatttaatttaatttaaatatttttattatattaaaaatatgggtttttgtatgaaaaactacccagtttatgggtttttgtatgaaaaatacacctctctatacttttaattaaaactataatttctaatatattaaatgacaatttttaaaaagctgtatttttaatatattcatattaaatacgatactaaaatttattcaaaattttgaaggaaaaaaatacataaactaaattcaaaatcttaattaataattttgactatttatgagacaaatacagtttatttattttctttattaaaatctaatatgatattattaaaaaagaggtaattttttaaattttctcataattatttcaatttgtaattggttctaaaaatatattttagatatcataaagaaaaagttatcatacttggaaaatatctctatacattgttctggaatattaatcacttatactaattatcatacaatctaaaaaaaattgaacatattatactcatcaattcagaaaacacttcttacattatatggtatgcattgtatcatgttggacaatcttgacataaacatggcaaaacgcatatatttgtacaaattatataactaaaacattagatcttattattaaacatattatatcatctgtccaactataagttaattcccttaatgaagtccaactctaaatactaaaacttccacaaagtacaaataacttgagtaccggacaactgaataacttatggcacaattatggctaatgcgcagtcttttgtctgggcccgcattccacttttattaccataataactcttgtgtgttcacactatgtgttcacactatgtatttcaaatttcaattcaaagaaaggaatctttctcattaaattacatttctttctctctctttctttccttcttctcctttcttctctcgaaaagttatcttctctcattctctcttctctgccgattctcgaagaacagtgctgacgaacaacacgacgaacctccgccgacgccggccaccgaatctttcacatcagccgccggatccaagttctctggtaagtttcgggttggattgaaatgaaattagggttttgattttcccccaatttcattgaattatggtttgcaaaggaattagagttgccatttatgatagtttgatatctaggggttggattttggattttgttaaagatctagggtttggatgttagggtttagattttggaatttatctccttttgattttcatgtgtttggctatgtagcaaataatgccgcttagttattcgtcaccttcttcatcagaggaacgatccgatgatctttgcaagtacgatggtgattttggtgttcccacaatctgtttttgtggtaaatagctttaccttttagagtgtcttattggcgatcaaaagaagacatttctcaaatgtccgatgagtggtcatgatgataattaccacgtagacaagtgttgggatcttgcagttcacgagcagtgcttttgcatcgacaaacgatttggcgagcacaggaaattgattcaaaacgcattcaaatatggaggtgatagtaatcgtctccagattaaccaaatccgtgctgaaattgaggacctcaaagaccacttggacaagaaagatgcagagatcgcaaggttatggatgcacttggaaagaagtaaaatgggaattgattttgtgattgtatttcctttttatgttgcaacaagtatgttaaagtttgaaactatgttgaattcctatttctagagtcatttgtacttttttgacttgttttgaagtaatttgtacctcttttggaattgagttgtacctctctataaactacttgtacctcttgttttgaactcatttgtacttgttctaacttgttagttgtacctttttgtaattgaattgtacctcactataaactacgtgtacctcttgttttgaactcatttgtacttgttttgaactcccaaaaataccataaatcccaaaaaaaacaagatcaatcatcctaaataacaaacatcattctagtgaaatacataagtaccataaatcccaaaaaacaagatcaatcatcctaaataacaaaaacacaagtcttcaatacatctgaaatacataagtaaatcgttcccataaaaacacaagtcttcaatacatttttctccaaacgtaaactggacccttggtccctctcatcctctctgcggtataaggtgccttgtggtatctcgatggatttaccttacgcttctttttgccaccttcatcctcgtcctcaggatcatcatctcttttcttcttctcattcttcttatcgttgcactttccttttcccttcctccctttcttcttcgtttccttcttcggcgtctcatcatcgcctttatccgcttcagtttccttctcaacttaaacatgaccttcaaaagaaaagacaaccattcataaacaacaaacatcatatagtaaaaagatcaaagattattaaaacaaaacataccgattggagagcctccaacacaaagaaccatagcagaactcgtatcatcgggctcaacaaactcgggtacaaaaccctcgggctcaacaccatcggtctcaacatcatgggtctcaacatcctcgggctcaacagccgcgatctcaacagcctcggtctcaacatcatgggtctcattagcctcgggctcaacactagcctcggtctcaacagccacatccacgttcttctcattcttaccaccatcttccttctccttattgacatcggaatggaccttcttctcaaatggaggcacactctcaccggcttgtctcctttcaatggttacaagcctttcattgtgttccgccaacatcgccatcactctcttaaagccttcatcaatagtttccttcaaagagcaagagctactgctgcccggaacatctggaacatgtctcggaacattctcttcctccatttgctcgccgcttcgagcctggacatccgcttcaaacatatccttccagaagattctcttcctctctttgatcaaacggtttctccagctatcgacaaccggatcaacaaactctatcccatcatcaacatcatcaccatctacaatgcgcctcaacaaatctttctcttcgtaatccgattccaaaacgctagagataacctatacaaattcaaacataaaaaataatcatattctagctcatagataactgggacaactctagaaataactaggacaacgctagagataactgggacaactcttacctttacactttcaagctcctcgtttatctcttccaacgagaaccctttcatgacactactagagaatttggccttacacattctcggacactcattctcgaaccttacagggtctctaaacttttgtcccaaatgtggaatagcctcaaaaggtaaatctacacattcaaagtaaaagtcacattagtattatttttaagtctactaatgcatctcactatatataatactctaaattgttacctctaatggaagaataaatccggagaaacaagtctgcagttttgctttccctttcatggatttcattaccgacttaataccttccatacatccatcaaatgtgaaacgaccccatggggatgtctcacatgcacgcacatcatcaacaatctttagaaagaatttgtcaatgtttccatcagcctttgacttggtcgcgatcaccttgcacaaaaaaaaaaagataaccaacttcttcctatccgtcttcttcttttctccacaattcttcatttcatccagctttttctcaacatcaatgatcttaatcccaaataccttttaaaagatctttttggcaaacttcaattctgcatccaatcgaaactccttcgggtaatcatgacaatcgaaaccacataagagcacatgctctttaatggagtacctaataggcactccattaaccacaaaccagcactccctatccatctctgtccgtgctgtgcgaagcaaaagcatccacatgccttgggtcatgtggtttttctcctcaggcatgtgaaatacatgcctaaactgtggatgcgccttgaaccatggcaaatcttctttacactcctccaaatacttcactgtctgccgcacagtgcatctcgtccctatcttacacgtcttcacgtattcgcttggaccaaagaacatcctctctggctgcattgattgttcctcatcatcaagttcctgaaattttatacacaaacatacaattaatattttgttgtactacttgtactagttatcaaagaccaacattatcaacttttctcagaattaaatttttctaatgcaaaccaatgtatgattgatcacgttaacgtataaattcatgcaccaatcaaacaaaccaatgtatgatcacgttaacgtataaatccatgcaccacataagttgaaactatactattaagttgtcctaagtgttttctagttgtccctatacactactttcaatattcaaacaaaattttcagaaattaatgttatctcagatttttcttcttccccttctttttcctttacttcatggttttcttccatcccctgagactgcattggttcctcatcatcaatttcttgaaaattcatacacaaccataaaattaatatttcgcgttatctcagaccaacgttataaagttttctcagaatccaattttctaatacaaatcaatgtatgattgatcacatataaatccatgcatgcaccaatcaaacaaaccaatactattaagttgtactcattgttttctagttgtccctatacactactttcaatattcaaacacaatttacagaaatttgtatatacctcagattcttcttcttctccttctttttcctcttcttcagagtcttcttccatcccctgagactgcattggttcctcatcatcaacttcctgaaaattcatacacaaccataaaattaatatttcgctgtactacttgtactagttatctcagaacaacattatcaacttttctcagaatttaattttctaatgcaacccaatgtatgattaatcacgtatatccatgcaccaattacacagacctatactattaacttgtactcattgttttctagttgtccctaaacactatatcaatattcacacaaaattttcataaatttgtatatacctcataaatcttttcttcttccggttcgttaaggttttccggatgttcttgttcacagttttcgtcttcaactttgttttcctctgccacttcttcacggttcacttccgcttcacggattgtgaccctctcatcttcactttcactcaaactaggagtggctaaccttacacgacccataagtaccttggaaaaccacacaacaatcaaggaaaccgttcaaatcaacacaacgaaaaccaaatctaatgtttcaaatcaaaaacttttcactttctatactaaaagccctattcgatacttagaatttggaacgtcggcggtttggaacgacgacggtttggaacagcaccggtcacggcggaatttcaacggcggctaaacgaacgattatgcgaaatcgaacacgacccacacaatcggcgatggttaagatgcagaaaggagataacaagtgatatcaccggtgacggtgaactgaacggagagagaagagaaagtcgacggttttggatttttgaagttcgccggaatcgaaacgagagagttgaagagtcgacaattttgatttttgaaaagttacttaggttaaaaaaaaattatttgggggaaaacccagtaacagtgggtcggatcctggagctaaccgtggactttggttggatactgtagttttattaagtcaacgaggttatttcgtaatctccctctgtttttctatttaaaaaaaaatcaaaaagaaattcatttttgcgagtggcagaatggaaatgttttttgcagatgatggtggaatagatcaaaatcccttcgaatccatgtactctctctgtttcgatatcgaatcgataactacaaagagttgtccaacacatgcttggacctcttcatcactctgcttcactgcttcttgcaatctaacctcaaaactacgccgcttctttctcaacaacctccaaatacaaggcttcctttccacaccctcaaccaattcttttgcctccaagtcacattttgtaaccaactcctaagttttcttcttcaccaacttcatcttatcttcgagttcattgatctggaactgatttcacccaagaagactcttttgaattcgatcgtcgaaaccatttcagatacctcgtgttgtaacgtgatcaactccgccactttatccgtcgaacttggtttgttctcatcgtaaaacgaacacaaagctggcttcaccactcttctggtgtttcacctctctcgtttacaacaaactgaacgtcatcaagcttcagtctcgttgaagcttggttataatcaatggcaagtttctgaatctactgaaactgtgatgcaagaattggaactaatccaactttagatcacttaatgatcaagcatttctaagcttgccatacggaaggtggggtgacgaaggtggtggtcgcttctctcgtgtgaatcaattcaaaggaaattgatggatagaggggtgattgactcgctcaaccagtggaataatccactcactcgatcaatgaacgaataaagaatgatgaatcaatcaacaaacttaattcgcaggtttttgaagtacttagtgactaactcataaaaaaactaaaaaacaaaatggcaaaaactcaattttgacaagaaaacgtttctattactgtgtaatatgatcaagggtactttacaataaacgaaataatgaacttatatagactcaaatataatattctactactataaaacaataaaaaaattgcaatatttaataaaatatggtcgttggacattattgtagaatatgtccaagtaaggtaactgagatgtgtcttgtatcttctcaacttggagaggaagttgtgacgtcttggaagcttcttcatgttatggaatgtcttaagttgacgctcaaacaaaaggggaaagatccatgagacatttatgacaaacgggtccaaatatggtaagtatagctcaaaattggtccaatcaaatgtggtgtggtgtattttatagcgtgtagtgaatcctctaagtcacctagaaactctgcaggccgccaaacaaagctttttgacatgtctaagtgtagagtaaggaagatttccttgtcttgtttcatttggtgcagtacattagaaggtagttcagcgggtaaatcaggaagtagttcagccggtccgtcagcaagtacatcagctatatatacttgtaacatcttcaaatttccatattatggtgattcgggttcgctggtctttgattcctcttgaaccatcattaatcttctaagggttgattggttgttgaataattaaccataggcattgagactccaattggacaagaggcctccaaaatgctccttagcaagaaccgtgactaagagaaaaaaaaaggtacttgttttaagcaaaattttggtatcctcaaatttgacacaataatttggtatattagtaaaatacaaagttttttgaattgacgggagttagattaacttggaagcctgagatgaaaaatcaactcgattatatgcgtattttgtggcagtgtaacaaaatactaagtggccgcattggtatttcgattaattcgataagaggaaagatggatatgcccgacgtttggtgggaagatagaattcaggtgagttattaaaacatattatctatttgtatttacatataattctattttataactagttttatcattatatttcaggaatttgggagaaatggcaaatacgtgtgagtgttgcaaaacaggcctattgctttcaaagagatactcgatcaaatttctagccaatatgatgtggagcgtgatgatcactattctccgcacactctatgaacacacctcgaacaaactctaaatgaagtgcctagcgatgatgacatagaagtggatgaagcttaagacgataatgagactcaatttcctttatactacaagaaaacacggtattagcgacttaattcggcaactgattaagtagtcgttaactttggcgactaaatagtgacatattagcgattaagtagtctatattatacattagtcgctaatcagtcttgaatgtgagactgattaacgtagtcgctaataggtcgtcagttacagctaccatttagcgactcatttattctaattggtcaattaattgggcttttaccggcttgatctagtaatgagagtccactaccgagactatataaaccattttgtcgcgtaaccctaaccctaatcccttttagcgatttgatcccaattcttcatcaatccatcttcaatcttctcagtctctcgtttcttagcttctagtgatgaagactcgtggtggaaaaaggcaagagaggaaaaggaaggggatcgaagattcccccaaatcgaatcgaagacccaggagttgaatcgaacgcccaggggtcttcccagccagtatgatttcacgccgccggatcgtcaaccaccacttcaagaccctgatagaaatccgattgcacaggctccgacgggtgctactgtcagagactatcctcctccgacgcaacttttccaatcaggcgaaggatctccttgcggatctggatcgattccatttcgagcatccggatcgactcaacctagatttggaggatctgttcatcgtctaccttgtagatcgaatcaaactacagcgccggttaaatcttcagcgccaattcaacgcgaggcaccgattcagactccagtcgtggatcaacaacgaccacttcctcatcctcgaccctctgtatcgtcgcatcatagctctcaagcccaatattcacacgatgaagaagatgaggaagaagaagacgaatgtgaggatgatttgtcaagagagccaactctctcggtaggtcagctcgctactttagattagctgctaaggacgcctggccgtgaggcatataccactgtcatctctcccacattggagcctgatactttttggtaagtttgtgattcagcctcattagtttattaagtgtatgattaggttagttttagttattgtttgtagtttgatttaatggtaagaactgatttattggggtttgatcagtaagaactattttatgaactggtttactgtggtttaataagcactagtttgattctaggtttggtaaggacaaaggtaagctaactcggaagatcacaagtgtttttacaaacaagtttgctgggccatattacagttggagatgtgtgccaactgaaagaagagaaagatacttcctcgaattcgcggtaaaaatctaactcctctcaatcttcttttttgttttttattattgtgtaactaacatcaactctcattattttttagaaaactcacacttggatccgtctctgactagtgtgattgaacaaaagttctataagatttgtcaactgcgtatgaaagatatgtggattgagaccacattgtggggagaaatgtgtgactattgggacacagaagaagccaaaacaaagagttcaatcacatcatcagctcaaatgtctaatcataatggtcttggtcctcataagcatgtatcggacccaaagtcgttcttacaaacctagcaagagatggtaagttcttttgactatgaacatttgttttctttacttataaaatgttagagcatctacaatggtagtttcttatcaaagtctctcaccaacaaaaataatagcaaaataataaataatactttttaattaagacagttttttaaaaaaatgtgctagagtttatcatttaagagatcatgaaagacttttccaactattttaagaaactcttcaaattaaataatattattttttattttattattactttagtagatgagaaactttgttaagaaaccaccaattttcttgttcttaacaatttgacttgttttgttttcaacatttcaggaagttgaactaggaagaccgcctactattggtgaagtttttctcaaaactcataccaaaaatgatggcagtcaactatcacaaacgacagaggggaatactatggagttggaagcttaaggagctacatcaatgggaagcggaagtaccaaggaaccagttcttctttcacaaccctgcaatcacagcttgaaaaagccaaccacgagatagaggaacaagctactctacaagcacatcgtgaggcagaggctttgtgggttgcagatgaacaagcagagatcaagcgggttgcaaatgagcaacaagcagagatcaagcgcttgatgatggtgaagaagtacttgaccgcaacagacccaaattttctcgccttcctcgagtcttctactgcttcagaagatacaacagaagagttccctaagctttcctttcttctcttctttgtcgtttaaactttgaaaacatgaacttgtgtttgtttgtttggtttaagacttgaacttgtgttggtttggggtttttaacctttagtttgaatgttgaatattttgttgcatgtttgattctgaatgttaagtacaagcctttttgtttatatattcgtaattacaatagaattaggattccaaaaataacatgctaaatcgataattaaacctgtaatcagtcacaaagaggtagtattcagtcaccaaaactataaaacaacagtcgcatgtagtggataaacagtcactatatcagtcgctaactagtggttatatagtggcataaatgtagccaaatagtcataaatttcgattaaccgactgtttagctagggatattgtagtcactaataccatgttttcttctagtaatttagaactaacatttgatgaggatcttcaatgaattgttccatcatcgatacccactactaatgaacaaggacaaagttctccttctcgtacaaataaatcaaactcgggtgttcgaaagacgactactagacgtacaaatctaagaaaaaataactttgagactcaagttaaaacagggtttcaacgtcttgaagtgtctcataaaggtttactgaatgtcttaaggtcacgagataatcaaaaagctacatttggagatactttggctgaattagagatattgtcgattgaaccgatgggaatgttttggtatgaagcaaacaagttcttgatgaacgacgaggattttcgtgatggatttatgaaattatggtgaagagatcaaaattcagttcttggaaaagcttgttggcgttgatagatatggtcttccatgtgatgtaagtaattgtataagatggaaaatgtaagtaattgtattatcacatgaaatactaagttttccaaactgacaaaaactttagacaactgtgttgtaagtaattgtattagcaaccatatctatgtaattgtattagcaaccatatctatcaacgccacatgacttaattacgatcactccctcggaaataagaggcaataatagaagaacaaaacttggaaaacaaaagtcttattgttcacttcctaacgttgacggctgatgtcttctcctcatgtttttttttttttaaattttgtttataattaatttaaaaagacaacaaattttataaaaaagaaccaaaatctgacgttttctcctcttttttatctatgaataaatatttattttaatcagaaatagataaggagtagatgctatctctttcttttatttcttttaactcaacttatttttagaagttctgaaacttcaaagctttatttttgaagttttggataattccaattacttgaggagcaagtaatctctccaaaatattctagaagagataataagaaataggaaatacaaataaaagtcaagttggctaactctctcccacaatttgacacatcagcacatgagagcttgccacctaaacttcataaaataagtaatacataattagtaattaattcaacataacaactaaaataggaggatataattaatcagaacttgaaccatcaccatttctacatttttttaattcaatatatcctctttaattttgagatccacttaagtggctaaagtgatcataaaatccaaacatgctacacatattccttgcctaaaaataagacgattattatgaaagaaactaaatgaatatgcagattaaatatatctaagattttcgagatttatgctaagaaaacaagtaattttaaagatgtttgaggagctatccttacaattaatacgtaagatataagattatgacaagaacttaactaaactttccaagaacatcaagttgaatatgattaataaagacatgttatatttttagtgtaagaaataaattttctaaaatttcaccgtctcataatctaaacatataaccaaaaaaagaaggatatataaattaaaaaaaaactgagaatctagaacaacaataaaaaacaactcaagcatattcaattttcagatgaactaatatagttggacttttgaaaaacaattacaaatcatatttatgtttcaaaaacgaggcattcaactttactttatatgaacatacattatataaaacaatttgtaaataataatacataaacccgaacgtagtgcgggtactcatctagtatctataaatacgggcttatggagagatgttccataagacacaagagagattaagaggctatagagagttgttctaaagacctagagagatttagttttgagtgagtttctaaataataataaagataagtcgttctttaagttgttatgttcttaaatcacatctcaaatcatacagaaactaagtcagaacaagtcggctttgatttgatttaaatcatcaacttcaggtaaagtttcagattctcttatctttattaaagaaatatttctcaaggctggttgtgagcgaatagagacaactaattctaattgatacatgtgtgagtttttatgttaattttttttatggattatgttttttagaccaacttcttttgttgttattgaacttgttgatcaggaaacgttaagaacagttgcaatggagagtaatcatataagtgaagattttttagtcgaagaaaaagatgactcaataagtgaaaacgaagtttcggccaatgaatttgaagaagaagataaaatagctatccacgaagatgaagaggttgctgctttagaagcaaataatgataatgagaagaaagataaaatatatattggaatggagtgcggttctgatgagattgcatatataacttataaaaagtatggaggcaatcatggtttcaatataagaaaacaacggaggatgaaaaaaacgggaaggtagtaaggcttctttatgtttgctcaaaacaagggtataggaaagaacccaaggtcataaaatcataatcacaaccaatcactcggtgtggttgtaatgctcatatgacttgctaccttcagaagaccggaaaatataagcttgtatctttcgagccgaaccacaaccatgatttagtgagaacacctatgaagcatttgttgaagggaaatcaggaattatctatctgtcaaaaacaacatgtagatgatgctgagatgtcagggatttcagcaaaagcaactgttgaaatgatgagtagagaagttggggggcaagaaaatctgggttttttgaagaaagattatcaaaattacatataccgaaagagaatggcaaaaatggaaaagggagatggtgcagctgttttggaatactttcagaaaaaaaaagagggtaattcgtctttttttattcaatgcaacttgatgaggatgatatgatcactaatatattctgggcagatgatcggtctatcagtgattacaatctttttggagatgtcatttgctttgacacaacttataagaccaatgaatatgatagaccctttgttccatttgtcggggtcaatcatcacaagcaaacagttgtgtttggtgttgctctcttatatgataaaaccaacgagtcatataagtggcttttcgagacttttcttggagtaatgtatggaaaacaaccaaaaaacaattcttacagaccaatgtgcagcaatggcgaatgcgatagtaaaggtattccctgatacaaatatagattatgtgtttggcatatttaccaaaatgctgcaaagaagttgagtcatgtatttcatggagcagaacaatttgccatggattttagtaagtgtgtatatgactatgaggaagaagaagattggttattagcatggagtaatatgctccagaagcataacttgatagaggataaatggttgaagaatttgtttgagctgagagaaaaatgggcaatggtatatgaacgtcattcttttacagcagatatggtgagcacacaacgtagtgaaagtatgaataatattttgaaaaatacttgaagcatagttataacttgttgtgcttctttgaacactacgagaaagtgttggaggatcgacgatataaggaattagttgctgatttcaatatgatgcataccttgccggtattatgtgctactgtaggatgttgcaatatgcggaggaagtgtatacactcaaaatttttagcttgttccagaaacaatacatagttattggtgattatgttgccaacaaggttagtaagtatgagatggtatatgaatataaattaccttatcgtggtgtagcacggaagcattttattaattatgatgttgcaaacgagacgatacgttgcagttgcatgaactttagttttgccgggattttatgtcgtcatgcattgaaagtgctggacaagaaaaatgttagaaaaatcccatctaactacattctaaatcgatggagtaaagaggcaaaagcacgaaaaacatttttttatcattcagagccacctaatgaaacagtcaaggaatcgattggaaagcgatatagccatatatgtcgtactttccgtgagattgcatctgttgctactgatcatatagaattgacgttgtgtgcaaatgaagaagccattaagttactcaaaaaattggaggaaagaaaaggagcttttaaaatctaatgcatggatgcttcaaacttcagatattgaatttgtggggtaaaaagaaaagctcctgttggacgaccaaaaaacaaaaaagtcggacaccatggacgttatatgagtgttcttgaaacaaaaaaattggcgtacctcaaaacaatcaagtaatgcaacaacaaagaaaaaattattatttcaggtatttgatataatatattcatattagttatgtctaattttcatcgaaatgtgacttaatctatttatactaactcttatttaaaattgctaaatacttcaggactctacccaattataagtcgttaccaccaacctaaccttacaaattggatcattttttctacaagtgttccaagtaaatacttaaattcttactatttatatttgaattatttgttattattttaataattttatattttatattttgtaggaatttgaccaaaaatatggtggttcatcataaagttctgttatcttgctttttttttttgttctccaaaatattatgctagattgattttctttcttcttttgtagaatcacaaaatcacattcatattatgcttttgatgagccattattttattaaggtttcatgtaataattttttagtaactgaaatagtttcgtatgcaaaacattctgtctctattattaaacttcttgtattatttcaaaattgctaaatctaattataaaaaaaaaaaaaaaataggagatgatggatgtcaacgttaatgagggtgaataaccagattttatttcctttttcgttttcttaatttattatttagtttaaatataacatgacatggcaagtttttattgggtaattgaaagagaggtgaataaagaggttcatcttttaggagtgaacccaagttttgttcataatagaacgcactgtatagagtactcccctgcttttctcgggtttccaaaggcccgccactccttactcgacagctcaaagctgaccagagtcctcgtttaccctacatgcactatttagttttgcctactcatatcacacttttctttatctattttttattggttgattctcaggtacataactgacttcggtcaacccttacttgacaattctgtttttttttcaggtgagctaagaccgaagctagctctcttgaatttctccggaaagaatgaacttttccagctcactctgtcaatccactaagatgcgtatagagtaaataagcactagaaataactttttcagtacaataagtcctcttctccacgatcacttttgtttcttggatttgcttctccagtaattccattttgaaattgaagactttttcattgggctcagtatcataattatcccaaaatccctctttattatagcttgtttctttaaaaaataaagcacattgtttgttaatgtacttatatgaatcaaaacattagatagaatactagtcaaatctcaccattgtcttataaacctacaataacactgaaccatttattcacatcctaccattgagttatatcgggtttgaatgggtagcggaagaaaagcggtctgtcagtaaaattgagacaaaacacattagtttccattcacaaatattaacaatcttctaataataaaaatattactgaactgtttgtggttcaaaagtgttaacacaatgtgttatataatgtacgtaatctaaacactacgacttctaatggggaaaactgatctagcagagcggattaagcggatcaaatagaataaatgtggttcgagcggttatagcggaacaaatatagatcaagcggttctagctacccataatatgtttgaatgaactcatatcaaatatttacaaagtacaaaaagctaatatattttaaattatttatgaaacctaaagatatacaaaaaaaaaatatccaattaaaatatagtattaaataaataaaaaataattattattataacaaaaaatacatgtatgagatgaaaattttagattggagtgtgttgaaaccagaaacttatatcccaaaaataattaaacatacaaaccattatcacatatgatagtattgtgatctgattacgaaagtaaaaattattaattttaaatctaactctttgatttaaaggacataagtttttgaaaactgtatcagttgataaaataataatttattactgtttgtatttttcttaaaatgaattaagtctccaactacacatagaacttgaatgtttaaaaaaaacgcatgatgtatttcagtttttatcacaattcacagctgtttttctttttattttattttagattttttttttttgaaaacaaataacactatgtggaggacaaacgcataccaaaacaggtagatccgcacttcaaaagtaaaagcaatggaaaatgtgtgttttagaactatagatagcaaacactattttctatattttaaattaaaagtattaaaaatcatactatataacacatttttctctctttgttattgacaatgcaccataccgtatgtttctcaactctaaaaacactcctctatttgatatgcattcatcaatacatccgtttgcacaagtaagcgtcttttcttaacacacatatatatacatacatagatttgattacataaaaaaattataaacttatatttaaaataaaagaaaaagaaaaaaatctccatatccaaatattaaaactaatttacatttttgatattaatatatgtagtagaaaatttcagtaaataatatatacactagtagcaattttaaatatttatataataagtaatataacaatgaaataccaatgttaatgaataatcttgtattaaattattttaatagtttaatgttattttgtattatgttgttaaatatagatatgtcgttgagagatcgatcaaacacaaatgtttccaggcaaaaaatacaaatgtttcaagcgaaacgacaacaagggtaaatttggttatttaatttctttttcaaaacattttcatattaagttcagtttttggaaatatattaaactaattctacaaattttaaaaacatttgtagacaatattatgaagaaaaaagtttgacagatttgtttgatcatgcaatttctatgaataattacactcttaaagatcataggctttttaaaatttgttgaaaaatttaacctagaatttaacatgaacgttaattatttatttttcaaaaacaaacttgatgagttcaaaaaagcatataaaaggtgaagatttctaatgacttctaccggtggcttagttgattaagaaacatccatgatttctgtaaaaataattaatacttcaaactaaatatattagtcttttagattgcatatataaaaaatgacaaattatgcgacttttacttatttattaatattttacattattatactatatataaaaactaaataaattttataaataaattatagagaaatttactagagtaacccatattttatacataatgacccaaaaggaatgctaaaaatatgagttatttgagtaataattatacctaaattatccttgttttcctttacagagaaaaataatattacagaaatgccattactctttaattccagcaaggcaataaaaccacatttatttacgaaaatgccatcgtcgtttttggtaaatctgtggctcttgttgcgacggatttgttatcgatcacagatttgttggtcaaccacagattttttacaacagacttgtcttgtaccacagactttactgtgttatgttacgccagatttttttttttcgcagattttttaaccgtgactgatttgtttcatatagtctccacagattttatttaaatttcaaaagtaagaatgttgaaaccaaatctgtcactgatttgttttccggaccacagatttttctttatggtggcaacagattttctatttgcacccaaaaatctgttgtgttataacagatttgttaacctcgaaaaatgttatataggcatgacagagttgttttgtgtaatcacagatttaattaacttgttaacaaatctggtgttttacaacagatttttgttaaaaaaaaaaattactacacagtcacatagtgataacagatttgtttttagtgatgacagttttgtttttcagtgtcaaagcataacagatttactcatgtcaatgttatggccgatttgtttatgactagaataacctttttagtaataacagactttttttggcagatttatttttaaaatttcgaaattttttgttatatgagatttattaactagccctcaattaaattatttcccggtctgattgtatgttaaatccggtttgactggattttttttttttttttttttgaaaacgttacgacagacttttattagctgacagatttttccgaaatattaccatatttgagtcaaggaatattctcgtaacgcctagggttttcttacggcagatttgtttatgttatttccatatttgatgtttaatgcattaaattgacaataaagtgtatatttttctaaaatcaaaatttttggtttttttccttattctacacatatcaactatttcaataagatcttttgattgcgtttccttttatcaatttatatttttaatttatatttttaatataatcttaatttatatttttcaatttatattcttaatttatattttttcatatcaataagatccagtttttttcgggatcttattcatttatatttttaatttatttgattcataatttgttttttttttgctaaaaatatggtattaaggttgattaaggttaattggtctttttacttaaaattggagtcattttagttaatcattgccaagaggagtcattctagttatttttgttaaaattagagtcaatctgagcaaatttcagtaaattatatagacatttgatccaaaaaattgtagaattgacaagattcgagatgaactacgtcaaaatgcaaaagaaagtgttagcagagaagagtgacaaaagaatcatatcaatgtggatatttgcaaattctgctccatctaatattcttttgtttcggaaaacgttggattgtcgagggtttatcaaaatatggaagaatggattacaacattctttcagccgagcagattgccaaaagtgtttcacgctaaggatttcagccaagcctcgcgattgaaaatcctaagtttttatagtttatattttgttttttttgataaatatttggaattagtgatagatatggtcttcctaccttgttggagttgataaatatggtcttccatgtgataatatttctctttatttaactttttttttttttttttgacaaaagcatgatttcattcattcaaccgaagcaaaatattacaaagatagaaaagagttcccagaacatcaaagctttgaaactcaaagacaaagcacacgtcgatgcaacatatagataattaggataaaacgactgtagatccacaaacaattggagacatgagctaaagagcatcttgccacaagcaacgtcatggttggtcgcaagcacttccacgaacaattcgggaggttgatgagtggtcactgtcatacgacaacgtgacgttaaaaaggactccataaccgtaggtctcgccgggtcaagacgcattacatcttctacacaagtcagaagaatggttaggaaaaacagacatgaaggaatggttctctccataaaggagaacaactttttctctccataaaggaggatggctgcatcaataaaatctccataaaggggttgattgcaaaccgcagaccctcaaggacgagtagaattcgttgaagagctttaatacaaggatccaagacttgccaaacacactcaataggttgcgagacggtaggaggccaagtcagggattgaacaagtctaacttgtggttgtttgattggggtgcgtatgatccagaaggaagcgatgtcgtgcgtcctcgacaaactctccgaataagacgcaagtaacggtccaagatataatcctgtcgttaacgaaattcgaagagcagatccttctggaaaaagcttgtaatctatatagatttgattgagactaaaattcccgtatgaaaaccaacctaaagatttctttagacccttaccatggtaactaataggccaaacagaaggtgtcgctactttgcaagattggagtccacaaccaactaatacaaaggaactagacttaaaacaatttgggcttgaattagcttttaaaataacagacctgggccaatgtggtgagtaagttgggcctgaacaatcattgggccttggtgagataattgtgaggttaggatccagctggcgaaatgggtccggcccgtagagagagaacaccttcgagattagggttttgccgctcgccgtcaccctctccgtcgagccattgctcccaaacaaaaagcaactctccgatatctcgactttgagacatagaggatcaagtagaagcgcatggagaggtgaattccttactatcaccgatgttcagtgaatcggtgcttcagaggaagctgagttagatccataacgaagggctatgacaaagacaacgatatagtagatctttgttttggacgatgaggcgccgcttgatttagagggttcatcttgtgttaatttcgagctttgtgctgagtccagagggtgaagtggacggaggttcgccggaatcctcctcctagctctgtcgcaaagtattagattgtcttcaaacatcaacacaagaaagagggttcgagatgattgagtaaaaagccaagattgacacaaagaaaaaagctttaaggaaacaaagttggagggggtcgagatatcccgacgccggcaagcataagctttgccggcgtcggacagaacgattgggaaaaaagtctcgaaaatagtgcctgggagagtctcaacagtttaaatttatcaaccactagttcaaaacacttaaaaactttctctttatttaactattgagctaaatagtcaccatttaacatactttttacttctctggaacttattcatctcattcagcttatttttattattcaacttatagttattcaacttatcattattcaacttattcaattggttcaatttcttaatcactatttgcagcataagtctcatgtaactagatgtattgaaattcaaaaaattataccaacaaaaagtctgtcatcactaaaaagattatcctaatcataaacaaattggacaataacataacatcacatgagaaaatatgttatcctttggatccgaaaaacaaaactgtcatgacttgtttttagtcatgaaaaaatgataggttacacaacaattcaaaatattaaagatttaggaaaatttgagaagattacatacaataaatctgcgagatattacaaatctgttataactatatcgaaagaagtttgtggtgctgcaaaaaaaactttcgaacaaaatctatggtgaaccaaaaaatatgtggtccaaaataaatatgtcgtaacaagaacctcaaatttaacaaaatcgaacaaaaaggcgaagtgtcagtatcgtaaataaatttctgcgtttttgaaaataaatactttttattaatggcattcttgtaatattattttttcatacaaagcaaaacaatggtattgtagacataattattgcccatataaccaatattttgggcatgtcattctaataacaaaacacaaaatatgggtcattatggtaaatttcccaaatatttatgtgatgttttggaataacaaagtaagttctttcgtggatcaaatttttgttgttgtgataacttcatctttccatccatcgaaatgaattagagatttagactccaattagagtttcttcgatttttgatatttttatgagaagaattagataaacaaaaaatgtgtgatatataaaacaaaaactgtgtggtatatacaattatatgttctcacttgtttatagtgaaaataaagatgatgatgaattttgtttcaccaaaaaggtaaataaaagttattaataaaagctcatatttatatataaaaaaagatggtttttattttaaattttcatacaatgtatttttattacttattagtcacaatctatagaccaatttatacaaaagtcagtattaaaaaaggaaaattaatttctcaacgtaacaccaagatattagcgagaacatctaaaagaagtagctactctattaatattttcctaatagtttatttgtttcacatctaaatttgttataactaattttcatggaaccatttcggaaaaacgttatatttcccaaaacaagaactatcgcatcatgccagatagagcccaaagtataacctcgatctatttatctccgaaacaaaagttataaatctatttctccctgaaacaaaaattatgtatctaaatttctccgagttaatagttctaaatctataaacccaaattattgggtgttggcatgatgtgatagttttcgtggagaaataaacagttttttcgaacatttcaaatataatttgtaacgatttgcacactatatttaaaatgttgttcatattgttatatccgcttaccaactaacttatttagttttagataatattataattctattcttacatgtatcaaaattaatttttatttttgtatattaaaactcttatagagtttttattaattactagacgtttaaaattagatttactcatatttcattttgaacaaacacaatataaaagtaaaatacagttgctgagcaaaacataaaaataaaggaaaaataatatatagttgtcacgagaataatttttcgaaattaaaatacataaaataaaatctataatattaattatccaatttaatgatattcaccaaaataaagtaattatctatactctaaatatataaaaagtaatttttatagaaacaaactttctttgttggtagttttgtttctattcaacttttagtactttgaagtaaatgtgtataccataaaaaaatttggcatctcttccccaaatttttttaaaacgcgcctcttcacatttcgtgtccctctcataaaagagccctactctctagactctagagcattcctctctccgatctttgccgttgctctttcgaaatgacgcgtgtcaaccagcttccatgcgactgtgtatctacggcggaggaatctctcacttccggcacgtgcattacccctacgcacgtgacttccctttcgtctcctcttgatcgctccggcgatgttgatcctcttcctgtttccgacgaatctggtggctcgaaggccgatgaatctatgactgacgcagatgagactaaaaagaggaaacggatactcagtggtgattgtgaagccgatgagaataataagagtgacggagaaatcgcgagtctcaatgacggtgttgatgcgtttactgcgatttgtgaagacttgaattgttctctgtgtaatcaattgcctgataggcccgtcacggttcgttctctctctctctctcgctttgtgttttgcctcttatacttgttaatgttagtgtatatgattgtttacacttgagttactaatttcacacaattttggagtagattccttctttttgtgcttaccatttatgatgaactacatttatagataacagaattgctaagttcaattaagttaatacttattatatacctgtttttgtatctctttttggttggatttgacattagttagttttgagttacttctcaaggtaacaaatctattgtgtagatgaaatttattagttaagagtagtagtatatgggttgtttctttatcatgttgaaattatgtgtgttggacaagttggtgttgttaaattttgtagtatatgggctgtttctttataagagtagtagtatagtagtatagtagcctaacttatatgtgtagttgaaatttatcatgttggtgttgttaaagtttgtgattgtttacagttttttaagtattaacttcttcttttcaaaataagtatttcagaaaaagatgaagactattacgttaggctgatggataatcttgtatgtgtatttttcttttcagatattatgtggacataacttttgcttgaaatgttttgacaagtggattgatcaagggaatcaaatttgtgctacatgtcgtagcacaattcctgacaaaatggctgccaatcctcgtgttaactcgtctcttgtgtctgttatccgttatgtaaaagttgctaaaactgctggtgttggtactgcaaatttttttccttttacaagcaaccaagacggcccagagaatgcctttagaaccaagcgcgctaaaatcggggaggagaatgctgcaaggatatatgttaccgtaccatttgatcactttggtcctataccagctgaacatgatcctgtcaggaaccaaggtgttttagttggagaatcctgggagaatcgagtagagtgtcggcagtggggggttcacttgccacatgtttcttgcattgctggacaagaagactatggagctcagtctgtagtaatatctggaggttataaggatgacgaggatcatggagaatggtttctatacacaggaaggaggtttgcttttctttactcctagcttttggtccatttgactcatgtagattttacttctctcatgtgtttagaagtatctattgtcctgtttgttgacatacttttgtttgttttcgtcttgaatatatgtggatgtgtcacccagtagagggagacatttcgctaacgaggatcaggagtttgaagacttgaatgaagctttaagagttagttgcgaaatggggtatccagttcgagttgtcaggttagcagaacaaaactccattgctctctcacattctcattttttcgttaagtttccgatatcgaaagttgtaccacaaaggtgaaatgtattgcttttctttgcattgaatgaagaatagagttatgctaagttccatagatacaactcttaatatcagtttccataatctaggtcttacaaggataggtattctgcatatgcccctaaggaaggagtgagatatgatggtgtatacaggatcgagaaatgctggcgaaaagctagattcccggtacacacatatagtgaaacaagcttgtaattttttccctgccctttatatgcattgacatgttcttctcattccataggattcatttaaggtctgtcgttacctgtttgtaagatgtgacaatgagccagctccatggaacaggtttggtctacttcttagaagcaccttttcgatattctgagtttaacactgtgataatattgcagtgatgagagtggagatcgtccaagacctttgcctaatattccagagcttgaaacggcctcagacctgtttgagagaaaggaaagtccatcatgggattttgatgtaagttccaattataacagttagcgagtgagacgtgagcagatctcgaattttctgtattgtgctgataataatatacgcttatattatcaggaagccgagggccgttggagatggatgaagcctccacctgcaaatcatgagcagagggagagaatgaagatggctatgacatgtcttctcctttttgtccttatcattctcgttggttcatcatctatcttatatcagtattagaagaatcaccgacaaataacttgttggtttgatcccttagttgtctttcttgttaccaacagtcttttctagttctctcactactcaagtcttggaaacttgaggttctcttggttagtgaagtcggattcatatttttttgtatgcttccaacaatttgtccctgctctcaaaaggtgcaatgaagtttttaagtatataatgaattatgttaggtcttcattcttttgagcaatatttttaattactaggatttagaggactcagagacataactgagtaagatgttacgatgtttttttactaccacataccactgctgcatcattggattttaaaaacaaacaaagtaaatgttggtgcggtttaagtctcccaatctttcatcttcttgctcccttttggttttgcgattggagcatccatgcctgccattttcttgttgtatttttcacgtagaggatcattggaagtccacctgcacattcattcattttatgtaagtattattatcaaaatcagcagctcatgccaacacaaacaggttcacattcacatgcaataatttagttcagttgccagcttactgtttctactcaaacgctaaataaatcagatttcagaagcctaaaatgagagctatgaagtttatgcctaaccaagatgcaagaaaagaaacgctaaaagcaaagaacttacgggttactccaatctgttgtgtcttcattgacaaggtgagtccatttagttcttccactacgaccaaagtgcttgacttgcataactttggggagaatcgatttgtccaacctatcttctccggttggagcagagaagtcgcgctgaaatataccatcggttccagcagaacctgcctcatcatcaggatctgcctggaagaaggcacccttatggtaatatttctgcataaagttccatttctttttcggttgagctgaagaaggtttcggattcttcctctcccaatctctcctctcctgctctgtcatattcctcaacttctctatttcttccctctctctcagcatagcttcccttgcatctctttctctcttgatcctaccaatctctcttgtcttccaaacttcatactcctcagcttcattgagttcgtcatcagtttccacatctccaatattagcttcctccaatagtatgttcttccgtatctcttcatctttcctaacttcctcaaccacaatttgctttgtctctatttttctttgctccaattttctctttgctaattcctcaagagcttcttcttcagcctcaagcctctctcgctctgcaattgtatctctctcagctttcggtacaaaaacaggcttaatcaaggcaataccaggcatatcatcttccgaatcagtctcgtactcagactcctcctcctcctcttcttcctcttgtatctcatcttcttcttctaaaggaagtaaagcagcctcctcttgtgctcgtctaagattcttctccttaattcttcttcttctttcttccaaggcatcttcatcatcatcctcgtctctattctcttgattcctcgattcttcttcttccgtagatataatctcagcctgtctaatacgccgatgatcagctctaacttcgtcacggttttcaactttagtctgagctaaacgccgcagccttggatcatccttcctagcaacacccaaatcatcattctttggaaaagctctatccaaaacagaaaacttctgcatcctaacatcatcatcttcttcagcttcctcagcccactccggagcttttcctggccaataccttcttactttagtctgtccaataccaccttttagtttctcccttacagcaattgcagattcactcactcccgctgtgaccgacatatttgcacttgcaagtaaccaaactcaatcaaattagctatctgtctctgcagcacaaaataatacagggattagattcaagctttgcatcattagtattcaccagaaaaggaaaggaaaagagctacttcccctaatcgatcctcaatagctaaaatcttaaagagacaacaacaaaatgcattatgtacaatgcatatcattgatgtgtgtgtgggtgagtatatcaacataaacacaccaacatgaacaatggacgctagagaaattcgaagattgcacattttaacgaactataacattttcaatagtatgtacatacttaatcaagtgtggtgaaatcaacaatcccaatagcgaagctattgttcatacataaacacaagcacgaaagagagtaaactgttacaaagttttgtcttttgacaaatttgcatacagagtcaacaaaaagtcgatatctttctgtacccaaaagcataagaaccaataagaacaaataacaatagaaatgattaatcgagaaaagccctagaatacaaattcgtgaaaccctaaatctcagaacaaaacaaagatcgatttcgcaagatttagcttcagtagaaacagatcgacatcatatgagatcgaattgataagaaaatcgagcttaccaggagatgagagagtttcggttagagattgcggaggagacggcccttaggtggcggtctcagcggcggcgataaatgtaaccttgacggcgagagattgatgttggcccaagaccattaaggcccaatacttcggttcgtaaatttccaactaaacgtgaattttagtaattttttgtgaaattaagaaaattgttattatttttatatttttcctaaaactatacacagtaaaatttccataaattaataatttaatatagatgagactatggtattttcttaatttatcaattgatccaaaaacaaaatttaggacagaaaaaatgtattaatttatcgggtattaatttatcgattattaatttatatgaggttttattagttccataaccttaagattacaagatatttacaaatagtataactaataacaccgagttttattaaaaaaaaactatgaaaaatgtagtttgagtagtaattgtgaaacaaaagaattgaattttggtttacataactttagagatggtagacgggcgtgcccgcgaccgaacggaccgaccgcaacatgctcgcttttccattgatccgcgacgaaccggaccgcagacgaccgcggtcttgaaaagtgagtcctaacccgccccgcaaagcccaacagttagacagaccggcccacggtctttagaggcagaagaacttatgtttggttgattgacgaagttgtaccttgtttctatgaagtgttagcttcaaggaatattgtgaaacgttatgtattagcttgaagtacttaaaacatttaagtcaaaagtacttaaaacagaaattctaaaacagtacaaaacatatatatgtgacatgtttaccttagcagcatagatctcagagtcttgcttcttgattttaaattcgtttttcaagttacagactgcttggtgacttttcctgtgagacaccaacaatatcatgtcaaatcttgtcgcatttgtcaagagttgaactgaaacttaaactcttgacttgaacattgcaaaacagagatatgtaacatgtcaaaaacattacaaaacacttgactttagctagattttctaaagtaaaaaaacattacaaaacagagatatgtaacatgtttaccttagtattagagctttgtgatggtgaagcacaaaagatcacataggagaactctggatgttcctgccacatataaagctccaactctaacttccatattgtgaaaaacatgactcttactatataaaacgttgtgaagaaaaagaactagtcactaatccacacaaaacatattgataaacacaaaagacacatgaaacagggatttacaggacatcataaacgttcttataagaagaatatgtgcaactatcaaaattaagctcagtccatgtaggagacaaactcaaagtcacctgaatcgattgggacacgttcttcttcatcaacctcaaaggtcgtcgtcgttgccgtatcaaaccgtgtttttgaaatgtatgatccgatacatgaacatgcttcttctataaacgaaactctaagtcgtacacattggtatagttatagagatgacttcatcatcttgatgtagggtttcgtttatagaaacagcctttgcaacgtttgctatataatcaatatgaagcttaagcatataaaccccgtaaaaaatattcaaggttcactttgttcagttcataaaattatgtttttaatggttgacgacaaaaaccaaaagagaagttctaagcgaatatattaagtcatacatatagcctagaaaaaaataattgaaatcgttgcatatgatttaaaaaaccttagatatatcatactagagacagtcacacgggaatggttcaaaataatattgtaaaataagttttaattgttgtttattatatattgagaaatgtttaaattcttttgtagttgtaattgatttatttatatttcatattattataataatatagaaaactagctataattgtatatattaagtaatgtttagatatttttgaaataaattatattctatttcatatcagtaagaggaaatactgatttatagtttctgagaaaaaatatgtgtagccatttatagaaaagagcatttattaaattaatttaaatataaaatagtgttcttttcatgtttatgtttacgagttcaaaaacaaattcgtgtgggcttggcctcttggtttaaagcggacaatatcatattagagaaaaatatttgggcttggagagtccaacaattgatattagagcctatgtaaaaaaacgtggacctaaagaggtgggtttgggctccatgttcggtatggaaagagttctcaatgtaacacgataagaagagtgcttcaagttgtccttgcaaataaggaatgccagagcctggtgctaaggttttgcttgaggggagggcctaaagttcggggtttggtttgaggagataattattgggagacaaaccaacgtctcacatcaaaaaattagaaaatattagtctaatatataaatcatgtttaattccaattagtagtgataccttttggaaagaagacaaaaataaatccgcgcgggcttggccacttggctcaaaacggacaatatcatattagtaggagagttgacttgggcttagaaagacgtcataagatttgagagttaaccatcaactttaaatattggaaatcatacataaaccacaagtccgttaataaaactgtgacatatgatttcattctttaatattttgatacattgttatgaaagttttagaaccttaaccgagtggaagaaaactttggcccatacaactctagtctagtggtagttgagaattgcggaaaaattgaaaggacttaatcagattcgatctaccatgaaaaaagcaatacaatatcagtcgagcgcatgcatataaatcacaatctttcgtcacctactaatttgtcttaagttgacaaaagttgctttttacaaaagtaaaataaaaagctt

SEQ ID NO: 553 - DNA, 118737 bp, Arabidopsis thaliana
aagcttattcgataccatgtctatgagaccacacttattgcatattacaagcttcaacgattaaactccaaagtaccatttaaattcattttgacatttttgcggctagctctctaacaaacttagccgcgaccattgccgtcatgtcatcagcggtatcacgctgtggattgtactcaacaacatcagcccccaccaaatctccctgaaggttgtgtaatatgttaaggacgtctcggaaagaaagacctcctggttcgaagtgggacactccgtgcgcgaatcccggatcgagacagtcaacatcgatcgagatatacacgcccttcactccttcccctagtttctgtacaaaccacattcaatatatgacttaaaatgtaccaaatgcacaaaacatctatagggagtgacaaagtgtcttataaaccccgaaccaaattccttaaattgaaacagaaacgaactttgggattattgttgattttgccatttttcatagaaatcttttgaaattgccatttttactaaaagtttaggaatatgccattttataagacttagaaatgtacgttatttggaatttttttggtaaaaatacgtagtttatacaaaatactaaaccctaagaacaaccacacctgactaaatccaaacataacgaataaaacgcatgttaaatcatatttccgtaatctaaaaatggcaaaatccacaaactattcaaaaaggacaaaatccacaaatatcatcccaacaaatggcaaatccataattgattccccgaacttttctttcaaaccgaactctaatttacaaccacaacaactttatgtcttatctacaacttagaaattgatacataccaagttttccaacatttggcgatcttttgagaaggttcgcatctcatactgttctactccaaacctcttgccttgttcccgtccttctttgtttatggatctgatcccaacctaaaatacagttttgtttctctttaagagactatctttcccagagattgtgatgtatatacaacaaaaaagcgaaccaacctgtaaaagccgccgcgcatagccaccttccatgatacgagcaaaagaagatgcatgagagtaataattgccttcaaaacggtcatatatatcgggatgtgcatcaagatgaagaatatccacgggtcctccaagtttctccgaaacagctctcacaacaggataagatatggaatggtctccacctatgaccagcgggcgcaatggttcctgacacagcaaataagacctcacttacttcattggccttaaacaagacctcacttatcggaaactttttagataaggtggagtaggactaggtctaatggtcaaagagcttacctcttccatcaccagcttcacagattcacttactactttcataagtctatcatcatcaacccccatttctctaatctcttgtaccggaatatcaccaacatcacttagaacacgtggatcttttagctccttccctaaaatttatccaacaaattaaaataaaaaatgtaccacacataaacttgtagtaatggatgattcaagactctataaacagaatcttattgagtaataataagtaaaaaaacaaatattatcagctagattgttgctatacaaaacatgaaactgtccaacattctaaatacaagttttgttataccttcttcagtggtggagtttgtactaccacaccaaatagcttcccttacatgaggaggagccaaggctgggccttcaagaaaagaagagttgtgaccaagtggtactccaagaagagctgttgtagcttttgctcctcctatgagtcgcactaactctccctaaaacaatacatacaaatacaataatctatttatttcatattacagaaagaaaagaaaactttaattagatgataagccttaataaaacaatgtatatactttgagttttgccctttcacggatgagagttaacgaagcatcaatgacacggttctgccctgtctcgaccaaagaagttggcaaggaccgcaaggtcgtgaacggcgcagcaatgagtctctggaaatagggaactcctctctgcccaatcttccacatatctgatttgtagtaagtcagtgaggtataagttattcatttttgattgtatgttcttatatactaaaagaaaatgataagactttgatatcttagtgaagtttagaagctggtatcagttaaatttgtaacacttgtttaaaacatgtttaaaatctttaccctacatatttattataagctttatacgaataatatatatatatatatatatatggtatttgtgtattcaaaatttttatagtcgtaataatttttcaatgaataataaaagaattaagattgctagttagatatatatttaatttactaatgtaatgtattgtaacttcgccacttcgggcaactacgtgtggccggaaatgaaaacttgtagatcttgtgcttatggatggatatatgtattcagccctatatagggttgattgctaataatacatgagaaacttgtttcaacaaaaaaaaaaaaaaaagagattgtaaaatttgtaattaagtaggacctttcttttcgtcggtggttgaaacaaataacatgatagcattggaaaatatggttacatttttttaaattatggttacatctttttttatttagaagttgcacaatttttattttgtcattttgctctttgtttttgccattatgtgacataagaagagaaacaatagtgaatacatttgtttttacttttactatttcaatattataacaattgttatttaaatatattaatatttcatattatgaattaaaaaatggtttattactccatacatttatttattttttactaaattaatttcattttttattaatttattataatgtaaattattcaaccgctacaatgctaccattcaagctaaatatttaaccggtcttttttatgatagcacctttttcatcctactatttttaaccgctttttttacaactgctataaaaattttaaccgtctcgtttaaacgtggttatcgttacttacacccattgtttaagatatctacacatatttaaaagtccataggttgcgtaaattgtttttttttcattataaatcatataattttttaaaattaatattttcaaccactaacaaaacactcttcaaaataagaataattaaaaagtaagaaataataaatttttgtataggatagtgagaattaatttaaaataaaaatgtttttcctataacaacttttaaagtaaaacagaagaagtatatattttttttatgtggaaaatatagagtaatgggtcgatggaatgctagggtaataacaacaaaaacgtgcgcgcacttctctagataataccaaaccaataacgtaacactctttgcttcttttagattagaggctcaaaattattatttttaggttgaggctttcagaaatatgcattgaaacctctctccacaagaaatctaggaccacaacacttattattgaaagaacaaatctgagctatacattgcatggttgaaaattgacggacaatagtttttgcaataagatgatatctacacctacatattagttgttgttgctgttttttttctttctcatatatcttatttgctgatccggtcggcttcgataggaagaatgccccgatgttttacagagtgaatttctcccgatccatgtagaattgggccaccacattgcatgatccgagtttgaaatgctttcaaattaatgtcagggggtagttaggccacctacatttctgactactagataaacatttgggcgaacatccaagtaacagacgtcccatatttgttttcaggaaaaatcgaatttggatctggcagtttcacctttcactaaagatttttctatcactagaccacaaaaacttgggcatattagttgtattattgcagttctcgtttaattaagatttgtattattttctgtctttgattcatattattcatagtcggatgtgagttgcagaatgtggtttgagaatttgaatcatgcgataatttttgaagtttagaatattatgattgttgctatacaaaacatgaaattgtccaacattctaaatacaagtttgttataccttcttcaaaggtggagtttgtgctaccacaccaaatagcttcccttacatgaggaggagccaaggttgggccttcaagaaaagaagagttgtgacttagtggtactccaagaagagctgttgtagcttttgcataggtgtcagcactaactctccttaaaacaatatattctataatctatttatttcctataacagaaagaaaagaaaacattaattaaatgataagccttaataagacaatatatactttgagttttgccctttcacagatgacaatgaacgaagcatcaatgacacggttctgccctgtcccgaccaaagaagttggcatggatataacaggagatgataataacttaaatgaacattgtatggatttatggtaataactaattataaaatatttgccatcaaataatatatttgctcaagtactgaagttggtttcaagtcttgggttaccataaaaaatgattgatgtatgccatgactattgcatgattttttggggatataatgaaaatctgaatgaatgtctattttgtgacaagccaagatatcaacatattggggaagaacatgagtaccatataagaggatgttgtacttgccactatctaatagattgagatgcttataccaatcagaaagaactgcggcaaagatgaaatatcatggacaacatacaactataaatggaaaaataacgcgcacacatccgatgcaaaagacgtagttgctgatgttttatcccagaggtacaccctactcgctactcttaatgttaagcttatgggatttaaacaaataaaaatcatttatgaaacttaccatgagttttaagagatttgtaaagcttgggagaagtttgcttctggtcattattttagataagacgggtttctcttatatgagaaccgtttgtgtgttcctaactgctctttacgagatttatttgttaggaaagctcacaaaggtggacttatgggacattttggcattactaagactatggaagtcatgtaagacgaattcagttccagatcaagtcgagaatgtcgatcgacacactcttggtgtcgatcaacaccagttgcggaccatcaaaaatctaagacggttaagagtttgaagaattggaagtttaccccagaagattttttaattgatattattagtccttgcacgttttaagaatatatatatatatatatatatatatatatatatatatatatatatatatatatatagattttaggtcattgtttagacctatcaagttttctatctccaaaactttgttctaagcaattcatatattgaaaatccatgttttcaaagtttcattagagatttcaataccttacagtgaagagattttttctaaactattttcttcttttgatattgtttatgctttcttattcaaacatgttatctgtttctatgatcatgtccgagtagtttgcttgttagggttagggtttctcactagggttatagatgacttactagattgtccatctgttaggatatctgtaggattcttcatctttggttgtttttaatggtagttctagagtagctaactagaacttgatctcaggtagtatgtaaattccggatggctgtctattactaaaactactatttgatgagccgagtttgtagatgtgtaataagaatcagtctatctacttatgtgaacttatcaaactcgattagcatgcatgtttagaattaaggatttgcggaccaacattcataatctttagtattagacatagtgagtaatgcatgctaacaccggttactctataatagtgatttaagttcaagaacgtttcgataacatcctagtcataattcgatctactaatcatctgttttctgagaataccataagcttaacgttttttttatctcgatacttatacatattgtgtgaacaaaagagatttgtgaattcgatccctaattgttgcaattgacctcttaatttgagagagtagtctagggtaatttgatcccatataaaattgggtgccgttacaaagttcttaggaatcaccattaggtttagtttagagattttgtctaaacttttatttttcttttgatacttacacgtttcttgtttttcttttcttctgtgtttcagttgtatgcctagactcataagaagctcaaaagaaaaggacctgatcaatctgtctactgatttgggcaaactagaactcactggtatgtttttatatacaagcgcttaatggaaagtaacccactagtatgttttcatttttcttttctttcacataagtttttcattttatttttctcctcacttcaattttgaatgccactggggacagtgacgtttgagtctaggggaggcgcttactaactatgcttttatttttgagtcttagtatttttcgttgttcttatctttgagtcatttttcttttctaaagaaaaaaacgttattattgagtctagttagttagaaattatgatctgtatttttttagattattgcctggttgattaatgttggaggttcggctaaatacgactaatggaaaatccagaaggtaaaccaactgactagaggatatccacttttccaacataatccatttaagctggagctaatctcactgctctttcttttacctcatcaaaaaggatagtatttacagaacttgactccttctttatacctgatgatgagaccaatgtgaaaaagaatagtattcctctctaaaagaaaagagaaaaagagcaattgaaatgatttcctgtagtgtaaagggttacagatattttctttgatcatattatcttaaattctaaggaatgatcaattgcaaaatgttaaaaatatacggaggatatttatccgatgaagcgagttgtctaatatccaaaaaaataagtctgggggagagaaaggatacaaaagaatgatagaagggttgatttatcatggtataatgcaagaatgagtctagaaagttcttgaatattagcttgcttgataagacccagcgatgaaagcctgttggatatagttgtggaacttaggtatgaaatttggaatgttgtgtaagcctagggataattatgtggtgggtaggatttgattagacttgttagacatatgaatttggtttgaataatcaagagaataggctagagaatgttggaagttcctgtgttttcaaacctcttccacgggttcgtttttgtgttttgcttgagggcaagcaaaagctaaagtctggggtagttgatatacctctatttctactaattttagctatgatttagatatagattttagaatctttttgttatttctagattctttaagagtcttttaaagtatttaatgattgagacaataatggagataaaaaggtttttggaacaaaagctgaaggacgaattgagttccagatcaagtcgagagtatcgatcgacacacttttagtatcgatcgacaccagttgcggtccagcaaaattctaagaaggtttagagtttcaagaattggaagtttgcccgaaaagatttccttattgatattattagtccctgcacatttttaaaatagatatatatatattaggtcattgtttagacctatcaagttttctatctccaaaactttgttttaagcaattcatatattagaaatctctgttttcacagtttcatcagagatttcaataccttgcagtgaagagatattttctaaactcttttcttcttttgatattttttatgattttttattcaaacatattatttgtttctatgatcatgtttgagtagtctgcttgttaggtttacggtttctcattagggttatagatgatttagtagatcacccacttgttaggatatcgataggattcttcatctttggttgttcttaatgctagttctagggtagctaactagaatttgatctcaggtagtaggtaaattctggaaggttgtctattactagaactactatttgatgagcgaggtttttagatgtgtcataataattggtctatctaattaggtgaacttatcaaactcgattagcatgcatatttaaaattagggatttgtggaccgacgtttggaatctttagtattagacatagtgagtaatgcaggctaacctcggttactcaataatagtgatttagttcaaaaacggttcgataacatcctagtcataattagatctactaatcatatgtttattgagaataccctaagcctaacgtttttatcttctgaatttacatccatctaatatgctatttgcttgtttttgtttctttttatatttcttgttacttgttttgcttaatctcgatacttatacctattgtgtgaacaaaagagcttttttaattcgatccctaagtgctgcaactggcctcttaatttgatagagtagtctagggtaatttgatccaatatcaggaactaggccattgttctctactacatctcatccgcaaaccgatggtcaaactgaagtggttaatagaaccttaggtactctcttgcgtgtgttgattaaaaagaaccttaaaacttgtaaagaatgcttaccacatattgaatttgcatatgataatgtcgtgcattctgtttctaggtattctccttttaaaattttgtatgagttttaaccccatctcacctttggatccaatccctttgcctttgagtgaaagagttagtattgatggtaaaaagaatgccgagctagtgcaacagatccatgagaatacgaggagaaacatagaagaaaagaccaaacgctatgctaagcaagctgataaagaaagacggtggaagatttttgaagttggagatcaagtttggattcacttaagaaaggagaggtttgcatctcaaaggaagtccaaaatcatgccaagaatagacgatccattcatggtaatcaaacgaatcaacgataatgcctacaaactcgatttacaaggtaaatataatgtgagttttagcttcaatgtttctgatttgataccttttattgcaaatgaaacagatttgaggtcaaatcactttcaagagggagggaatgatatgatcatggacaacactaaggatatggagcatgaactgggcttgaacgtgagcttgtagctgaggaaggagctaagcttgtagctaagaaggagcttgtagttgaggagaagcttgtagcggaggatgttattgtcacacctacttgtccaatgactttatctagagttaagttattcaatcaagccattggagggatgcgcaaccacatttgggaccgaccaaatgacttgagctaagtcattacctctttggttttgatccaagctcaaggacctcatcaagatggataaataattcatgaatgctctttttccctgtttttggttttgttccaatggggtttccaaatgaattttttttgtgaggattatgttttcactttatataatccattttggtgattcaagacccaaacccacctaaataagaaggcatttttgtcacttttgcagttgagttttttttttaaaatttaaactctaatttaaactctattttaatttttgttttgtttctaagcaacgttagagcatgttccaagacttgcctctttatcttctcttttccttttctttatattcttcttgtaaactcttttgagagcttatcttttttttttatatccaaaagaaagatcattttgtttgtgtatatatccatcaaaacccttagtctcttttggtacgtgtatccaaaggatctaagtttatgtatcgtgaagctcttctgcaagcttctatgatatccatcaatccaatccaatatatccatcatcacagcttcacagcctaatctatcatttgctcaatttaagagtgtcgagtccttgggacaattgtatgacgacctatccgacttggctttaaggaaaattcgacaaataaaacttggtagagttagtgtaaaaggcagcaaaagggataattgattttgtatgagacgaaagaataaagaaacaaccggaatgatgatttttaatgagataaaagaaaaaagaaacaaattaaatctaaattttttttatatgaataacttcatcaaactaaacggtctaaattcgagttttagtttttagttaaacaaaaatctgaattttctttatacttctaggaaattattttgtctacatcagtttcgtcaatttggtttcatatttcttctaaagcctagcaaaaactctaaaagaaaattcaaatttcgatcacctatgctaagtaaataattttaatttattctacctgcacaaataccatgtcatatgaattactttcactctattatctatgtttatcacaataaaccaaaataatagaagaacattaaataataaatttttattataatttttacaagaaattacaatgccttatttgataccactcttagtgcaacgacaaacaaattttttacacctagcaagatttttaccccttctaaaacaagcttttccgcagtcataacaaaaactcattacgccttgaagaaaagagtgcccgagatgtatatccactagatattgatcaattgaaggactcactgctggactatcaagatatgttgtctcttttgaattcattgttttggtaattatcgatgtacctataaaatttccaaaacatattgaaaattattatattaacatttaagaaatgaatatatatatatatatatacacataagatcttaattaaataaatttagacttacatgaggaagaaatgactagaagagttaaaaacaaaataattgtcttcattcttaatgtaagatttaataatattggaaaaataatattttaaatatcttttaagttttgtttttttcttctaatgaagttattaaaaactagacaatgtgatatttatatgttcttattaaaaatatgttacgaaaaagtaattgttctagtaaacgttttatttttttattaatgaaagataaggaaacacttatgtttggaagagtggtttcatttctaaagttttttattttctttacaacatttactacttataacagtacattcgagaataattcgcacgtaaatgtcctaaaatttggtttatcagactttttttaaaagaagattcttattaaatttactaggactagaactttatataagatctaaaaacaatattaaaatttgattagttttggtgatattacatgtaccgttaagtatattaaaaaaattttactgcctttttgcaataatatttttttatgttggttatttttaaaaagacccattttcttgaacaaaatgaccaaattatccatcatctaatgacaacatgtaattagaaattgaattttttttgccaaaatttacttttcccacaaaaaaaaagaattcacgccaaaattattttttccttgccagaaaaaaaagtttctcgcaacaatttttttcttccgccaaaacaattcacgcccaaatttgcatttaaaaatttttgtaaatttttttagaactgttttaatacctttgtaaatcttttaaaaaactttacaaaattactcagattagtaagttagtccagggtctctaaggttttactcttactgctattgattcccaaactatacctaaacaagcaacaagcaaaactcgaaacaacaataaatgcactaaaagacttaaacgaacaaacttctattccatcctagtttttaggcctctacgaattcagatcatccctcaaggcattgccacacactcctaaacacgaaattctaaaagagatcgcatccctcaatactacatcgtcatgttgcgcccggtcaattgcaaagtagccccgagcctttgtaagctataatgctacggagtttcacgcaaagaacagcagacggatcggaagacatgattcgactaatgctaattagctatccactcctaaccaagaacaaataaacaacaaaaagttcccaagtaatcggacagcaccacagttatgttaccgtaaatcggacaagataactgttatctttgtcggaatttgggcagcataacgtttataccatatttgaacataatgcaatcataatataaaacaatgaatcactcaataattatcgccaagtatgatctactaacctcctaagtttcataattatttaaaataaataaacacattaacatgtgctacaacacatgtccggaacttacgaaacttataggtgctccgcgcatccttgggaaacagctattcctaccccttgaatccattggtatttttctcctatttggttatctaacataccataatcatacttgattagggactaatcggcgattgctaaaaataaactacgatcggaaaacttaccgacttccaaatcagaacttttctcaggattccttagcgaaactaacttagagcgtttctagggtgaggaatttctaatgggagtcgaaggtttatatagagagctaaggcagtttactaagctacttcgccgttaggtcctccactaatcatgtctcttccgacaacatgtatcactgagtcacgattgtcaacaccaagcagcgtccgttgattaacaaccagactgggagcatcgtgaagttgacaccctgacatgagtcattgcccttgtcgacattacccgcatgcgagacatggtcgtttctctcccacatattgtcgtagcaacttatgtacctgctcgctgtcgttaagcaggtcgacgaggtgtccgattgtcggccgcacaataaccgcacacgccggcatgggtcgagcatatgtccaccgcggtcgggcacacgccatcgtgggtcgagcagatgtccgccgcaatcgagcatacgctagtacgggtcgctcacacatcgctcacagaccgttcatggtaaggtctttgattactttcttgtcccaattctaaaatccgttcgtgaatcatttccaattgcatcacaaaggatggcgagtttgaatggtcttaaggatgagacgactgtgggggatatgggggtgataggatcgtttgtgagttattttaagaaggaggtggagcttattgaggcgcctatccccaatctcaacatggatgattatgtgatgattgagttagagcttgcacatgatgaaactcggtggaaagattacgttgtttacgtttacatttgtgatattttgtttacgtttatatacgttttatacgttttgtttagttagagattaccttgttctccaatctctatttgtctggactcgactcttcttggcgttgggacggagttttatcttgttctattatcaaatgacgatggagatcagattgttctgagtacatccgtgatgtcccccattgttccatccttcacatatccgaacttgcctgattcgccactcacctcactatggagagattatgattgtatgcgacgaggggatgctatagagacggagatgggagtgcttgcgactcttgcactcgtactttgggaaccatattgtaacacatgtggggaactgggacactgtccaaggatgtgtcgtttttatcgcccatatggagatctggtgatttggttccgtttgtgtgacgggactggaaactatgctagtgtgtgtctgatagtcatagcaggaccacctgagggctcgtctcgtatgtttccttccactttgactgatgcatccacctcggaatctatggaggattactggactagttctaggtgtccttgtattatgtgtaggaatatttacagttaagttcaccataacaagtccaaagcgaaggtatgtagggtactaaccctcttattgtagtatagtggcttagaagtctagtgtggaccaataaagcccttcgcctagttatataacttttaagatggtttgtacttgtataatttttaggatgggtatacttgtataattagaaaatgcaatatgtataacataacaatttaggaatgtaatgtataacttaaaagattgtaacttaaatgatgtatgaacttgatgtctaatattatgatgtaattttctatgtttatattttctgatattttgtttacgtttatatatgttttattgtgtgtgtgtgtgaaacgcaaacaaaggaatcggcgtagaaaaccatttagatgttaagagttagaaaaacctattctaagtacaagcataagtttcaaaaatccaaaaaaaaaacttagaagaataggtggaacctttagtacttttagaattggaactcataaatcccaaggaaattgaatcattgagtagatggtgtgtgcattgcccaaattttcttgataacgtaaagtttgtttctcaacgttaactcaaagaacaatatttaacaattcccaagtaggataagagaaatagactagatttggtgaagtagaaaggaagtgaggttgtatgaagaagtataaaaaggaggtagtacaaagtcttgcacaatggaacatcttaaatatatatatagaagaatcaaatgggaggaatgatgctaaaatgaatcatgacaagaagaatggcgaggaatgacaaataaaaggaaatcgtcaacctctttaaaggacaagaagttcaaagaggttgcaagaaaataatggagaagattatagaagctaccacatcaaagcaaggtgaacaatgggtagtcactaagtcataaaaattcgaggaatgaaaatgtaacattcctcacctagactaagactcgctttggcggagtccatcaccaaaagttgatcgaagctaaagaatcaaaagggatcgaaaagagctaagtaagaagttgttttggaacagtttggggaagcattaggaagacttaagaagaaggagtgttgagaagataagaattctaagtcggaaacgcttggaagtgtcgccaaaagggtaaggtgacaccactcatcatgaataggcaaagtaagggttgttattgagtaaaaataggatttgggtgagagaaatagaagttgggcaaaaaaaattaagtttgggtcggtagactttagattcggggcgagaaactaatcgagaaccttaccgtgaacagtcagtaagctatgcgtgagcgacccatactggcgtgtgcccgactgcggtggacatatactcgacccacgatggcggatgtccctactacggtagacatatgctcgacccgtggcaacatgtaaggctattgtgcggcgaacaatcggacacctcgtctacctgcttaacggtggcaagaaggtgcataagctgctacagcaagatgtgatcaagaaacaatgatatatccatatttttactgtttttagctttgattttggtataggttttagagtccttttgttatttctagagtcgtttctagtctttttcagatctttacatgtttgggatgcatttggagattatggagcatgctggagcaaaacacacaacttaagttgcagaagcagttcgcagaccaaaatccgcataggtgtcgaacgacaccacccttggtgtcgcgcgacaccaatacctgacggcaattcgaagacgcaacttattgatgttttgaagatttccaaattcggctcagaactttatcctatttctaaagaaggcccatcacgtgttttaggtcatatatatagttttaaggtcattgtttaaacctaagcttggagaggctaatctccttatctcttttgtacttggaagcaaaaccttggagactccctttagagaaaatctttctaaaccttaatctcttcttgttttattcattgatttcttattcaatcatgttgtttgcttcattcatcatgcttgagtagctttcttgttaggtttagggtatttcattagggatttagatgatttaatagattgcccccttgctaggttatctgtaggattcttcatcttgattgttcttaatgttagttctagagtagctaactaaaacttgatattagatcataggtatgtccaccatagatacttgttgtttgaaccatcatagaggagcctatgcatttaagaaagaacaggtaggctcatagaagggctctggtttagatactagctgaactaatcaaacttgataataatgcatgctttagtataggatttctcggcttctccggttatcttagctctaagtatagagagttttgcggaacaccaccggttactctaaaatcatagtttgagttcgagaacggttcgataacaacttagctatttctagatctactatcatctatctcctgagaataccctaagcatgacgcttttattattttgttttcacaactaacaatctgctattgctcacgttttgtttctctttattttctttactgtttcacttagcttaattcgattagccattagtttattgtgtgatccgagaactttgtgaattcgatccctaagtgctgcaactgacttctttatttgagagagtggtcataggattaatttgacctatatcaaatttggcgccgttgccgaagttctatgtgattcaccattagactaggtgtagaatttttagactaagtttttatttttctttcttttgtttctcacgcgtttactttcttctttttcctgtgataggggaattacaagatggaacgcagcaaactgccggcagatttcgacagtgtcgaacgacaccaccagggtgtcgattgacaccatctgcagaataaaccagctaccataggtgaattcaacatagctgatcttttctactccaatcgatcagcgatccagctacctccttttgcaagagaagactttgctattatgatgaatcaccactagatcatctagaggtcttcgaagacttagtgtcctcaatcaaagcacatggtgtaccagctgattatcttctttgcaaactcttcccacactctcttgcgggcaaaggaaaatcatggttgcgataactagaagcaggtttattgaccaattggactgatacgaagaacgcattcatgatccacttccttgatgattcagtgacagaattactgcaggagaagatctcttcggtttctcaagctccaaccgaaggtttgaaggcagcttggatgagattcaaatcctatcagagggattgcccacaacatggtttccaggaaagctagctcatcaacatattcttctgtggaattgataaacattatatgtggtttttccagaaaacgtgtttcacaaaactgcgaataactcaaccaattttaatccaaatccacttttgtaaactggagaataacgataaaagacttgggaataaacctaccaaatttcgttaccttttaccatgatttgatatgtcgaaaccgttttctcccaaaccctaacgattctggttcttctccttctctctctttttctcctttataaaacgaaaagtggctaactaaagccctaatttcgagtttcgttcttttataggcacactctagggtttccaattaacccaaccaattaaaccggatgatttaaatacaaaccctaaccgattttccggttcacgggcgttacatctgagccttctcctacctcagcatctgtcaatgcagccacactacccagtggaaagcaactaaacccaatccttcatcgcaaacgttcagctcagacttcatctcgtccagttgcagaaaaaaccttagtctcgatcgatacatcatggtgtcgatcgacaccaattgttcttgacgactctgttttgattttgtcgagtggaatcgataatttcacagaggaggaggcgcttattcccggtggtgtcaaacgacacccacctcatgtcgatcgagaccaacaccacacagacaggccagtgttgacgtttgacagagcatgatcgctgccaaacagtagtgtcgaccgacactcaactagtggcgatcgacactagactcagattatcccaatataccttgcatctccacctgttactagacaagtcttcacaccacaagttccttgtcttctgcctcgacagtccaagcaggagattcctgagatgcattgcatgggtatcatggatgagactctacttcagttgcctctggttgatatagagaagttgtcacccccgctttagagtgatatgctacgagatgatgctctagagaagcaagatgacaagacaaagataatggttgtctcacaaaaggtaatcagcaacagcaagcgtccacatgaagccagtttcagattcgatgatgagaatcaatctgcagagatggtgtcgctcgacaccatcaccagtgtcaatcgacaccccaaacgggctgaaccagaactgtctactaaagctgctttgaaagttcagatcactgctcctattgcaggacctgttgtcacaccaaccaatgcacctctaccactgcatcctcctcctaaacggttaaggtactcatcccctcctcctaaatctccagatatcatcaataagagtttaaaatttccaaagactgtatcacggttaagcaagccacgagtttctcgtcgagcgcttgtttgttcttttgatgattgtgcaggtaaaaggagtataccacccatacctgagtcttaccctgctgatgttccacacttactcgatcaacctcatgcgctaactgcttatacgccagcatagatgatgagaggtctttctctgcgatatttactgccaccttatgatccgcctgatataaaaaatccagcaaagtcaagctattgacactaaacaagggcttagtgggaggcaacccactagtatggtttttttttctttttctttttcttttattttacgtttttcttattatttttttcgcttattctggatttgaatgccactggggacagtgtcgtttaagtgtggaggaggcgcttactaactacgtttttatttttgagtcttattcttattcttattttcttttcgagtcgttttattgagtcaaaattttgttaggaattatgatctctattttttatattattccctggttgattaatgctgcaagtttgactcaatccgactattggaaaatctagatggcaaaccaacagacttgaggatttcctagttttcaacacaaccactaaggctggagctaatctcaccgctcttccttttacgtcttcaaacggttagtattcatagatctttactctttgttcatacctgacattgagaccaatgtgataaaaagaatgtgttcctctccacttataaaaataaaaagagaatgagagattgacatgattttcagatagtgtataggggtaggaatgtttcctatgaccccattattatacattatttggaatgatcaattacaaatgttggaaaaatgccgagggtgcgatccagtatgctagttctcctttgtttactctctaaaaagaataagtttaggggagagaaagaacaccaaaaaatataaatatataaagagaatggtcgatttatcatggtatagtacaggaatgttagcttgtttgatgagacccaacgatgaaagcctggtggatatagttgtgaaacttaggtatggaatctagaatgttgtgtaagcttgcacagaagtacgtgttggttaggatttgattataactgctaggcatatggatttggttagaatgatcatggcaatagattagagaatgttgggagttcctgtgttttcaaacctcttccacgggttcggcatttgtcttttgcttgagggtaagcaaaagctaagtctaggggagttgatatattcttatttttactatttttagctatgatttaggtataggttttagagtccttttgttatttctagagtttttgctagtctttttcaggtcttacatgtttgagatgtatttggattatggagccatctggagcaaaacagacaacttaagttgcagaagcagttcacagaccaaaatccgcgtaggtgtccaacgacaccatccctggtgtcgagcgaaaccaatacctgacggcgattcgaagatgcaacttattgatgttttgaagattttcaaattcggctcagaactttatcctatttctaaagaaggcccatcacgtgttttaggtcatatatatagttttaaggtcattgtttagacctaagcttggagagactaatctccttatctcttttctacttgggagcaaaaccatgtggagactccctttagagaagatctttctaaaccttaatctcttcttgttttattcattgatttcttattcaatcatgtggtttgcttcattcatcatgcttgagtagctttcttgttaggtttagggtttctcattagggatttagatgatttagtagattgcccccttgctaggttatctgtaagattcttcatcttgattgttattaatgctagttctagagtagctaactagaacttgatattagataataggtatgcccaccataggtacttgttgtttgaaccattatagatgagcctaggcatttaagaaagaataggtaggctcatagaagggctctagtttagatactaggtgaactaatcaaagttgataataatgcatgctttagtataggatttcttggcttctccggttatcttagctctaagtatagagagtttcgaggaacactaccggttactgtaaaatcatagtttgagttagagaacggtttgataacaacttagctatttctagatctactatcatctatctcctgagaataccctaagcttgacgcttttattattttgttttcacaactcacaatctactattgctcactttttgattcctctttattttctttactttttcacttagattaatttgattagccattagtctatttatccgagaactttttaagttcgatccctaagtgctgcaactgacttctttatttgagagagtggtcttaggattaatttgacctatatcaaacagccatgtcccgcttgcaggtaatgtgtcgacaagggcaatgactcatgtccgagggcaatgacacatggctatcgatcaatggacgctgcttggtgtccatggacgtgactcagcaacacatgtggtcggaagagacatgatcagtggcggacctggtggcgtagcagcttcgtaaatcgccttacctctctatataaacccttgactcccattcaaaatttctcaccctagaagcgttctaattttgtttcgctaaggaatcccaagaaaagttccgatttggaagtaggtaagttttccgatcttagtttatttttagtaatcgccgattagtctctaatcaagtaggattatggtatgttacatacccaaataggaggaagataccaatggatttgaagggtaggaatagtcgtttcccaaggatgcgcagagcagctataagtttcggacatgtgttaaagcacatgtttgagtgtttatttcttttaaataattatgactcttaggaggttcatttatgttttcaaagtagtttgacatatattacaagttaaaggtttttctcttaggcaccattatcgaggtcccaatttagaatctagtttttgacgctggcggagttgttgctcgacggcctcaagatgtctcaaagcatctctcgttcttttgtctctttaccgttctttgcaatgctgttgtatacttttgccacgttcctaaccaccattgttctttctctttgattttgtctatggtggttggagatctttttcgaacgttttccaaagattcattgctctgccgatcctttcaggcgagatcctttttcaccttcgtctggtcgacatggtcgccggtgagatctatcttcagaatctggttgctcgattttccggtaacggtggctccaactctaatatatcgtctctctcacctccgggtgaagacatatataaagttgccagttttttgtcatacttatcctcaacgagccagcgtttacaccgcacctccctctttgccgctctcgagatttgtcccaacaaatcagagatctacttggccattcattgtcgttgcggcttcataccgtcgcctcatcctgaacatgcatgaaaatgagaaactagggtttctagttttgacttttgagttacgtttgggcttacagcaagatgggccggatgaataaaaagcacaacccagttatcctattagccctagcacctatctggttcaagccttttatccacatttaccacaagccatctcctttcctgttttcactcatctgttccacaagcagatgttgtggtcgtgccggtgaagattcgaaggatctccgagatgcggtggtgttacccatgtcgttcttctattcttccccaatcatcaatcgtggacccttcgccaagcccaaggtatacaagtcattctcagatttttcaatcctatcggctgaattagaactcctattagtggttgttagttcaaaccccttatgctatttctgatcaattctaaggatttacgttggctcaagatcagttttcttctttagggagatacaaatttcaaaaacttcctcctttatggagagatcactttcaaaaccgtcctcctttatggagaaaccaatttcgcaaccctcctccatcccggagagaatgatatcaccaccatgctcctctttggagcgaattattgaaagcgacaatgcgttaaccgtagaagccttttatgaccaaaagttggtcttggatttgttgaaggttggcttcaattctgaatccgtacaggcatccaaatatattcccgtcattgcaagcttttcagagttgagcatctcattgaaaaaatcttcaagcctttatctttactttcctttatctcctcttttgaggatttgatttgaatgcaacggtttggaacaaaaaactttatagagttattaaaaacaactataaatcattttaaaacatcttaaaattcttataaagtcttttaatacacatgtaaatactttaatcctcattttaaacatttgtaactatttcaaaatctttataaatcgtttaaaaccattgtaaaaggttttaaaataatttacaagagcttttaaaggatttacaggaaagctcaactctgaatagcttttaaaatccttttgaaactcttataaagtctttaaaaacattagtaaatcatgttttaactcttaaaaaatacatttttaaatattataaaacatttgtaaatctttttgagacattttaaaactcttgtcaacccatacaaaaaagttttaaagagatttacaagagtttttcaaagatttttaaagcattaagggttttaaaggattaaaacccttgtaaatcctttaaaaatatttcaaaaaccctaataaatcttttccgctaatttctctttgcgggaaaaatattttggcggaaaaatattttttttgcgggaaatattggcggagaattgtttttggcgggaaaattatttttggaatatttttggtaggaaaatcaaaattttattttgttaacctaaaaaagttttcaaaataggagtaaaatgatcattaaaaattaaacgagggtataaatgaaaaggccaatagaaagcggcataattaataaggagtagtcttggaaggcatatcctagcaattatcaaaatgattttaaatacgaatgagcaggaaacttgatttatgaggcatccaaaataaaaagtggtatcaagtttactctggttctttattttaaagaattaaatctttaaaattgtcaaaaaattacaaatatttaaactttattaaaagttaaacattagaaatttcaaattattagaaagttaaactttataaaaaaattaaatatttataattataaaacttttattaaatttaaaatattacaaatatttaaactttataagaagtttacatattataaatatttaaatatataataatacgggacggtatactacgggtgaaatcctagatataacaatcaaaatacaattataaagtttggatcgatataaaattttttaggtgattttctaaagtaccattttctactacccttttgcaataatacccttttttgttggccatttttaaagacaccctttttcttgaacaatagttcgaaattatacattacctaatgagaacatataattagaaactgaaattttttcgtcaaaaattgtttcccgccaaaaaaataaaatttcgtcaaaaatgcatttataaatccttgtaaaatttttaaaaaccctttgaaacctcttataaatcctttaaaactctttaaaaatctttgtacaagttttaaaaagctttgtaaagttgttaaaaacctaggggtgtcaaataggtcaaaattcatgggtcaactcaacccatgaaccctaatgagttgaaatttttgactcaaatgagttgatgggtcaaatgagttgatgagtcaattggtttgatgagtaaaatgagttgggttgtaatggttaatggtttcaatgggttacccaattaacccatcaagttttgtaaaattgaattaaaccaactaaaatctctaaaccaatgccaatttaagtttaaccaacacatctaaaccaatttaataaaattaatatttttccaaatttcttaaatatacaagcgatgaaattgagaaaaagtaaactcgtaatttttccacaaaaaaacataaacccgtgattttcccgccaaaaacgtaaacccgtgattttcccgctaaaaacgtaaacccgtgattttcccgccaaaaactttaacacgtgattttcccgccaaaaacgtaaaaccgtaattttcccaccaaaaacgtaaacctataatttccgccaaaaacgtaaatccgtgattttcccgccaaaacgtaaatccgtgatttttccaccaaaaacgtaaatccgtaattttcccgccaaaaacgtaaaccggtaattttcccgccaaaaacgtaaacctataattttcccgccaaaaacgtaaacccgtgattttcccgccaaaaacgtaaaccaataaaaagtggaatccgtaaatatcctaagtttgatgataatgaattaataatgataattatttattattgttttataataataattaattaaattattacttaaatgggttaacccatttaacaactcagtccatcaaattaaatgagttatggttgacccaactcatttaacaaaatgagttgggtcaaccataactcatttaaccctaaactcatttgattatgagttgagttgagttgggttacccattttgacatccctataaaaacccttgtgaatttgctagtttgaaagtattttgcaaacatttatacccgtctttaggagtcgtaaattagttggacaatttccaatccttattcttgttcatcttacaaagtcgtgtactattttctatagagttgttattgctttttgtcgatcatctatttgttattgattcaaattatttccatataaaaaacttttatatttagactgcttattgatccctaagatatttctcaagtcattttgtttacaaattgtatttttttcttctaaaaataagcgaatacatataatttcatatatcaatttatgttaaataagaattgtcatttattttacaaataataattatagagttttaaaagatagtaactggttcagttttgtagaattgtaaccaaattgatctgaaattggagtcttgtttgtttcggttcggaaaagcaaatatctagaaatgttttcatcatttcataattatcgcatctaaagaattaaaccaaactataaacgttaaccacaaatgagaaattgaaaaacaaaaaaaacaaacatttaggtttaagtcgttaaacataatttgtagcagtgaaattgagctatccgacttggcttgaatgaaaattcaaccaaaaaacacttggcagagttggtgtaaaaggcagcaaaagggattactgattttgtatgagaggaaagaatgtagaatttaaccggatcaatgatttttgtgagatgaaagaaaaagaaacaacatagatctaagttttttttatatgaacaacttcatcaaaccaatcggtctaaattagggttttaatttttaataaaacaaaaatctgaacttattttatactttgacctcatggtttttgtctacatcagtttcgtaaatccggttagatatttcttctaaatcctagcaaaaactctaaaagaaaaaataatttttcatcatctatgctaagtaaatcattttagtttattttactacacaaacaccatgtcatgtgcgtgactttcacattattatcttttttttttttttgtcaaggactttcttcattcattcaatcaaacccaaagaggggtacataggatacaaagttttgaagcataatcttgcaaacatacaagagatggataagacaaacaaaaagcttaaaggataggtccctagaatctcggaaacagaggctgactagcaacatatcacaagcgagactaggatgtgtcaaagacacttccacgaaagattcgggaatttcataaatagccattatcaatagattttgtggcgttagaaaggggttcttagcctcatgacgcgccggtgcgagccccgcagcgactaagagatttgagcggtttctctccataaaggagaagggcggagccgaggtgctctccacgatggaagatcttggacgccgaggaccctttaggtcaagtaggagtgcagttcgagatttgaatccggaggttttccgagagtaatcgatcatggttcgagaaaattggaacacactatgttcaacaaagtaaacaaaaatcatagaaaaacattaaataataattttttattataaattttacaaagaaattacgagtcctatctaagtttactgatagtgcaacgacaaacaaacttttgacacctagcaagatttttaccccttctaaaacaagcttttccgcagtcataacaaaaactcattacgccttgaacaaaagagtgcccaagatgtatatccactagattttgatcaattgaaggactcacggctgggttatcaagatatattgtctcttttgaattcattgttttggtaattatcgatgtacctataaaatttccaaaatatattgaaattattaaattacaatttaagaaataaattatatatatatatatatatatatatatatattacataagatcctaattaaataaatttagacttacatgaggaagaaagaactagaagagttaaaaacaaaatagttatcttcattcttattgtaaaacttaataatatcagagaaaaaatatattaaatatcttttgcaaatcttgtaagttctgttttttgttataaagtaattaaaaactagatagtgtcatatttatatgttcttatcaaaaatatgttacgaaagagttattgttctaataaacgtcttatttcgttattaatgaaagatgaggaaacacttatgttttcaagtaattttttatatttataacgtattctattttctttacaacatttaaaaattataacaatacatcgaggatactttgtagctaaatgtattaaaatttggcttataagaatattttaaaagaagattcttattaaatttattaggagtacaaagctatactagatattaacccacggtatatcgtgggtctatattttattaaaaagaaaattgaatttttgtttttaagatgatctataattatatgttattagtttgtttaattaaatgtatggtacatagcgagacaatattttataacttaaattttaatttatatttgttttgttaataatttttttattttgtttagtgtctaagaatgtataattgtatttgattgttaatttcatctatagtacacaatcatgtataaatatcgacctaaatccgtcaatcttaggatttcacccatagtataaagttcaaatgtttaaacttcttataaaagaatcgtatgtgtttcataaaataaaatttaagttgtattttttctgttaatagtttttgttttgtttagtatttaaaattatatatttatattttgattgttaattcaaagatttcacctatattataacgttccatattattatcgacccaaatccgttaattctaagatttcatctgtagtataatatttaaaagttctataagataattgagatgtattttaaaaagttaataaaaataagttttatttttttgttaatatttgtttttgtttagtatttaagattgtataattatattgtgatcgttaattctaggatatcatccgtagtataatgttctgttttattatcgacctaaacccgtcaattataagatttcagctgttgtataaaggttaaatatttataatattttgacacttttttggagtttccattctttgaaataaagaaccggagtaaaccgagtacttttagttttggactctgagatctttattcttattagaaaattcaataatatcagagaaaaattaaattaaatatcttttctaatttttaaagtttttgtttttgttgtaaagtaattaaaaactagattgtgtcatatttatatcttcttatttaaaaaagtatgttacgaaggagttattgtactaataaacgtattattttgttattaatgaaagttgagtaaacactattgttttaaaatagtggtttcagttctaaagtattttattttcttttaaacattatttaacgaattaaatataacaatacattcaaggataatgtgcagataaatgtcttgaattttggtttataagatttttttaaaaagaagattctttttaaatttactaggactataacgttatatacaagctaaaactatattaatttttttaactttggtgatattacatttaccgtcaagcaggtaagaaacctaactagagattcgatgtaatagaatgcggtattacttcaaatatagttattgttctagtagtaattattaaatgcaattaaggaagttaaatcaagcaaacaaatcaacaaaacaaataaatcaatataaaaacaatctcatcatagcaaaactttgaattagttttctaaaatttttttttttctttttaatggtcatattttataacataaatgtgtaattataaatttatggaaaatgatattgcaaactatttggctaatcatttgagttgatgtgggacgataaacacacattttttatcaattgggtaatatatgtctgttttaaaaatttcgaatcataatatatacgaagaaaaaaagttgagatatttctatactttatgtattatatgatgattcaaccatgttaaaaaaaaaaaaaatcatagaagaatcataattttaaatcttaaccaaatcttctaaatatctatattgttaaatatgaaatatcatatgtaagggattgaagtaaatttgttaccgggtcagtaccaaatttgtcgaatcacaatttaatccacccgattataaatgtacttcaaaaatattatagagattatctcaaaaagaaaattacaattagaaacgatttagaaataaattaccagagggatatagatgaaacacattttatatactcatttttatttcaaaatttaagtttgtaaatgaaaatcaatacaataaaaacactaagaatctctccagacttgacacatcagctttttgagttgttctcatactgacacatcattaaaattgtcagccaatgtagattatttcaaataatacagctcagtttcatcaaccaataataacattctatttttccacgtcactctctatatcagcagaacaaatatatgggcctaggcctaaccaaaataaatgattaagagcctcgctgatttaaacacagagtttgcggttatgaatgcgagagtttgcggaagcgggcggttgcggtttcaagcgttatgaaacattttgaataacttgtttaatggttaaaaattagagcgtttgcaaaaattttatgactggttaaccagcaggtgttactacagttaaattaaaattaaccaaaaatatatataattttaattatacaaagtataaaaatagcaaaatattaaattattatgataaaatttgaaatttaaatataactaataataaaataaaattcctcctaattattcaaactatttaaattttatattcacaaaacaaaacatcatcagataatatgcaaattacaaaaaaaaagaatatgacaaactaaaaaaaaaaatcaatttttgaattttctggattaataatattattacaatacttagttagtacttatcattcttcagtttggtttgatgctatgattttgatacagaaaaaaactagcgttttaagagtataaatcactaacatatatggaagttttcgagaagaagcttacgctgaaaaatgttagagattacatcaacaatgtcatctgtaaacaagcaaaaaattgttacaactaaggtgtcatttttgttctttaaggtctaattgaatttatctctaaagtatggttactctcaaatctccaatgatcaattcgatttttgttcctattttttttgttcttcaacatgcatttattatctattttttggttcaaaagcttatttccgaactgaatgaagtcttagcagaagaaaacaccgaggaaaaaggtcaatggaagaagaatcttaaagaagagaccttaaagattttcgagtttcttcctcaaaatattcaagggtcttattagattttctaagcgttattatggatcttaatcaataactaataatcatttgagtacgttctatactcctatgaaaaaaaaagttttaattttcaaattctgaaaaacaaaaaaacatagcttttagctttttatggctcgtcaacttataaatcaagtatgcatgtggaacattaaaatcaaagatgctaactccatataacatattcttaagaatttaaattgactttagcctcacgagaataagcacctggtgatttttaactcttttcacttttattttctaattactctgtaaatagatgttcgtaaagtaaaaaattagcttccaaaacttataaagactatatggatcttaataaaaaaaattaacaatgcattatgttcccaatcactttctaatgaatctttttgttctacatatatcatgaatcatgacaaataacattcaatagctacatgcaacttaacaaaatatcattaaaaataaaagccctagtaattgtaaagatgatagataggtaaaattaatcagttaaaaatgttatataaacatgttatataaacatcacttgattttccacatgtatttagagtcagttttttacctaattaaaaaattaaagtttaaaacaaaaaaaaaactttgcctaagacaaaattgtaacttgggcccataaaattgtaacaaaaacaatgacccgaaataaaataaaaatataaccaaacccaacagaaataaaaaacaataattattcaataaaatctttttaaaaagcacctcaaaggaaatttgtaaaaaataaaaataaagagtgaaaacaaatctaaataaaaattatttctgttacattcttctttacttcgttaataaatgaagctaagtaaaaaagaaaatttattttagttttatatatcaaatatgcagtatgtaataaaacataagtaactcaaaagaaaaaaaaaaacaaaaaaaaaaacctcaaacaaattttatatttatacatataaaaatcatgaaaaaatagtaaagaaaatatgaaatatatatatatactattaattgggaatcattttgtgaactacaatattgtgagggtagtttaaaattaactaaataaatttttacatggataatttagtaaattaactactactaaatgactttagttttcataaaaatcaggctactgattttgaaataatatatacagaaacgtattcaattttggtaatatattttgagatatttccggaaacaaaaatatcaatttaatatcatcatatatttgagattttaatatatttcctcaagaaactacactaataattttaaaaacatttatgtattaaaaaaaaattaaattttttttaaaagataccttcaatgcttcaatctcttattgtgcacgtaataaatccgtgaattaataaaaattccttaattttagagttgacatattaaaaataaattaacttataagatattctaatatttgtttcttatcaatacctaggggtgtcaaaatgggtaacccaactcaactcaacccataatcaaatgagtttagggttaaatgagttatgggttgacccaactcattttgttaaatgggttgggtcaacctataacttatttaatttgatgggttgagttgttaaatgggttaacccatttaagtaataatttaattaattattattataaaacaataataaacaattctcattattaattcattatcatcaaacttacgatatttacggattcaacttttaacgaatttacttttttgacggaaaaattataagtttacgtttttggcgggaaaattacggatttacgtttttggcgagaaaattacgggtttacatttttggcgggaaaattatggatttacatttttggtgagaaaatcacgggtttacgtttttggcgggaaaatcacgggtttatgttttttggtggaaaaattacgagtttactttttctcaatttatatttaagaaatttggaaaaatattaattttattaaattggtttagatgtgttggttaaacttaaattaacattggtttagagattttagttgatttaattcaattttacaaaatttgatgggttaattgggtaaaccattgaaaccattaaccattacaacccaactcattttagtcatcaaaccaattgactcatcaactcatttgacccatcaactcatttgagtcaaaattttcaactcattagggttcatgggttgagttgagttgagttgacacatgaattttgacccattttgacacccctatcaatacctaacaatccaatcatatttaaaatgaatatacagtagaaactctattaataatgttgggaccatgaaattttattaatttatagtgatattaatttatcgtataaattaatatatattaatttatcgtataaattaatatttattaatttatagaaatatttacgtaaaatacaacacaatattttttttaaaatgtttgttaatttaattttctatatgttttgttgtttgcatatataattatgtcagatttttgtttttctttgacttctttaatttatttttcggcgagatattgtgtcggtatatctacgacattaacgtggacgtaaacacaaacatgaagcttaatcaatttctctttacactaatcttagcaatgttttctcaaataaaagattttacaaaatcaactatgacggatcaaatacgcaaatagttatgtgagtacaacatagatcatacaagttgtattttaaaaagagttgtaattgtagcttgaacaaaaattttatataaaattagtcttaaaatatgtacttaagatctatgattattaatttataatattattgggactataattttacataggaatttcaaaaaaattattatcttattatcttatcgattttggttaatttttacattgggaccgacataatttattaatttatcgtatttattattttatcgagtattaatttatagagtttctactgtatatattattattcattattgtaaaagatcattcgatctagggctgggcaaagaaaccggaaccgattacccgaaccaaaaccgatgcgaaaaatctaaacaaaaccttatcactcttctatacttcactataaaactatttttctctacttctttcccaaactaaaagatgaaccatatctatatatttccttttgtactcttcttaattcatgtcttttccatgttcatataatttgttggtttctacttttttagaatctattggaaattttttcattgagatcactattttgcagattatgttcatgttatacataaaatcatataacgaccttatcatattacacttgcagatttcttgaaataagtttttttattccttttggtttcagatgtgatcattttacatgttattcttttctcatgaattattactttttttttgtttttctagaaaatagctgaagacgctaattttaaggacaatttttttttttaatgaaatgttactattatgatatctatgctattatataatttactaacccaaaaaaaaaacaatcttaattaaaactttttgcaaactgtttatattaccttctacacatcttattttcaaatattatgataattgataagtttatgatatatatactattatataatttaccatttatcaaaaaaacaaataatacaaacttttatcaaaattatatgataatttactatacacttttttgtgtacattataatatcttttattaaacatttattccaatatatttattaaatatgaaaatcttgcatgtatatgcgggttagaatctagttaattattaattattaattattaaaaatataggtctggattttccctagtgacaaaataaaaatcattaaactatggcacaattctctcttaattttccacttttacgatagttctattcttcttccaaaagaatatgcgattgtgctctcatcatcttcatgtgtatatataaagggaatttaatgaaaaaaaccctcaactttggccagatccatttctaaatcctgaactatgtttttagtaaaacaaaccctgaagtaaaacctgttaataaacttaaccccacagtaattaaatattaatgggatattaatttccaaaaatcgaccaaagaacaatgacagaatccgtgatccaactgaagatcgtccacctcaaaaagttccttatacacgtgaaaaagttcaaatggtaaaatagagaacaatgaattatatttcacaagatcttccttttcaaattatttaatttaatctttgcatatttagacttgcagcaactgtcaacaagtcggacacaacaaacgttcatgcaagcgtaaagcagtgccaaaaccacccaagaaacctcaaggacgaccaaggaaaaaacagaaaacaatggatgaagagaaccttatcactcagccaatacaatcttctcttcaaagttaatgtttgacaagtctttactttagaatatcttgtccctctgaaacaattgtttttttttgtgacaaatattgttgtgttgcaacagcttcgatagttatgttggttggatttatttaagcatgactctttggattattttaagttgttgtgtctttctttcagcttctaaaatccaaactaattaagcaattcaaaatcatttagaacgtttttttgtaataaattcaaaacagttttaaagaacataatgtggtttttgcgctaaatacaaatgtctcgttgttgttttttttggaaattaatatcccattaatatttaatttttgtggggttaagtttattaacaggttttagttcagggtttgttttactaaaaacatagtttagggtttaaaaatggatctggccaaagttgagggtttttttcattaaattctcatatataaactctaacaatcaaatcttctattcttttttttcggatctaaatcatctctttatatttactttctaaacatactaactaatacatatatttctttgcaatgatcatcaattgtttcaacacgaaaactaatctgttcgattgaccatgtcatgaaagaaaccatggcatattctttctctgttatatatcacttttgtcgtaattgtttcagtataattctcgaatccccaattttttagaatagtttgttgataaaattttatttactacagtacaaacaaaatattatttctagttccaatccttattcaaactagaattggtttcttttttttgttacaacaactttctctatatatattgtaaacatttcttttcacttgttttgcttccagagtgaagagaacagaaaaatatcgagatggctaaccaagaagaaggaagcatcttgaaagctcttgacgttgctaagactcaatggtaccatttcacggcggttgtagtcgccggtatgggtttttcacagactcatatgatctcttcgtgatatctctcatcacgaagctacttggccggatctactatcaggttcctggctcctcctctcctggaagcctccccgacggcatctctgtagccgtgagtggtgtggccttcgccggaacgtttctcggacagatattcttcggatgtcttggtgacaagctcggacgtaagagagtctatggtttaacactcttgatcatgactatttgctccattgcttctagtctttcctttgggaaggacccgaaaaccgtcatggtaactctctgcttcttccgtttctggctcgggtttggcattggtggtgactatcctctctcggctacgatcatgttcgagtacgctaacaaacgtactcgcggcgcgttcatagcatcggtttttgctatgcaaggagttgggatacttgccgcaggaggggtttctttacttgtctcgtatcttttcgagattgagtttccgtctcgggcctacatattggacggcgcagcctccaccgtcccacaggcggattacgtgtggaggatcatcctaatggtcggagccttaccggctctcttgacatactattggcgtatgaagatgcctgaaaccgctcgttacaccgctctagtcgccaagaacgcggagcaagcggctttggatatgaataaagaaattttcacagaagtggacgaaaaaagatttgctctcaccatttgtcaaagtgagaactggttttcacggtttgtcttttcattcaatttcggaccaaattaccctgggaaaacttaataatggcacaaaccaaaccgtgcagcagttcgtatcggttcagttaacggcgtaaaccaaaccctacagcagttggtttcggtttagttgatgcggttcagttttgaaaaagacaaaaaaaaaaaaaactgaaacgaagaaacccgagaaaacgaaaaagagaagagagtaacggagagatttgagagagaatcagaaagcgaaacgaaattcagtatccattgcttcaaaattcgacataacttcgaattgttgggtagttgaattgagccactgaactcccacatccggggaagtgaaagttactgtttttcccggcgaagccaagagaaagttactgtttattccggcgaaatttgaacctccggcgagatagcatctttagctatagctgggaataaagctaacgacgaagtcccgaggaagcagcatggtccagggaaggagaagcgggtattaagagtttccccgcggagaaaacgctctgcgacaaaggcaacggaggaactgggttagaatctctaatttaccgtttgttgtctttgggtgtatcagaattgtaaagcttgtttgattaaagggttagaacttgtcggaatttagcatatctttaggatgaaaaattgagaagtagaattggaaatgtctgtttccgccaaaaatatgattttgagttataatctggaaaatgtctgtgtacgtacactacttcggtttgcttaacagtatatgacttttaattgcaggtagtccaagtgttgctccgactgaagatcttacagttgaagagttaccaccaagactctttgctctagaccggtacccttccgagacgaagatgaacgcgtactctaaaccagagatgtagtttcttctcgattctccatttggggaactttttaaaatacccaaaaacaaggcatctttcaatgctaagcttgtccttggactaatatgccgtcagttagtgacaaagaaggtgaatgagatgtggattgtattcggcggtcatccaatcagatttggattaagagaatttagtatcctaactggactggaatgtgggaagtatcccaagaagaaagacgttgatgatgttatcagtgtgaaacctgagtgtgagagtgtttggaagactctgtttgatgagaggtttggggacacggttccaacaattgctgatttggtgagctggctgcaggaggaggaaagcatggaggggtggaagcaactggcactatctcttattattttggttgacggtgtggtagcggcccatagtaaccccaacaggcctacttcgaagactgtcgagatgactaagaacctggagttcttctgcaaatacccatggggaagggtgtcctttacccgtactttggggaggatagcaaatttccaaactccttatgatgctcaacaactaataaggggtttacttgtagggtcttatgcactccatggcttcccattagctctccagcttttagctttcgaaacaatcccatcaattgctaagctaggacctgatgatgtacctaacaggacatttgctgagaggtctatccatcgtcttgcctctctgcgagcaatccggacatctcgcattttggagtgtgaggctgctgatgaggtgtgttaaattgtgtatgtacgtacataataagtaaatgtacattatctatggttaacatacttatttgtgtaggttgaggtcaactatattgtgaaaccagctgataatgtttgtcctccatctctttcatgggatgatgaagttgatgatccaagggttgattacattgaggcactgttgatagatgggcaccagtggcaagaggatgactgggttggaggctatgctagagtaccaaagcaggtgcgcccaccacaactagaagagacaggtaagtataagtataaaggttgtttacaaatttttttggtattgcacccagaagaaaaccaattaatagcagcaactggtatattgtagatgttaagagaaaacgaaatgcaccgggcctgagccctaaagaacctgctatgaaaatacagaaatctgaaatggactgtgataaagaagagaatgctgaggattgttttggagagcctgtgcctgagaggtttattgttgaaatgaggaggtctttcaaggagctggaagaccaaatgtatcaaatgcatgaagatatgaaagactttgtccgtgaccagatacgtgctgcccctgatccaaaaggcaaaaggacagaacaaaccataccttcccatgattcgcgggaaccacctacttctatggataaggcaccggttactgggaagaagccatcgagaaggatgtctacaaaaggaagcactggaacgagaaagtcttcaaggctgactcgtgtttctcatgatgtggacactcctgcactttctgttggctgtaattccaaagaggaagataaagatgtccctggagtacataccactgctgtcggcggaagaagtaaaccttcaaagccgaagaaaaatgttttttttgctgttgacactactgagctacctgattccaataaggaagatatgcaaggattcattgatgaacaggtaagtcatgtacgtacattgctaaatattttataatccatatgtataactgtactgtctgcttcgatacagtatggcgctaataatgaaagtgattttacggcaaatgatggattggattcttcggccgctgaagaagagatattagacactggatttttaatagttccttatgctggatccacacaatcccatctggtatgtcgtctactaatactcttaacaatctgtttaaatggtgtacgtacatattcgcttaagaagttagttaaactatgtttcaggatagaggaaatgttgttgttggtaagactgtcttcttaggttcaatgtctgggactgtctatgttacacaggaagagaggcctgtggaagaagctactgttgacaccgagatggaagaagttctatctaatgtctctgcaagagtttcagaggtagatcttctggtaatcgttatatacagatttccatgactatatgcatatatattacattaatttctccacttatctaacgcttaactctatggtagcctatgtttcaggataatggaccaaaggatgttgctgaacctggcttagttggtacccatacaagggccgatgaaatagctgatgctgacatagagatggtagacaatccatcaggtttaccttcaacatctgcacaggtatgtgttagtcacttgttctttttccatatgtgtacgcccataagactttgaaaattatttttgtttcaggaagaagcaagagatgccagtgcatcgactgaagctaatggcagcgagtcagaagaaacttatgagccttctgatggagatacaactcacatacctggcacaagtgtacgtacatttttgtcactatgttctgtgtacatatatattgtttcatacattactaaaaagtttttttccgatgataaattctacaggttgaggcggcaggagaatccaaattagtgacagggatggaagttgaaatacctgagaaacccacagtgatcccccgtcaccatttcaagtagttaacaatgtaagctaactcttgcaacaagtaaaatgtactatttactgttcaaatgtataaaatttatattatgcaggtcatacgggagttggataccaaagccgttggtgatttggctgcagctacggatgtggaggtaacaatttgtgtgtttcaattcctattctcggaatagcatacataggattatatgtgtacattatatagacttgtgtacgttaacttgcacaggtagtcatggaagagccgggtattgtcgaggggtctgtaggaactgaggatcctaacccagggtcagatgaagcagacaagaccgatattcctaaaaataatgtatgtacctattttaaacatagaaaaacgtatgaaactgttgttgacaatcctatttgttaacaggatgaatcagacaatgctactgctgtcgaagcaaaagaagaaaaaaaatcgtccccaaaggtcccaaaaaaaagtgaagaagcaacttatctatgaacaggatgatgctcatcctcatggttttaaggcaaaaacagtcttggtgccagatgtaccaactcaatagacagaggttgttatcagggctggaaatgtctcatacaatcccctggacatggttgaccctctaaaagtagaggaattcagcaatatcattaaaggaccctctgtgtaagtatattatattaaaatggattatttaatatctcaatcatcatttttccaagtcttaaggttgttatcaaatatttttctggatttacaggattcacactcttttcgggtttcgcaaagtgcccaacgagttttttgcgaaccttctaacacctggtgaatgggtcgaaagttcggtacgttgcatttatatacgtacattccttgttataaattgtacatagatgattaaatttttcgtggaagtgtacgtacactgatatattttttgaacatttcagcatttagaaatgatggcaatgttgatgtggcacaagaacggggaacagatgatagcaaacagatgtattgtattggacatgatgctgacgcatctacttaccaagcgggtgggcgaattcaagaagtgtattaataagaacaggttcaaatggggtaaattactgtccgacattgctaatggagtacacataaaccgtgaacccaatatgaagtggctgaaggatgtcgatgttgtgtatgctccgatgaactggaagagtgaacattgggttgctttgggaatcaaccttaatgaacggctaataactgtgtatgacgctttaatatcgcacacgcgggagtcggctgtgaaggcgagaatgactcctatttgcgaaatgatgccgtatttagtcagagcgatgtgccaggatgtattgatttctccatactcagttgaaccttttgagtatgtgcgttgtcctaccgttgctcaaaacccaactacaggagattgcgggccatacacgatgaagttcttggagttgcttgcgtttggacaccctttttcggaattgacaaccattcgagaagcagatatggtcttgtaccgtcagaaatactcggttgacatctacgagcacggcaagcgggaggccggtactgtgcacttgctttaattgtccaagaacaatattctggttctttgcaactaattattatgaacaaacctatcttatatatatgattgcaactacatttaatttggagattgtcagaagttaatttagtgtcctctatcatattgtcgtacacatcgttcacttctaattacataatgtaaatgtgtacgtacatatctatatgtctcgtacactgcatattaactttataacataactcaagtgataaattgatttgacagccaacgcttaccaacacaagtatgacattcatttcaaccgtaattgccccaaccaaattcacagtagtggttattaaagtgaagaaattattgacgatctctgactatctcatttcaaacatggttaacccgactcttcccgacgatttgctctcgaagatagctaagaacctggttgaccaatgctggtccgaccttggtccactggtacgatccggcactcgtggaagagacattgtctaccgtccggatgtcctcaaagatgtcaatattctcaccttgtgtaactcgcccgatgacttccaagctggagggggccacaatccctccggatccgctgatgaaggccgacatcgaccatttttcttacggtgttttgcagctaataatcccacggtcgtgtattacgaaggtattcgtgttctaacgcatgaacgaaacatcaatggagccatcaggctcttacagcgtcatgctccagtacgagcaaatgcaacacttgcatgcgccattgtattcatatatgctgggtatgattatatgggcggcttgtttctacagctcttcacccgcaaccattatccattggactcggttgccactcgagttttgggtgatgagttcatcgaggaaataaagaagtttgaccctccatacagcaatacatatggtcctacgttctcttatcctaccagccatggaattagtatgcctccttgcgccatatattgttggtgatatttatgaatggacgtacactgatagtacactacagcgtacactgtttgttgggtaaatgtagaaatgtaaatgtggacgtacactacaacgtacactgtttgttgggcaaatgtagaaatgtaaatttggacgtacactaaaacgtacacgtctagttttaagctgttattaaaaagaggttgctcataacaacaataacaaattatatatggaatactattacgttgatttgacaatatgaatacacatcatcacttaatacctttgcaataaatacaaccataacttacccaaccatatcttcaatgaagcttatttaagtgttggaatttcatttggttgaaacaccttactcctaaatatgccaaacccaaatattcctgatgatttgcttgcgaagatagccaagaaaatggctgacaaatgttggtggtacctcggacctatgttgaaatccggtcctcgtgggagagacattgtctaccgtccggatgtcctcaaagatgcaaacattttcagcatgtgcgacgatcccgacgacttctacgcggcaggccacgatccaaatgacatcaactccgaaggtcgctatagacccttcttcaaacggtgcttacaagctggtaaccccacggctatttaccatgaaggactgcgtctcgttacacatgagtctgacattcagggagctatcctacacttagagcgaattgccccaaggaacgccgctgcaacccttgcatgcgcaattctttacatatgtgctggtaattctcacatgggtggtgtctaccttcggctattcggaagcaaccattatgcttttgaatcggaggaggcacgtgacatttgtgaggaggcgctagaagatataaagaaatatggtaatactttaaaatacacatacgctaacagtttttcatacctggaatgtggtgatgtaaacactctagaagtgacctctatcacactctcatcaataactctattagacgtacacggttcccgagcaacgtactcaattgatttggcagataaaataagtaagttaatgtttatttgaaaaaattgttagtaaatgcgttgacccctaatatagcactatacatgaagccatatcgttccacttatatgcaatacaaacagacgtcaactcaaccttctgtcagaaaacgtaatgagtattttatagacgtacacggcgcgattatgagaggtacacagtagtttgtttaatttaaaagttactaatataatgcactaaatatacatccacgtcacccacccacttacattgatggttattctcctctttaaaactcatgtcaaacacacttagttgaatacacgaatccgtctaaacctcctcgtttgaaaaacaatgcctttcctacctccgctaacccctccaaccgagttgtacctaggaatccaattgccaaaccccataagcatacttgtcaactacctccccgtcagccagactcccatagagacgctaaggaacttagtctacagttgtgacatcaacacccttgcaatcgatgaattcatgacgttgtgacatcaacacccttgaaaagttctgggaaatgacacccacccttgaagctggccacgcggttgcagagatggtgatgtatcacatcagccagcttcacactgaaaatgctggccgctgggaaaggtcttggaggtttgtccacccgccgagttgcgtagggcaatgcacgttccatcatggctgcagggtttgttttttctactggtacgccagggagattgctatattctactaaaagcaaagctgctaaggtctaagctactctactcggctctactctcaagtcttttggtatgacggatgcacacatattttgcaacacatgtgtatgtttcgttgaaaaaattatgttttttgaatcgttccagtttatttatcttatgaatttccctttatataaactgcctgtcctttttacatttctggcttttgaatgaattaccactttaagtattactagatgtcttcgtgtacgtacactatatagtacattaaacttgggttatcgtacattgggaaattgcgtacacaacataagtataaatctaatagtttttgatgttgaaggcaccaaaactaatatacgtacacgatagcgtacaccagaaactatacgtacattgcgagaggatttgaacaataaaacaaggcacgtacataaaacaacaaattagattaacatttaaacggaaacaggaaacaacaacgactgaaatgtagtttggttcttatggaaacaacaacaacaactgggaaagaaaacttaattgaaatgtagtcttatattatattaaaacagagaataatggttcattccctctagctaaaaaaacaccatcgcgatatccgcaacttctggtctgtccggattggcaaccacctttgaaatagcaccatggctctcaagcttcgggttagacagttcggttaaacgccaaaagctaagtgcgacaacaaaatttcccttacccaaactctgaaagtaaccatccaagtactccgcctgttgattgcgggcttcgcactccaagacttcattgctacgttagaaataaggacagttagcgtttagagtgacattgtaaataaaacaaatgaaaagaacacttactatctatcttttatcttgaaactcagtttgagaccgtaatagtctatagtcaatccgccaacatcaaccaacgctccaacgacatctagatgatggagaaacaaagataataaacaaaagttttcaaaaatgtaataaatgaagcatcggagttattcctcctcaccgactaaaacgttcttgtaagcagatttctccaaaatgtagtcgaagggagtgaaatcgaaatctggaactggtggtgatctcggtggggcctgaacgacgatggtccgatccataaacagtatgccgtattcatgctttgttgctctgactgagtcagttgacttacggaccaagaaagaggtgatcgtcttccactcattttcaacgaatcggtctccgtaaaacggagcaaggcgacgatcaacggtggcctcaatacggttattctttacatacagaacatgatagtagacagtttaatatacaagttaagcgaatgaacgagaaaaacacataatgattcgacggaaattaccgcgtaatctgccaggataaggccgagttcgaagacgtttggcgatataaccttcttgaagactctcacgacaaagacataaattcgccacccagtgatcagaggagacaattctgagaccatatgaaacccctccatctcacggatagcaagaacaagcgaatcgaaagacaaaaaaaaattttgtgaatgatataactgtcggcacaagaaatgggtttagaatgaggattgtggataaaattaaggaagggaggagacttaaatagaggaaatctggaacggctacagttattaatgcggttccaactacacttgattcaaatttttggtaatagcctggtaaccgtcatatagggtaattataacgttgatttgacaataaacagcaacagttacgtcatttccattaaataccaacacaaccacaatatacccaaccatgtctccaactccgttcatttaagagggggaataagttagattttcaaaaaacttatttcaaattactcaaaatattgagcaaccacctctatgtacccttattacatgaactttaacacgtacacagacaaaaacgtacatagttatacgaacgtagagtttaaacgtacgtacacaacgtacatagttacaggtggattatatataaacttacgtacaccgagaaaacacagaagcgtacactatattggccggctcagaaacttgtcaccagaactagattggatttttgcacgtcttcttgttatgacctgcttgtcgacagcgtgagcactgatttggtaaaagtcttttctgtctctttttctgaagtgaagtacacaggaagttaaaaatctctgcatggtaatactcaaaatacaagtagatgaatgaacgatgttagtacatacccggttttcacctctagatgggatccttttggacagtggtcttcctggtggccgtctactgtatggaggaatgagtatcaaatccactatatgttgtgggatgacaacatctttcggatccgcgataggtaggattggttcttggaaagaatcagaaaacgtttgaaggccataccaccatccgacacaagacttcggatcaattccatgctcgattgcagctgctagagcgtgttcacatgggattcttagcttggtgtacctaagacacgtacacgtacactggtccagaacgacatgaaaatgctcaccggatttacttgtcacttgatagctccacggtccaaacatcttcacagcgtatttacctgacgcaggcaactcttgtagaaatctctcatcaacctcaggtgtcacagaagatttgcaccaagcaactttcttcctcctcgatgcgaaccatcgcattaggacatcccgaatgaactcgatcatgtaaacaatcggataagtttttgcttttgttaacacatgattcatggactcagagttgttgctagacatgatattgtagtgttttcctctacagtgaactcttgtccaatgctcaaatcctatgtcctctaggtattttgcgcatttagcactcttttcccttaacagtccaaaatatttctcgaaatccctaaccctataagctttggcagcgctaaaaaataaagcagacacaccaaacttaccataataggtggagaggtttcgctcaaggtgaacagcacatgctccatgatgcgctctcgggtaaacaacacttaggcctttgtatatagatgaatgtctgtccgagacaatccttaaatcgtcactgtctggaacaatctcagctaacttttcaaaaaccatgtccaagaagcatcggtctcaccatcaacaacaccaaaagctattgggaatatttggaagttcccatcttgggcacatgcaataaggagacatcctttgtaaggtccgactagttgcgttccatctaccacaattaccttcctcatatatatcagacctttgatagaagcgccaagagagacaaagacatacttgaagcgctgcttaccatcatcttctggtgtatagtgtaggtgtgttattgtacccggattagctaattggagaagatacagataggtcggcaaaaacctgtaatttgctatctcatccccccttacattttccactgcaacctcttttgctctccaagcggtagaatatgaaatccgcacattcagatcatttaggagcagctgtggtaaatcgacagcttgcggcccaccctgcgtagaactgtatctgctcctcacaacttctccgaggagcttataattagcatgtttattgtagttcttccgagagtcgatgttacacgtatgtgtcgtagcatacgaagtgattttgaaactttctgaatccttcacgatgcgagcagtcaaatgccatggacaagtctcatcaacgcacaccatcttcaatgttttaggacatgacttaggttgcttgaagcaaaagcattgctttatcgcttgaagatacattgtttgttgcaggacttttctattcttaaaaacacttccaacaaacaaagtttcgcctgttgtgctgatttcaacctgtgtctcatcagctcgaaaattgagtaagtcatcaaacacaggagcagcatcgttaccgagattcgccaactcgccaccatgtaacttaggaaattcattatacacttggtaagcctcagctgcggtaactaccccattatcattcagtgtcccagttgaggaagctccaataccgtcgatcacttcatccccggtgacttcgtctatacaaataagattggaatccctttgcccttcgcagcgtgtaccgtaacccaatggagaaattgtttcttcgccaggtacactaagaccagtgtacgtacacgtttccaagagacgactgaattcccctgtatctccgccatgtacactaacacccgtgtacgtacacgtttccaataaacgactgaattccctagatgttgagcagtctgttgagtgaggctgacgtcttcctcaagatttccttgtacatattcttctactattacatcgttccacttgttgtaatcgtattcttcgccaataccttcactaccgtctgtggtaggatacagggtacttcccccaatagatccatccacacaaagataatcatcacacccatcatcatcttcgttgccctcctccacttcatcctcttctgttgtatcgtcttcaacatcggcttgctcctctgcatcctcattattttcatcaacatttgtagcactatcaaacacacggtcactttcagaaacttcaccatgagacctagagacagtattcccgaacgccttcactgtattattgaaagagacgaacaagttgagagaaagatacccaccacgaaccaaaaaaaacgtttcgagacccatctgactgtcaatgtatacaggagggcgtttagtatctatcagcactgacatttctcccggcatccagtagctaattatgggattgatctcggtggacttcaaactgaaagcctctcggagtgtacggacaaagtccgtgtacgtcatggtttcctaaacgcgtacacaacgaccaaagatgccttcctcaggttcaaatttccattctccttctttgcatttccactcaccgaccatagtaaatacgggaatatccataacccacctgcatcataaattcaggagacacacattaaatgcaactgaaaaatactatacatataaaaaacaaatggaatatcgatactacacatttataaacctaaataccaattatcatttgactattttaaacaaacaaatatagattttgcaaattttctgataaaaaaatggagttcgaacacaatcaagaccctaatatgacataacaaaaaacttcttaaaagaacttcattacttacacgagcaatgcttattttggctccaaacttggtacaaaaacaagatcaacacttcttcagcagcaatgtacgttctcaataattctttgttcctgggttcatcttctttatctcaacaatttttttattaattattatcaataatttttttaatattatttgatgtaatgatgattttgcattaattgttacaatagtcacatctaaactttttgagggcattaaatgttgatgtcacttcggaataatggaaataatctcacttgtaacggaaccgaatcgcgtcaacgtgaaacaaaaaatcttcaactgaaccggaacagtatacgtaactaaacctgctaaactaaaccgtacatttcaacagttactaagagagaagcgcaagggcagaagcgtcattttgcaggcgaaaagacaaatggtgaaaaccacatttgactttgacaatccatgaaaataaaacatggtcaatgggtgtggcctgcaatttacccatatgaataaggtactcaacgtagacattgaagcctcttccgcaaaacatgaccaagctagggtttccaaagacgagattggcttgttctccaagaaattcctttgtcgtcacggtcttaacctattcggaacagctaccacatggttcctcctcgacatcgttttctacagccaaaactagttccagaaggatagcttcaccacctttggatggttaccttcggctaaaaccatgaacgcactccaggagctcttcatgatcgtcagggctcaaaccataatcgcttgttgcagtacagttcctggttacattgccactatagtttaatcgacagactgggacgttactggattcagatcattggattcggcatgatgactgttttcatgttggttttagccgtaccgtaccaccattggactttaccagctaaccggattggttttgtgattttctactctttcacctttttcttttccaattttggacctaatgcaactacgttcattgtcccggctgagatttttccggcgaggattaggtcgacttgtcacggtatctccgcggcgtcaggtaaagccggtgcaatggtcggttctttcgggtttgctgctttggttaaggctttaggtatgagtaagacgttatacattttgctggcttgctgatcacgaaatttgcaattctggagcctaaggggatatcgcttgaggagcttaccggagaaactaaaccggagagagttaaggagaagattggtgtttagatttttattttcgtttttgttttgcttcattctcgccttttgttaggatttgtcagatttttagatctttcactcttttagataatattaggtcttgaacccacgctacgtgtgggtttattaatatttgttaaaattaaaaatagaacagttaaattataaaattgaaaacacatgtcaaagagtattttacagtttaatttgacgcttggtacaaaactaatatgacatgctttgattttgagcatgggataattacgggctttatatcagattctcaaaacttccttgtattcaaaaaacaaaaacaaaaacaacacaaattacattttcttcacaaacttcctctaaatcccactttgactctcttggatctgttttagtcttccgctaatgaactcaggttagagctgtttttatcttacttctcgctacttgagcactcactgatttattttcggtctctaacccattgcaacaaacttggttggtttagagctttaaccacatgaatatgaatttcttaggttttggatccaaagtttgagttttttattttattttctatggtgtctaaaatcaaatttgatataaaaaatcataaatcaattttgttttctcatattcaattagcagccaatacatacattttcgtatttctcttcacattcatcgttttcgtactcttgtattccttctcgtcatcttaattgtcaaatatttatgactattgtcatcgttagtttcttcctcttccatacattctactttcttctatgtaaaattttagttaaaaacagagaaacaaaattaaatttactaaccttacctaatcatatagctccataagcctttgaattgattatccgaaacaacatcattcgtttgatcttctaatttgaaattcgatgtctttctaccagaacttagttccacgtcaccataatacttctcaccattccacctcaagacaataataccagaaacttcgatatcaaatttgagctacatataaaccaaatattgtcgaggtcatgtgaaaactgttttctcacctttattttttcttatcatataatccaagtttgtcttattgtgtcataatcaaacctcttctcgctcacaacaatgaccctctccctttatctatcttttgattatcgcgcgtctatccgtgtttctctcgtttcctttattttttacatgaaaagcaactattgttgttatctagattacgatgtcaattgtttataattcaaaaaaaattctcatcaattaaatttatcgcctttcttacgtttaaccaattgccgtttttgattgaaatgttaccaattagatgagtaagttgtttcgttgaaacaacactcaaatatccatgcatcaattcgagagtttccttccacacacacacctacgttcatacttcatacatcaaaaatcattaggttactaatgtaaactaaaaaagctgtttagaaaattaaatgcaatgtagatagttatgaagtatgaactgatacaataacttgctagtatttataacaaaataataagtgctggaagatttaggatttcttgttttttaaagatatctaaaacaattgaaaaaaattgtatttttaaacatttcctagtcattatcataacaattttttgtcaacttaactttatgttatgtgataatatatcaaaaatatagttatggtagttaacattttaatttatgtaaacatgcttaaaatgatagcattaacctcaattttagttattattgccaaaagaaaaaaaatcaccttgcatctacatatgttatctttcttgtttccatatgttttttttttgtgtgaaagatatctaatatttataggaacatatttctttgttatgttgctttcacagttatattgttacccggctactcttaacaaaactgatcatatttaatttttatttttttttgtaattctttttatccatcaattttccgtaaaagatatttcgttgatgctttgtgtcactgacctattgctcccaattttgttattcaataccgtgatagatacacaatcattgtgaatttgtgattactcttcacaaccacgaaggagaagagaggagaaaaatatgatacataccaaaataataagcatatacaaaaatacttcatatatcaaaaaactcgcaaaacgataagacattaatcaccttagatatgcttgttctctaaatctgttacgtaagagattaaattcaaactaaacgataagacattcccaattttcttttactcttcttctttcttctctaattcttttcccatatctcttcctctccacctctgtctatcacttcatcgatggaagtgaaacaaacaacggcaacgttgactcgttgagtccttgacatagtgatcaaaacagtggcgatgaaaccgaatatggcttgagtgcacgatggatatgacacgttgacggaggattcacttctctctcgaagctatcatggctatggatttccatcacgtatgcaacgcatacaacctaaaacgtaacgatgacttaatattttacgtcagtcatcactaccaccatcatcgccagcataatcacactttcgacgacaaacacaaatctatcacttctattatggaggaaataaccaactttttgcaatgacggtgattttgtttttcatcctccagtcctttagaattgggttaaatagcatatttataagagattgttaccgaaaattacgaaaccgacttccttatatttatagcagtttgtaacatagctaggtattaagattttacatatgaccgcatattctaaccgggctaaatttccttttccaaaaaaagaataattaattttgttacctattctcgccatgatttttcttttaagtttatggtagatatcaatttttgtttttctttttgttaagttattttgagaatttatgctaaatattgatgtggaccaataatatcatgtttttaaaatcctatgtggacacctttaaaaccaaataacctcaacttttatatagtatagattgttgctgggtgagttttttcctaaaatgtgacagtttagtcgcaccaaccgttgaaggtagttccagtggtgcaaataaggaaacaactataaatggttttttacaaatatctgatttcagtagtagaagactattgttagttgttacctcgactattattctccttcaacttttttggtcatttcaatagctttacctttttactttaatattctattttgtgttttctgtgaatatgattttagttttcaaggattcccttatttttcgccggcttttgtatttcaaaactgcattttaagtgggtgattggttcgtctgtagctgtaaaaattttgcggtaggtgtgatgactttagctttaggttttattgttgtagaaattaggctgtaaattttattaatataatattattacttaaataaattgattgtagaaataaaattttggttgtatgtatttttaaacaagaaaatattattggtaaattgtacttatatgttatattatattatttacaaatatcaatttaatatatatattaaaaaacaatgtgagttatatatatgtcctaaagtagatatttacctactatttatattcataaaactaaatttaatatatatatatatatatgaaaactataaaaaaaaattttaaatgaaaaataaagtgaaaagaaatgaaaaagatatcgaccttttaaagaccactttaaaaaaacttgatttaggctgtaagaaaaaataggaaagctacgacataaaatagaaactctataaattaatactcgataaattaataaacacgatatattaataaattttgccggtcccaagtcgggacaatgtaaaaattaaccaaaatcgataagataataagataataaattttttgaaatccctatgtaaagttatagtcccactaatattataaattaataatcataaatcttaagtatatattttaagactaatttttatatgaattttttgttcaagctacaattacaattcgttttaaaatacaactagtatgatatctgttgtagtcacataactatttgcgtatttgatccgttatagttgattttgtaaaatcttttatttgagaaagcattgctaagaattgtgtaaagagaaattggattaagcttcatgtttacgtttacgttcacgttcacgttaatattgtagatatacatacacaatatcttgccaaaaaataaattaaagaagtcaaagaaaaataaaaacctaacataattatatatgcaaacaacaaagcatatagataattaaattaataaacattttcaaaagaatatagtattgtattttacacaaacatttctataaattaatatttattaacttatacgataaattaatatttattaacttatacgataaattaataaatattaatttataagataaattaatatcactataaattaataaaatttcatggtcctaacattattaatttatagagtttctactgtaattgtttcaattctgaagctatagtttttaatggttttacaaattttcaacaatctaaccaatcatgtccaaaagtcgtatcatatccttatattttttcattgtattatttttaaaaatttgtaaattttaagaccaaaaaacaatttttttttgttttatcagaaaagcaaataatcaattgcctgattcattttcgtagctccaccgagaaaactccgagtggccgaaacagagatttcgcagaggaaccatcactgattgtgtcaccgaaccattgatcttcaagttccgatccaatttcagatatgtcgaggattattggtagaaaagggattaactatatccatagactaaattctgcgtcgttcacgagcgtatctgcttcttcaatcgagaaagggcaaaatcgcgtgattgatgcttcgttaactcttattcgtgaaagggcaaaactcaaagtaaacacttttttgtaaagctttgtcatttattaatgtttgtgttcatgtctgtttatgtgattattgtctgtgtagggagagttagtgcgtcttttaggtggagctaaagcttcaacatctcttcttggtgtaccacttggtcacaactcttcttttcttcaaggtcctgcttttgctcctcctcgtattcgagaagctatttggtgtggtagcacaaactctgccactgaagaaggtaacatgggtttcattatgaacttataaagtttcatgctttgtatagcaacagtcttgattctgaattatggtttctgttgttattggatcaccttgcttgtgctgttctatggtttatacagtcattgatgattggttttgacctttgtgtttggtagacttgtttgtcttttgatattgatctgttgaatgaattgcagggaaggagttgaaggatccacgggttctaactgatgttggggatgttccggtacaagagattagagattgtggggttgatgatgatagactgatgaatgtcataagtgaatctgtgaagttggtgatggaagaggtaaagctatttgacagctctagtgttacgccacttcatgtatttagtcttttgtgatacttactagatcatttttatgtacctaggggctaaaagttttctgttttgacttttgacatactggtttaaggtcaatgaatctaaaagttcaagtaactgaacatttgtttgttgtgtcaggaaccattgcgtccgttggtcttaggtggagaccattccatatcttatcctgttgtgagagcggtttctgagaagcttggagggcctgtggacattcttcatcttgatgcacatccggatatatatgactgttttgaaggaaataagtactctcatgcatcttcttttgctcgtatcatggaaggtggctatgcgcgtaggcttttacaggtttgtctgatttctctgttgtatatacatcacaatctctgggaaagataaggagaaccaaaactttattgtaggttgggatcagatcgataaaccaggaaggacgggaacaaggcaagaggtttggagtagaacagtatgagatgcgaaccttctcgaaagatcgcccaatgttggaaaatctggtaatctatctctccctaaagttagacaagacaaagagtattaatacattccttcttgcttattagaggttttgtgcatttggtacatttcaagtcgtatattgaattggtttgtacagaaattaggggaaggagtgaagggggtatacatctcgatagacgttgactgtctcgatccggcatttgcacctggagtgtcgcatatcgaaccaggaggtctctctttccgtgacgtccttaacatcttacacaaccttcaggcagatgttgtcggggctgacgttgtcgagttcaacccgcagcgtgatactgttgacggcatgacagcaatggttgcagctaagcttgttagagaattagctgcgaaaatctcgaaatgaaacagaatggtaattttggagtttgttttttgttatgtttcatcgtgcaagtttgtaacattcatataggttcttgaatgcaataagtctggctccatagacggagtatcaaacaaacataatatgaattctgatctaaggctataaaatcaatgttcatatgcctcataacctctctgttttttttctgcttttaatttcgtgaaacattaataatgttgggaccagaaaattctattaatttatagagttattaatttattaatctatgaagagaattttttgtttttattcttttgaaattttcctattgaaagtttacgatattgcgatacctttagaaccaattatacgtaaggaaacaattatctcgtttataactcttcacaattgtggatgcaatttgagaagacaacacaacaagtttttaatgtagtaaggaagattagagatccccaacaagaatgtaagtgcaagaataagcaaacaacactagaataatattttactatatattttagattatatatatatattcttttatttttaatataattattaatttatgatattgatggtaccatatttttacataggattttcaaaaacattattatcttactaagttatcgatatgtgtcgttttttacattagtcccaactcggaaccaacataatttatttatttatagaggttattgatttatcgaatattaaatttatggaggttttactgtagttttacacttttgtctatattttcgttagttatagaaagacttaatagacaaaaaatctaaaatataataaagaatttttttaatgtaacataaaatgaaagagtaaatgaaaaatttagaactcttttctctgattagttgagttgatatatttgaatattaaaaaatcttccaaataaaacttatagatgatacatctatttttctataacatctttagtttttatttgttctttttgtactttctcaagtacaaatgaaagaaaaatagaaaaatatttcgatttttttatcaaacaatgaaaattaatatttatttaaataaatcagaagaagaacccaagtaagtttaagttggtcttgtgatttattatttaataacatgtataatcgttcggtagtaatgattaatggaatttcttaaatatgatccaattataacattattacataatttttgttcatcaagaaaaaatttcttctatttttgtttccgttttgagttatatgacatttagatggttttgttaagtcacattatatggtaatataaacattcgattagtaaaaaccttgtaaaatatatattgcctttacttaaaaaaaatatgtttattttaatgtagaaaaaaaatatttcactttttactcttatatgtttaatatatattgcctttacttaaaaaaatctactcacaagaatccaaaacataataagaaaacaaaatgcaacaatagaaaatatacaacaaatggtatcttaatacttgtataaagtgcaaaatttgtcctagaaataaaggcaaatcatttgcatcaatactaatagttaaatatgccaatagttggtatattaaaaatatattgtttaaggcttaattatttaaaaatctcatatctttaaaaaaatgatttggaacaatctattttaaaatgaaaatttccacgataattatcgaacaatgtagaaaaataggaagaattcttggcaacaaatggaattatcacttagttataaatcttttacatgaattaatgcactctcataatggaactttaccaaaaaaaaaaaaaaattaacaatgaaaaacaaataacaaaataaaaataacctgaaaaagtaatactaataaatgaaatgctgaattggttacgccttaaatttgccgtaaaaaaaacatttttttgtccatattcaatattatatttcatctttcttttaatttcacgaataagcaatgtttaccatataaccatcagtcatataagacgtaatatccacactacatcaatgttgtcattgtcataaagacccaaacaagcttgtaaatatagaaaggagaaaaataaatggcagacatctttcgatatggtttatttgacagtatttacagaaaaaacaataacaaaaggaaattcaatctctctaactcatttactgggagagattgtaaatacttaaattttcaaagccagcaaaacaaagtgtatgcaaaatttcaatttacaataaagatatttgtaattgtaagactcttaatgtgccttttttttcttttttttttaatgtttttttctaataatctcttttgaatttttagaggataagttttatgtttggagctcaagtcaaagttgcattgtcgacttcatgagatcaattatcttcatatgattgtttttcaaaatctcgattatatttttcatctaaatatttcatattttctgatattttattctcaattgatttatttttagctactagcttactaccacgagtttccaccattttttttaagaagttggatattttcaagattttagcattgtccaacatatcttttttgtcgattcgtaagcgaagtaaaaatttgatcaaataatctttggaaaagtttctatcttgttttacttaataactcacacattttaatgctcacgtaatagaaactttttctgatatttactttacttaagtattggcatattttctatcatactctaactcatccaaaaaccaaatatgctaaaattaaagataaattgtaagatctgcaatagagataggaataataataatatatattaaaaacaaatcttactcttagagtctctacatcctaaaacaaattacagtaaaatctaaactgaatgatataattcattattccaatttaaaattattgccttttatcagaaaaaaactatacacaaaaatctataaaataataataaaaaggacattaaaatgtaagatattcatgaaatggtaacttaagaattactgaatgaataaagtagaatctactctagaaataaaggcaaagcttttacatcaacaatgttacaaagcataatgaaaagtacaaataaaaattcaaaaaaatatcaatatatactttttacttccgcatttgagttgaaatgtttgaatacttttttttttgtgcaaaaaaaatgtttgaatacttattgtatttttcttctcaatggctcacatagaatcatactataatctcctcaaagctcctaatcataatatttgttttgataggtgaatatactcataaatttaagtatctttcatcttttaaataaacaaaaaactatacaccaaattttaaaatatataaaaaagagatagttaaaatttgaaaaccgtcaaagtgatagccacttctataggtattatattccactacaaaccttcaaactaaaaactcttacactataaatgttaaattggcttccaagttcgcaccgccgctaaacttaataggatggacatggaacaagtattcgtgaattttgtgatacacgttactcaacttgacccttatacgtaaaaaagaattaagtagctatatctcaacttagaaacgggtatctggactaacatatatcctttagaaatctgaataccctagttgtttacccgaatccaaattcaaagttttacactttagtcattttttaaactactaaatatttctatgcttacaaattattattattttctaaaataaccaacttaatttaaaatatttaaaatagaaaatcatatctaaaatataaattttaaaaatataattccaaactttcaaaaatttatattatatatatatatatatatgaatacatgtaattatatagtacataataattatatatatacataatttaaaatggtatctaaatatctatggatcggctaataatatgtacaagataaatagttgaaaagaaaactgatatgataccctacatttgtatccgataataaaaatagaatactttttaccaagtccaactgcgacaaatatccttttttagagatcagacccgacccttgacacatatataaaacataggtattggacctttaatttttgaggcgcattttttgtaaaaaagtaaaaaaaaaaaattaaaaggcctactttaagactgtcttataaataaatgaaagaatttaggcccattttgatttagaaaaataagaatagcattttgttttcttgtgaatgtttttttttaaaaccccacaattagaaaacttagcagttgaaaaggcctaaaaacaattttgtattgggctccaaaaatgacaggaccgacactgttagagatgagtataattggcggatccagaacataaaactgtgtagagcacaaaatataaaccataaaccatatttagttagttaaaaaataatcacaaaataggcacagtagggaaattgaactcacgttctttgatataacatggggcaacttaaaccaaattagctagaaacacattattaacttcagacattacaaaacaattataaagtctatatagggcacgtgccctactacctctctacatagatctgctaataaatcgagtaatgaatcgatgacaaataacgaatattattaaccaaactgaaagcatcatttttgccaagtggatttgaaggatgcgaacactcgactaaccaaattgcaacaaaggcattttaagtgattatattggagcttaattcgtctaatgtcaaatatgactacaacgatcgcatcagcggattagcaaacccctttatgaaactccatcggttaatacgttggagatttgaagtttttttcatcgattgaactcttttggacggagtcaggccggattatactagtttgtattgtgcattaacctatcatatcaaaacatccaatcaattttttttagcaattccatgggttccacatgctttatatttaaatttatgtgttatttaatttatattacataaattttaaaagattataatcaataaaatttaagattttttttaaaaatatttgttttcgtgggcgggtatggaacatactcttttagtcatcatactttgcaaactgggatgtccatggaccatggtagaaacaatttatacccgccctggagcgggtcgtcccgtgtaagtttcacatgattgataacttgatataatggtttgaatggtaacacaacacagctttgacagttaccaatcataaaaactttatcaaaagcgttacaaaaagttttactctcagcatttttatttagcttttttatatagctctttctaacagttttgcactattccgataaagctaacaggtccagctaacaactaaaaatcttgtacagtttttggttaccaatcagacccaagtaaatatttatatttattataatgaccactctaaaaaaaaaattgatttgttatgtttaatctccatcataaaaatagcagagtattgtaggacaactataatcccaacaatacatcattaagaaaatcttattatcagagtaaaaattgagtaggacaattaacatatatactttgaaatgtacaagggcattgaagtctcgcatccttcttcatcttcttctccattcaactgtatttttgatatgactctttgacattaaatggaaccttcaccgcctccatttaagggacacccaaaaattggtacagtgtaatgcaatccttcatttaatgatattactatgaaaaacgttttattgttgcacctgtctatctacttcttaaaatctattgttgtagtttcagatttatttttaacttctcttgtctgattctagctgttgttttcactagatcttctcctcttctattgtatttcatatttatctctaataacaataattatgtaatttgtgtactattttcataataaatgttttatgcacagtaatctatcattagctagagctgataatttagtttgaatgaacatatagcgacggttgtccagtggttgaggcttatatactcatgatgcatgatgtaatttcgaatccttattttcgtatagctctgatctatttgaagtaactctatttcttagacaacaaaatttagagtaaaaaattgagtgatacatacattagagaaaaaacctactctaatttaaagttactctattttccagtaaaagtaagaaaaaattgtgttagtataactttcaatttactcgtgtaagaccatcctcttaagacaactcttatgttaagaaatatatttaagaaactttcgttagttataagacatgtcttttaacataagagttgttttaagagaccatcaataaggatgctctatggcatcattattggtggtattttaaccaaatttttagattaaaatttgtgaaaaaagagctcttatataagaacttttagacttatatttaattttttcttcagaaatcttagcttaaagttttagctaagataccactaataatggtggtataagtttcttatctcaaatttgggttttaagtcgctctaagtttataagttggtaaaaaacaccaatataattacaaagtcgttattacttgttgttgcaaaactcatattatttcgaaaggcatcttattagtatgtaagcattatatgtactatgctaattacgaaactcctaaatatttttttactctcaacctacgtagctcttaccaatagacataagtcagtagaaatcagattatttttgccaaattaattacaaactgtccaagacaacagaagattattaaataaaggtaataaattgtgacccgttttcaaatatacatccaatagcttattgaaattgaattagccttttatttttattgtatttttgggaaggtaggaatagagcgttggatatatttatacacatctgaaggtttttaaatttagctctctggttgcagtaattgaagaggcgaaactttgaatgcacgtcatgcatgggcagtgtaggccaataaatttttctctccttttttttcttctttctaaaacaatataatttgtaatgaaataaatgcaaatattcaactgcctatatataaaggtccttcgaaactgtttggcctacacataaataagcacatcgtacgtataaatttttctacgtgatgttagaatttctagacaaaggaaatctaaactggttgctgaagaaaccaaagatcgcttcgtcttattgcatggaagctgaggaaggttctagaaaaagaaaggttcaagaatttttagcaaatgatgagattttcaaaagatccgacgaatctcaaaaccttatcgtttctccctttgatcataaggtaaacgtattttaagattttgtgcaaacaattttttttttgtcacacatataattgattttgtgaaaaggttttagagtaacaaaatcttggtaagagattattttataattgaaaagcctatcatctagaagcagttgaacatgcatatacttttaattagtaggtgagtaaaagaattgtgcttaatcttttttttgttcttgatcttatgttgtagagaagaagattcaatgaagattcaaaaaatatgaataataatatagaagaaggatataatcaccaccacatgagccttgatcttgaactcaacttgtcaccatctctcatcgatctaaatcatcatcatgatctaagtaattacaacaaaggttatgaggaagatgaaaggaagaagaagatgatggagaagggttcggtgttggggctagagacaaagaaaagcatgtcaagggttgcttttgatctcgatgacgattgttgcgaccgcggtgatggtgttggtggcagaagcgaggaagagatggtggcgagagtgtgcatgaagtgccatatgttagtgatgctgtgtaaagcgtcaccggcttgccctaattgcaagtttatgcattcacctgaagacacctctctctcacttctttttactcctaagccaagtttgtcagcttagttattgtttggtttctaatcttgtttatatctaatcactaattaatgcttcgtatttaatgttttcatcgaacaaatattttatttgttgggatgttgttggaactttggtttatatagaatacgataattaatgtgatccgcttttccctgtacctttttctatttatttttttctgaatcattacaatgtaacgttgagaatataatgttagttggtgatcttatttcacctggtctcattgggccacacattgtatattattgaataagagagtacaacttatatacaaggctaaaggagctgagcaattacaggtaaatctaaattatgtaatcgagtatttccaaaagtgacacaagggaattcagtatttgtagtttcatttgtgttctgatgaggtggagatggttttggtgtggctaagggaaatattgccgagttgtatacatccgggaattattcacatcagcacatagatatgttctttgggtatgtaaaaaagccaaaaactgatagagatgtcaaatatcccacattgaataagagcggaattaatcaatgctatatacaagatctaaggacacccaaactcacaagctagcttttggggatgttttaccctaacatcttgtgggcttgattaaggctaattcctatcaattagtccgagattctagagataggaatccaaaaccagaataaaactcaaaagataacgatattcggatattgtaacaagagcagagaaaagttttcaagagattctcacaaacgaattcttatccctacttatataattaaacgtaaccttgtgagaaaagcaaataacaaaatataaaccctaaattaaagaaaataagtaacagtagcataaatactcatgcataatgtgaatgcctccttcctttaaacatgtttgttaacagttaacactaacatcgattgtaacaccccaattccacattattgggtcaattttttttaacataatgatacaagtccaataaatcccaatagcttcctaaatagcaacaaaaaatggttttgtgatttctaaaggatcgtgtatgtatgtatatacatatgtacccttatccatttacttgtaatcactgtcaagatcacgactccatcattgtctttgttactgtttcggtccaccatcatgttatgttgatgtggagaagaagagaaaggggaagggattgacctgaagcattgtatggagtatgtttctgagacatttttgtatggagtacgagttttattttttgattgggagaatgagctcggcttgagctgaagcattgtaggagctttcatgactcatggattcaggtcctgattgatggagaaccaaggtagagcttaagagcatgatatgtaaagcataatcaaacataacataatgtcaaacctggatggagattatacgtgattgacaagccatcaattacactcaattctatgcaatgagatctttccattgacgccataatagagatataattcattatggctcatcgagaatacgcctcacaaaaccactagccgcacattgttcttgatttatacttatcacaaattcatgattggttctgtaattacttggctcgaaagaaacactcataacttcttgaatataactccaattcaaatttcttcagttgtgtatggatttatggcaatgtaatctttccaacgactccttatttgtgatctgattcccactgattcgacggggattaatctcacaaaagcccaacttgaaactgctttgtttctttcatattcttccttctttgtttctaattttctgtgcacatccttgatctgctcatatcttcctcctctcagcttttacgtactcccacaatccaacttttcttccacatcaatgtccgtttattctctctgctccttcttctatctccttttctctacatcaacaaaacaaaatttcaacaaaaaggatttctttgacactttgtataaataattttcttttacatatgactgtgatctgttcagatcaagtagatggaggcttgccaagcaattggcaaaagcttcctcatcatgaactttttatttttttagataaaaatgaaacaataaaaaaacaagatacaaagattgtttactagagtggtatgtggttatattcttttttctaagatataacgttaaaaaattgtagtaattaactaaggatattttggccaaaacgtaaggaaaaacgaaaacccctaaagttctttacttacatttttggcacttaataaatgtaaaaagaacttcaaaaacaaaacaaaaataccactttttggttaatgattatttttcacttggttgattgaaaacttcaacaactccaacaaaacttggatagtagaaagactaatatgactgtctatgctcacacaattcagaaattagttatctctcctcttcaattttgtcttgtgctgtacaataaatttagactattttgcctttagcttcatatttttctctcttgcttgtgttctatgcgagaaaaaaaaagaaggaaaacaaaaatggtggtggaagaggaagatatggatggagaatcaaagcttgagattattttgacacacatcttatcaaaaccgtggttgagttggatcaagctgatcaattgtttggagtattgaagctttgtttttcatcctagtccactcgttatcttcgtaaaaagaatggtctatttgattttgtggcggaaagagacggttgatagtgaattaataatagtgaatatgattttgattccatgaaggtcaaaggccaagacacggtggtgagtataagtctcggtggtggtttccaattcgacggaattgtgcagtgagacgacgacggagctggtgtggtggttcaaaatatgactgagataataatatgcatagatatgataactggtttaacatgataatatgcacttaacaaataatatataaatttattgcgataatatactagttaacatcttaattaaatagttatccacccaaatactatactatatgtaagtcgttattttttatatgatataacaatgtgttgccatgataaatatgagtttatcacataaattataaaattattgcgatataatatgattaacccgatatatttataaataattcactctagtagagatgaaattgttcagtaaataacaacataatgaaaaaaatgacaacatgcatctgaaatattttgatcagtagaccaattttggttactagtagctgtattattttgacaaaccgaaataatatcgcccatatacattctttaagtttaacactaattctgagtttgttgagttgttgatctaagaaatttaagtttttgttgcgattagtcgtaagcattcgttaataacatcaagttgcaaatcctaatgactgcacgagaatgagctagtgatctttttttgagctttgtctagtgcgatttgattttgaacggattatttggaccatctccttagcataaggcagtgcaagtcatgaccataatccttttccgcatctgtcgctcttataaccatgtgtgtatgttatgtttctatgaactagtctaataaaatgtttgttttattaggaaattgcaccttcttctttctaaaatatctcatttttctttgggaccatatcaaaatatatatatagaaaacaaaaataatgcatgattagggtctatcgaccaattttttttgtgtaattgggtcggatgtccctaattgtcaagcaagaaaaccaactgaatcttgattttggctggtgcaacgtgatatggttattttagtacccggtcgacctagccagggctcgagggcgagcgcaatctcgttgaaattggtttatgttctttcggttggaggtgcgtgttttgcttattggctatttgttggtcataactatagtttacttaccataaatactacgaaatgtagattttgcactgcggcttttggtatctttcactagaacaaggtgttaatcccactacgaagagattttattctagcttctctttgataattttaacaaatccctattcatgtatgatgcataagaattgaatttataggctaccaaacatctcggaattttgtttaataaaagatgatggattcgataattttggtgctataaatgttaagtttcatgggttccaactcaaaatcaattggtagtgggtaaattatctcatatcccttaaatactactcaagtttttttcctatttttctataaataatctttttcaacacgtttcctcgaaataatggcgcttctaactatttatttcgacaaaatccgtcagtaaacaacatacgattgttattagttaaattacttatttaaattacaaaagtaagattgtttgaactcaacaataaataaatataactatgcactattaacttgataaataatataaaatttataaacaaatatatcataataattttataggcgcagctatacatataaaattgaaattttgtagacattatactgatacatataaacgtatgtatatgttcatgttcatagacatttatcaaacaaaactgggtcaggaccacacactcacacacggtgaatggcgcattcagacataacacatgcaaaactttaatcaaacattgcccatactgccatgctcatatacaacccaaaatatatttactttgaggcataattcattcacaaaatacctaaattatatgtatgtgaaagtgtattatacatgttattgagttcaccaaaatgtttttcaaacgaactcgttctcttttgttaagtttgaattaataatgaaaatttctatttatccaaaataatgcatgagtaatctccccaatattaaaaaaaaaaaaaacattcatgagacaaaagctgttatactgtagtaggatatcaaaatcaaatttgatataaataataaattgtatcctatattaaaaaaaaaaaagggttgtctcagtggtatatacttccttccttaatacaaacgatacatttttcattacaaacaaaatatgtagagatgggcggatctagaaagtaattctatatagggcaccatatatataaatagtattaaatttaacttaattatctaaattatatattgatcaaaaaacaagatacaaaattgctagatgtgagcctcgaacgtgggttggtatggggcacatatcactgtaataccatttaagctaactctatttttgctgaaaatgatagcttatataatctttataggaattagtatggggcacgtgccccacctagcttcaatgtgggtccgcccctaagagatcggtatccattttgtcagagaacatattgatttttgttttttaaagtcttcttcctttgtttccaaatattttttgtttattctcaaaccgtccaatttcagttgtacagactacattgtaataaacgaaaaatttcttaaaaaacttcaactattttttatttaaacgtttaatatctaatactatttggttagaaaaaaaacacttgtactaataaaactgtgcaatttaatacttaactagatggtacctgtgctacgcatagtagtcatgctttaattagtttatcagttttacttctgtatatattacgaatttcacatattctgtttatctataaatgtttatttgtataatttataaattttaaaagtttctcaatttattattggtatcatttaaacatggatactattgaatttattacagaattgatgtatccctttaaatacataattgtatatttagtatatgtagttgtatacatgatgtgtcggggtttagtgtattttattaatatgtatattaattatcaaatttgacaaattaataagacaagaataaattttatcaaaatcagaattatagaagaaaaaattaaagaattattaataaaaacttatattaaaattcaattaatttaattaacaataccaatatattaaaatctaaactacagtcaaaaatatttacacagtctcaatatattagtgaaagagaatctatcgatcagatttaagaaaaaatgttgcataccttataattttgttgttcattggaagatagtagtcaaattataaatcatcatcatgtatctgcaaattaacagaaaaaagaccgtaatccttatcaaaaaattcaatcagaattactcatcttataaatatatagagaggtaaaaaaagcttaacatattactttgcataaaaagataaataattagaaagcaagacatactttaacaaaatcatgtctgcgtctacattttaatctcccacattacctgcataaatattaaaaaaaacagatgtgagaaaaacatgaaaaaaatagagaaaaacagagagtgtgagaggatacctcgatatattgctttctccatggtctagtcgatcaacaacctcagttttcttcatggtctcgttttcttctactagaataaaaaaagaagcgagagagtaaaagaagataggaactgctgagtgagttcttgaaatgggacgtacagtatttataagatataaatttttaggtttaaaatatgcataaaatattaaattgtggaagtcaagtttaatgattatgatgaatcccataattataggagaatgtttagcaattatcttataagtagttatttaattatgtaaatttttcggaaactttacgttaattcaaaaatgaatatccaattaaatatttgattacctataattatggaaaagtgatatattcaaatttaagaaaggaatatacgcattgaatatttttaattaatatgattctgttgctgaaaaaggaattcgattaatttaattaacaaaaattaatataaaccaaaaatataattagttttatttttaaatgtttaaacatattttttctatttaattatcaaaaattaaaaaatagttttgttaaaattatttttccagttatttaaataaatttagaatatttaacccaatttcgaattcaaacatattaattcgatatttataatgttatatctataaataaagcagatttgattaggaaatgttttaaaaaaattaattggattaataatcttttagaatagaataaatattgttgatatatgagtataattagttttccaattttaaacccacgtaattatgaatagtattcaataagggaatatgttaattgaaaataaataaaaattctctctccaaaaatcttgctgtaagatttattaaaaaaaatcaatgactacaattaattcaatcgaatggccaagattataacgtaagttaagtgattctcagttaaaggtatttttttccatgacatcaacattttaaacatatgatttaaggtaaaaaaaaattttaactgagaatcacttaacgtacgtctcaaataatagtgtagatcaattaaatattgttattttcatatttacattctcataacaaaaataaaattccaattttacccttaccatctcaattaattattaattttagatgatgtgacattaattttataagttttgataaaaattaatttattaacattttattttatgttgtctcaaaactttaaaatttcatgtttctcataaatattttattttaaaattcaacataagaaattaggagaaaatcaaaatatttaaaaatattcatttttacaatcatattacattgtcacaatatcaaagagatgttttatcttgggattcaatcttcgattctagatttcctctattaatcgctatgagaatcgacagtaaacaattttcgttgtcctgttttgccaacatcaaatttgataaccgttcatgatctcctcttaatcctatccataattttaatcgccaataaaattaatttgatctcattcgtcgtaatgaatatgatatcaacgagcattgatatgaacttcttcttcgtcgtgagaaacttactattcgaatttaaatacttcacaaataaaactattttcgacaaaatcttaatccgatctcattgtctctcttaagattgatcaattcataaaaatgttttatttttatttttatttttaaaaagttttttttgcttttttctcttgaattttaaaaagcaaataatatagaaacaaaatattaataaaatgtaacttttaaaaattaaataaaattagcgcttcatcacctaaaaattaatagttaattgagctagtaaggataaaattggaattttatttttattttgagatcgtgagtatgaaaataaaaatatttaattgtttgtgtattaaattttacagtttcttttgtatgtgtattgtttttccaaccgaaaagttttggatattaaacgttcaaatataaaatagttggagttttgtttgggaattttcactagtaataaagcagaagttttctaatttattatatccatatataactttactgtcattatggtactcttctatgttagattgtatatattataatgaatcaattacggatttgccattctcttaattgtatttatgaatttttcctttttgaatagtttgtaaattttgccctttttgaggttacaaaaatgtgatttaagatgcgttttactcgttatatttaggtttagtctttggtataagtatgtattttaaaaaaacgtaacgaggtacatttttaagtgttaaaaataataaatccgtaagattttaggaaaaatatcattttcacaagatttttataaaaaaggcaaaatcaataataatctctattattttttgtacatacatataataaaataataagctctttctagctatattatgaatactcctacgagcaataaaataataaaaggcacgttatttacactcgaaaacaagctaatttagaggtggtcgagagcagatatcatgattgttttttttaatgtatgtaatccgttcatttgtgtcatcattattcatttttatattatttatccgctttgttaaatatattttgtctgatgtgaattaattgttgagcggtaaaccaatcatgaagttatctttaaattaatgtgttattgataaaaaaaaaagtaaattagttgtaaattttttttttcgtcaatttgttgtatacttaatctgatgaatatttatgattttcagaaatgtatgtttgtatcttctaatttttacccacaaaattcaatgtcctacgcatatgatggaatttaaccaaatacaagtagctagttagtgattctgatttgttatttttttttatgtaggtctaagttataaatcaattttcttcgaacctaaaatatatttttaaccagctctcagtatcatgtttaaagctattaaaaaatttaagtagacgattcgacaactacgctcaccctaaaaaaataatcagatgaaaaaaatctaaatctaaactatcaaacatattaaaaacaattatgaagactattcgacaactacgctcactataaaaattaatcagaagagaaaaatgtagatctaaactatcaaacatatatgtgatggaattaaaattgggtaaagccgtaaaagaggtttcataattttggattagtgatttggtaacttaaattgacttgtcaagggagtcttaactctatcatgaatcaagataaacactctccacaccaaaaacaatatatatatatatatatatatagataacataaaaagtcctaaaatatgttaaaaggcaaggagggccaaccatatccatctctcgcccacttttgctaatatgtcactctctctcatatcctaaccttccaataacatttcagaaccatcctcggtacatcatttatatgatttctctattatccttaataatcaactttaaaaaaataaaagaataaaattaagatatcatttgttttaccagataaaccgatccgattcaaactaaaccatattgatatttataatccaaaaacctcaaatccaaaactataccaaatcatttattatatcattttattttatctgaatataccatttttcataacacagaaattttaaaaacctaaacgaaaatcgaaacgaatcagaaccgaaatccgaattgaaccatttgataattaaccaataatcgtcccactaaaatccaagtgtataaaaaatcagtttaatatttatatgtagaatatgttctagagaattatagtataagattctacattttttttttttttttgaacaaagaaaaaaggagaaattttagggaaaggagtagaaatcttgtgagtcacagttgatttggttcaactggattgggataatatttcaagtggaaagaaataaataaaagttgtggtggaaaattattccaataaatctcgtcgtgtgaattgaatcattattcctagtgtcaatcttcttcacctctctctatcaacctccaatttcttcttcttctttttttttagataacttatttttattttatttttctttgatttttcactttaagacaaaaataataattttatatttctaccaaaaataaataataattataatttaataagagataaatattttttcaaactgtaacctaaacaataaataaattaaaagagaaattaatgcaaatattgctatatttttgggttattacttagagactactttgtccaaaattaggaaaaatctttttgggtgaataattcccaaaagtatagttgcattttgccagagaggcactcagagagagagagagatattcgtaaagataagctttttttttttttttgccttctcatcaaaaatctttttttttttgttgtctttcttctcgagagagataagtgaccaaagggtttcgatttctggaaatagtttgaataaaaaagtaatttttatgtgattattggcaaagaaaagttttagttttttttagtttgtgagagatgtctggttctgtatctggttgtggttctggtggttgtagtattgtatggtttagaagagatcttagggttgaagataatccagctttagcagcagcagtaagagctggtccagtgattgctctgtttgtttgggcaccagaagaagaaggacactatcatccaggtagggtttctaggtggtggctcaagaacagtttggctcagcttgattcttctcttagaagtcttggtacttgtcttatcaccaagagatctactgatagtgttgcttctcttcttgatgttgttaaatccactggtgcttctcagatcttcttcaaccatttgtatggtctgttgttcctcttctcttctctctttatcttatctttgaatttgcatgataaaaagatttgatttttgtgattggaatcatcttttctcttatgggttatgttttgtttgatgtatttgtggaataagatgatctggaaatgataaagttttgatctttttcagatccattgtctttggtgcgtgatcaccgagctaaagatgttttgacggcgcaaggcatagcggttcgatcattcaacgcagacttgctttatgagccatgggaagtgactgatgaattaggccgtcctttctctatgtttgctgcgttttgggagagatgtcttagtatgccttatgaccctgagtctcctcttcttccacctaagaagatcatttcaggtttgtttctttgccactctctcttgtgggttttcgttttttccaaatctgtatcattcaataatgtttcttttatgttgcaggggatgtgtctaaatgtgttgcggatccattggtgtttgaggatgactctgagaaaggaagcaatgcacttctggctcgtgcttggtctcctggatggagtaatggtgataaagctctcacaacgtttataaacggtccattgcttgaatactctaagaaccgcagaaaagccgatagtgctacaacctcgtttctttctccacacttgcattttggggaagtgagtgtgagaaaagtttttcatcttgttcggatcaaacaggtcgcgtgggcaaacgaaggaaacgaggccggggaagaaagcgtgaatcttttcctgaaatctattggtctcagggagtattctaggtacataagttttaaccatccatattcccatgaaagaccacttcttggccatctaaagttcttcccttgggctgtggatgagaactatttcaaggcatggaggcaaggccggactggatatccgttggtcgatgccgggatgagagagttatgggctactggttggttgcatgatcgcataagagtagttgtttcaagcttctttgttaaagtgcttcaattaccatggagatgggggatgaagtatttctgggacacacttcttgatgcggatttagaaagcgatgctcttggttggcaatacattaccggtactctcccggatagccgggagtttgatcgcatagataaccctcagtttgaagggtacaagtttgatccaaatggtgaatacgtaaggcgatggcttcctgaactctctagactcccgacagactggatacatcatccgtggaacgcacctgagtccgttcttcaagctgctggtatcgagcttggatcaaactatcctctaccaattgtaggattagacgaagcaaaagcacggcttcatgaagcgctttcacagatgtggcaactagaagctgcttcaagagctgcaatagagaacggatccgaagaaggacttggagattctgctgaggtagaggaagctcctatagagttcccaagggacattacaatggaagagactgaaccaaccagactcaacccaaacaggagatatgaggatcagatggttccaagcattacttcttctttgatcagacctgaagaagacgaagagtcgtctcttaatttgagaaattcagtaggagatagcagagcagaggttccaaggaacatggttaacaccaaccaagctcagcagcggagagcagaaccggcttcaaaccaagtcactgctatgattccagaatttaatatcagaattgttgcagagagcactgaagactcaacagcggaatcttccagcagcggaaggagagaaagaagcggaggcatagtccccgagtggtctccagggtactcagagcagttccctagtgaagaaaatggtattggaggaggaagtacaacgtctagctacttgcagaatcaccatgaaatactgaactggagacggctttcacaaaccgggtatgtaactcgcaaatccgactctctcaacaataagttcacataaagattctaaacattttcaaattgaaagtctccaaattttcagtaagtttcaatcttcctacacaattcaaataaatcgtcgatgcgcgttgtgcttggcacacttgtctagccaagtagtatcagttttaaattgaatttagctgaaaagttttgaactgttttcaaatccaagtgtttgcatttacagtagaccacagtaaaaaaattagtgaaagtttctatgtttcacagttcaattggaatttggtacattggtctaaccaagtggcatgaaatttactgtggtatgtttggttttacaggtaaaaagtgcatttggaggtgcaaaaggagaggaacatcataagggctgtaactccggtgaaatctggttggactgtaaaccgagtacatttggtacggtttaatgtaattccggttatggggctggagagaaactatgtaggagtttgtctgatgtacattttttatttatctctggttccatcatgttataatacactgtatagtaagtagtctgttgcttgtggtattagaccaggtctcatacttgttggctttcaaagttttggttataagtcaaacagatgccaattcttaatcttataaacatatatagttcacatttatttatgataaatgacttgttagtgtatatgaaacacgtacgtctacttccatataacgagaatccgaataggtatgtatactgatagtagccttcgacgtcacgagcttcccacaaaatctcgtgctgattagaaactagacaagaccacgatctcagttataatctctgctgggcctaattcgcgtctgaaaaaacgtgtctcacgaaactgtgaataacttaatgagcttaaatccaaaacaacttctataaaatggaaaacgacgatgaaagacttcgaaataactctaccaaatttcgttacctttgacaacgatttgatatgttgaaactgtttcttccccaatcctaacgattttgatccttctccttctctctctttttctcttttacagaacgaaaaatgactaaccaaagctctaattcgagtttccttcttttataggtacactctagggtttccattaacccaaccgattaaaccgggtgatttaaacacaaaccataaccgattttccggtttacgggctttacacaagaactattccttaatgatctcttatgatccatcccaaaccgaatctctatcgggaaaaatgtcatttaaatcatcactttaccattttcgttggtttaaatcatgaactctcgatctggtgatttaaatcctcaattttatgttgacgtttaatttaatcacgaattctcgttaactaagccaattaagacacatcgttagaaatctttctaatcaaaatttctgagtttttctctatttttcttcagaatctcttatcttctttggaatatctcttcttcttcgaattcaaagtaatctttcgtctttaggtcgattgaagacaccgaaaaaaaaaaattgtgcctcaattggcttagtcaacgagaatttgtgattaaattgaaagtcaacataaaattaaggatttaatttacgagatctaaagtccatgctttaaaccaacgaaaatggtaaaaggatgatttaaatgacatttttcccaatctatatctcttatgatgtgacacgtcgtagttagatttgattcatcctctgtctagtttattgtattttccgagtgtctgaataatagttaccatcgagaagtactttataaacttcgtatatctttttctgtttgatgaaagcatattttaaaataaacacgtaaataaagcattttctgaaaacgaaaacaacaaaagggaaaatactctttaaaaaatagaaaagtgtttaacatagtcacactttttcaattacaaatatttttacgtagctttttattatgtgcgttcatttattactcatatatttccaaacttgtttattgtttatttgctaaaaacattatttctcttatacataataattatgtgaaagtatttaaaaatttagtaagcaaatatattaatttaacaaaatatttatagaatttaactttatcactttccttgaaatattgttggactgtctcattatttatatatttgttctttatgtacataataataactcttctttatgtatttgttcactaataacttttcatataaaaatatttcaaaaatatcgtttaatcataattcttcttttctatattggtattcataaaaaatctaacaatctttaaaaaatatttacaatataacataaaattagataaaatttatgtaacacttaaatttatatcataataatttaatacataaacataatcaatgaaattttttcaatacaaaattgtgttgaaagtgagttttccaaagctcataggctagtggatactaatatttaagaaaaagaaaaaaaaaaaaagatatgtggtcggctttcttccaccgcaacgaagttgattgactctgagaaatctctttttttttttgcctaattatgattattactttgtgtatctgacgtctcagacaaattatttgaagccaaaatatttgtttatttacgaactatccagttgtgttgtgtcgtaaactgccacttcttcttctttctcagacaaattatttgaagccaaaatatttgtttctttacggtcatcaaatcaaccggatcattttttggtttatcttccttgtcctatcttcgaatttggattttaatctttttggtaaacgccattaaatttttgtttcttgacgacaacgacttgtcaacctttctttgctggcaacacctacctttgtcatgtctgtataatcctagttttctccaaaaacgttttgtctaggaaattttcttcttcgatggagaagaagctgactttgttgttgttggttgtggtggttttgttcgtaaatctaacaaacgccaccgttagggttcagatttgtcctagagaatctgcaaaagattatatcttagggtttcgagataagtcagccttgcatcgtcctggttttgtcactgaggtacttttaagaatcattgatttatctaccatttgctttcttgatctgagttttgtgattgatgtttttgtttgtttatgaagggagatgatcggtggctacaaatggctgcagatatggttgataagaagaataagtgtgactatgcggctttactcttctatgcatcatggtgtcctttctccagattagttagaccaagttttgatcttatgtctctgttatattcatcggttccacactttgcaattgaggaatcatcagttaaagctaggtgggttttgtataaaagactgaaatcgtgtaatttgattgagaacttcatggtttgatgctcagttttttttgtggtgtggtatggttcagtaccttgtccaagtatggagttcatgggtttcctactatcatccttatgaattcgacaatgctcgtagtttaccggggatcgagaactcttgattcccttgttgccttctacactgatgttacgggtaaggtatttgagttgttactttggctatatctttgtgttgttgtgtgcctcagtcttgttgtggttgctattgtgctcctgttataggttgtatataccaattaagatttcagcagatgaaactaaccaggacaaattcattcatgtaggaattgaaacgatggatgaaagatgggttgagagaaacagattagttcctcatttccacgcagagccagaaaattgcccgttcccatgggcaagaagatcacccgagaatctgcttcgccaagagacttatctgacgcttgccacggtgttcgtcttgttgagattactacacttgatttcccccacaatggttgtgttcgtgaaattcacttggggacgggtgtcaaacatgagactagggaaccccttggaacatactgtgaccatgtatcttaaagaaccttgcatgagtagcaatttgcaggaaggagccatgaatgctagagcatgggcttccaagtctttggctactgtctcaattgcagaatcaagctcatcaagcagaagtgtttcagcttcacagtgacttcatattttaaccatcttgtataataaacacaactgttccttaaaccaatgaggggctttgattcatagctagcttaccagtttgtagcaaagtgtaaaatgctttcagattacaacattgtagctcaattcattatgtgtcaatcttagatcataactgatactacaactacttgagctctctttcgaatagagtgatccaagactatcgagatataatatctctctgctcaatctatatccattatttgagccagaattaaccaacttgctccatctgctgcatatctgcatacttatagagcttttcattaaacacaacctgtggatctttactaaccaaaacaccattctcgtcgtaagcatccttcaaaaacacagtccagttcatctcagtaccagccaagtaaaaactcatggactgcttcttcaacatctgataagtctgtctagtcaaactaaactcatctttaaactccacaatatgatgaatcgaagctctcttctccaacgtcaagttcaagaactcgtgcacaatcccaacgcgatacttctccgcttccaaactccaaacatcaagcttccaaccatccgaatacggcgaaacaagaggaaacgtattcaacaaattcagcttcctcgtatccttctcttccaactccaactccttcccatgcttcaccggaaacttaaacacccgtttcgccttatcttcgtcaatcataaacagtctctcgagctcacttaccgcaagattcgtgtcccaattcactaactcaagcactctattcccatctccacccgtaacaacccgaaaataatccggatatttcgcaacccggtctcgaaaatcttcaggaataccgaatagcaatcgagtgtgatggattttactcaacaggattcgtttatctttcgtcatcatcaatagcttacgaacacaattaactctatctaactccattgattccattaaacctttctcttcatctaacaaatcctccataaattccgtaaaccctaaccaaatcttcccatcgctatgtctatacgtttgaaagatcaaaggatgtttaggtatgaatttcgtaactttacgaccgcgagggaatccgagttcgcggtagagttttccggcgtcgtctagtcggaggattcgctccggttgctttgagatgaattctttggatcggattaggaatcggaaatgtgcgtcgcgtgaaacgagtgattccaagtgtgggagtttggttgattcgtgttggattgatttggttctggcggattctggtttttttcgctttttttttaatttgtctggtgttttcgtgatgaggaatgaggttgagaaaggtgaggttctgaaattagggttagggtttggggaagaagatgagatttgggggagagattttagggttcttgagaagaaacgaagccaagccatttgagtaatttacagtatcaggatttaagattaataatagctgagtttattataatggccgtcgaagcgggaaagagtttattgggctttagtgttgggcctttgatatgggctaagaaaactgaaaactaagcattgtaaatgtgttgatggtgtgtgtaagaagaagaatacatgtctagtgcgttccatagaaggttttcggatgagacatgagaagtgaagtgaacttgttggaaaaaaaatctcggttattttttttttctttcttgtataaacatgtatatgatcactttggcggtttcttgtggatacattatataaaggttaagcaatccggttaaaaatattagactctatacttctaactcaaaatcaattggcaattagtggagaagttcatctcttatatatattatttaagatcttattcgattttatatgtggaacaatatccctgatacactccctcgacatgatggttcttctcgccattgatctctatatattcgggcatggatcaactagctatctcgagaaacctcttgatcatgaagatcaagttaaagtaacacgtgatagtctccttgaggagtacaagaccattgttgatcaaattgaaggcaaggacactcctcctttaattactgatgctcatgaacgactctgaaaccatgaagcaaaactcctttatgcagctgtcgtagcttcctctgttgctcccatcatggccaacgatgttcaacactgccacaactccaacaatttttgccacgagcccaagcccaaaagcaacaacaacaacattcactttcacaatcatctttatggtattaattgacaatgagtgaagagacccatatattacttaagattctactcaacttttccaatgtgaaacaatatccctaataaaaacaaaaacaaaacttgatagtaaattcacaacaaatttgacatatgtataacaaaacttttagtatggattgttactaagatattgtgaaatcatgtatactttaagtttgtttaagtaaaatcagattcatacttttctataattagttagtcgaagatgcataagttttgttgatgtagttttaatcattctccaaaaattacttgaaaacaataattcatcttttgtccaatagtcaataggtatccacttattttaaacaatgtctcggaattccatgacaagagaaagaataactttatcaaataattttactggctagattcgtttatttcatacttccgatgtaatttaaactgttatttgggtaccagagaatggtgcatgaactgagacatgtagtgattcgtcttctatgtagaaaagattgtcgtattccgaagtaaaagaataacgaggcggagatcacaagaaataatgaacccatcttaactgactcaattgaaaatgatttaactgacccaatcaagaatgacatttttttaatttgtttcctggggacaagtgttatccaaagtcctttgcattttaattgtagattaaaacttattggttctcctagcttcatttgtttcttggtgacaagggttatccaaagtcctttgcattttaaatttttaattgtacatcaaaacttattggacaaaaacaatctcttaaattgattgttttaatatattttggatttaataatcttttaaatatatttttttggacaaaaacaatcttttaaacatagtttaacaaatattccctcaattccatgcaagttgatgttgttccacaaagattgatgttttagatcgatattattattatttttacttataaccaatagagagaaaatatattttatctattccaaataacaaatatctacaaattaggtgagactaagatcagttattttatctattccaaataaaaaatatttatatttctcttgcgaccctatattgttattttttatagattttaattaatttagataaaacatatatgttaatcaatgatatgatgaatcatatattgacattttttttacattttgatttttgtatataaatgaaatattaataaattagaatataggaatgatcaattattttatgtattccaataacaaaatttacatatatctaatatcttacttccatatgttgtctttttcagctgaataaagtatttttatatatcccaacaactaccattaggtcaaaaattattgtgactttaattaacttcatgaaaaaattaaagtaccattaggtcgaaattttcaataaaaatacacaactaaacaaattatagcagtttatatccataatattatacgtaatttagttcttcttttttaattaaatggttaaataagaaacaaagtcaatggtaaaacaacatgcactgatacacattatcagaaaataattttgttcttagcaatattacatcatggaaagaagaattaaacttagtttttttttttggttggcaatatgaattaacataagttttggtacctctctccgcgttaattaccaatagtgaataatttttgattgatataaatgtgtgtctttttaatatttttctattttcatagtgaagtgtttaaaaatatattttctttgcgatttgtatagtaaaatcttaggatattaacaaatatttatgtttgacatatttgatactcgttggtctttgtacttatcttttttttgttacagtaacatttaggttcatttttagttcgcttgttataggttttcttttcagttgcatgttgatcatcgatgtcgttgttgttagctgtgaatcttgtcggaatcttcacaaattttcaattctcatagccaatttttttggcgaaaaaattggtcaccggagagactctcttttctttctaacttcattatgatgcattttcattgaatgtttgctcttgattcccttattattttaatctcccgtaactaatgtaatctacgaccattaactagttgatgttgatcgaactctggatagctagaaatctatcactcaatcactagaagaccgaacccacgtatgtggcaaaatacgcaatttcttttccatgcagaaaaaaaaattgattatgtagttcacttaggttttgatgattttcttgttttgattttgatgatgttcttggttttgtttgacagattatcgatggatgataataagcttgagccaagaaagaagtagttaataaattcggcatacgtcaattttagttttaaacaaaaagattttgcatattttcatttcaacgctcaaaacaaatttgaagatgattgcaaaaaaccataaactaaaaaaatcaaacatcaatggttggagtaagtttgaatctacttgaagaagaggtaactcaaggaaaaggaaattaggattagacattatatttaggaagttgcttaaatatagatttgtgtattttcctagagtgattagaaaattgtctaattctattgttatataaggatgcaagaatgttgcataacttatgtgtttagaaattgagaggtttaagttttgagttattttcctaaagaaataaagaagttattctttatattgtgttcttgatcatatctctaaaacaagatcaatagtaatcatttgcactgtatttcccattgtagctctacacattggtttgagatgcactaaaaacactccccctcccgaatcatgcctctgcttcttttttttaattccttcttttctcttcttctttttttttcttttctttttctgttactattgagataatatatttgaatgatgattttatcgtttgtgatgctaactacttcttctttgactttgagacggtcacaaagtattccatctactatatatcgggatgctaatggggctaatcttgtattcagtcctcacctcctgctactttagtgaactgaattagtttttaagttcactaaactactatgaaatttttaaactaacaatagatcaaaaatttcaacaaaatacataacgaaaaaatattttcgcagtttacatctataaaattatatataatttagttcttttttctatctatacaagtaaatgattaaataagataacaaagtcaatggtaaactaatatacgcattagccattatgagaaaataaatttgttcttagctatattaggtaatgaaaaaaaaactaaattaatacgttttggtatccattatggaaagagtgactattttcaatttacaatcatataaaagtacatttttatctccctgtaggaaaatctttacaatattaaagtataacctgaattggcctaagaaaacaagatatcaacaatgaagctttatttcaaagccaatgttttttaccaaaaaaaaaaaaaaagaagaagaagaattagtgtctccgggacatgggcgtctggattggggagtggtccatattgcttttgcttttgaatatttctagtgttaacttatctatcatacattgcacttgaactgcatgggactcataaatatttggacatgggatatataacggatacgtatatgtcaaaacgctagctagaagaggatgattcagccatgctagattttagactacatgttttgttttttaatttacattgcacttgaattgcatgggactgataaatatttgagcatgggatttaacgagtatgcatgcatatgtaactaaatactactgtacaagagattcagccatgctagattttggattaaaatatttggtttgatttttattttatttttatttttttttatatatagaaaatagtttagttttcataaaggagataacatatttcaattatttcttcttgaaaatatcatcagcattttaaagttcagctagttaagaaaacttgtgttgcaagaacatataagaatagttgtcctcattagggatatggacatcatattatggggtagaaaatttggagtagtgcttacattatttattagagttatacaaatgacatagcttggacaaaccagtcaacgagttcccatgtaaactgtaagaaatctatagccataacaaattccaacctataagtgaaactaagtcaattttcactaaaaaaaaaaaaaaaaaacaagtcccactttcaactaatggatttgcacaacactaacaaattctggttcactagcagtaatttcttatccaacacaattcataaaaaaatcacatatatgattcttcaacacacatatgacattgaggaaaaaaaaaaaaaaaaaaaacaacaacacacatatcacatatatcatacaacaatcgtcaaagctctataaatctttagatgacttttatattttatacaataaactctcaagatatagtatttgagtactgtaacaatagttgaatgttataaggtggctacatctaccgaacattgttttcaagatgattcgtgacagcttccaaactacggttagatgaatattcttctatacatttaaatggtcaaatactgtatgcaacattatatggttctaattggtaatatattaaactatcgttgagttgcagtcgatgtaataatttaatgtcagttgctatgtataaaaaaaaactatatggttaaaactacaggtttatgtgatgtatttaaaccctttctcaaaaaaataaattgtgatgactttgatgtaaaaaatatgatgtaacaatttatgataaatgattaatcagtcacttttttattttgttgaaaaaataacggggcgttaatccgatgttgtgtatggatcttccgattaatcggaaaattaaattaaaattgggaattagttggaattaattttaaggttattttaatgtttttaaaacatattaatttaatattattttcaaaaattatagtaaatacataaactgtatttaaaaacaaaatatatgatttttattaaaattttgaacttaaattattgtaaaatatcacaaactctaaaaataaatgactgaataacaaaaaaaaaattgtttcatacttacaataaaaaaatacttaggaatatgtaagattagacaaggattaaaaggatagaaatcaaattaaatggaaaataataaaataactgatttttaagcgattagtcattaatcaaagcggataagatggatctaacgattaagcgaggattaatcgggttaggtggagattcttagaacggagcttttttgctatataaatttcaatactatatatatatatatatatatatatatttttattctttttgtgataaaacagttttatggcaaaaacaaaccacacttaggttaagaattttacttccttaatttttcaaatatagatattaactcaatctataaaacataatattttcatgattttgagttaagaatgttacaaaagacaactccaaaattgtaaattcgtcataacacatatatactttaaactaaaattttcaattaaatcatttttttggtaaactaattcatgcaacaataaccgtattttatttataggaaacaaagaaaaaacccaaatggtgccggtcggcgaataaaatgtgagagacagagccaaccatagtccagctaatgtttcgttagtacctcacaaactcccccagtcacgagcttcacccaccttcttctaacactagtacttaaaacaaattaatgacaacgtctacgcgcgtgataatcacgtgtcaaaattcatgacgtggaagcgcgtagtgacacgtgccgacatagtgtcagtaaatgctctcaatttacctatggattaggaattgtaggattactctctcatcttcctctatctactaacttgtgccagctgtacactcttccccatattttccagcctgtccaaaaaagtcctcccaacgtctctcagaagtttcacattttttctttaactgcccacgcgctttacccacagaaggaaaaaaaaaaacagcttgcataagggtatttacgtcattagatctgtaactaagctgtatattcttcaacacatttttatcgatatggtcaattttgattcctctttttaatcgattttttattggctgtatgtaactattgcttaatctgacacaattaaatctttattaattgttttatagtttatataatacatatataaacactaattattcctttaatatttatttagattacctctagcaactcttttttattggtccaacttgatttcattttctaatttgtagtattaaataaaaacatccacaacatgtacagcttttacaacaagaatcctatgtctcattctagcctccatgagtagtcttatccaaatccaaatatattcaaaatatttgtatatatatttaaaaataaaattatacttagcattatataatactctttttgtttcatcaagattgatgttataggtttttttcttattccaaaaagtttgatgttttagatcaatatttttattacttttatttgtaactaatatgtagaaaagagaagagagaagtagtgttcgatattattaaacaaataaaaaataaaaaaaatattttttttaaatttgtgtgaaaaacctataacattaaacttcatggaacggatggaatatttatatgaaattatacgtagcattatacatatttttatgaaaacttttgatgaaagtcattaaagaaactgaagaatttataatgacattttcacattataatcataacattgaaaaataagaattttaaaccaaagttgtatgtaatgaataagttgtcggactcgaaactgagtaaattataatgacatttgactatatgaccataacataattaagaaaattcaaattttgacataaaccaaaagttgtgtagaactatggatcattcgttagctggcaacagtacaatggtccattactcctttgtatcttttctttcaatttctctgcaccttccctttctctttcactttaaagcattatttataacatacctctctctttttttccatctttattatttaaaattcatattcaaaatctaatttccatttttaataataataaatccactctgagagaggcatatatatagccccatcacactctcatatatctcacaaaccaatctaaacatcaaagacaaaaaccaaacctctttcactattacacttttcctcaaaaaaaagaaaaatgtatttgttagtgtttaaactctttctatttttgtctcttcttcaaatctctgtctctgctagaaacctagcttcacaagaaccaaaccagtttcaactactcaagtaccacaaaggagctcttctctccggcaaaatctccgttaacctaatctggtacggcaaattcaaaccatctcaaagagcaatcatctccgacttcattacctcactcacacacacttctcctacgtccaaaactctccaccaaccatctgttgccacgtggtggaaaaccacagaaaaatactacaaactcgcaacacccagcaaaaactcatcacctctgtctctaactctcgggaaacaaatcatcgacgagtcttgctctctaggaaaatctttaaccgataaaaagattcaaaccctagcttcgaaaggagaccaacgcaacgccatcaacgtcgttttgacttcagctgacgttacggttacaggatttggtatgagtcgttgcgggactcacggacacgctcgtggtttaggtaaacgtggctccaagtttgcttacatttgggttggaaactctgagacacaatgtcctggtcaatgcgcgtggcctttccacgcgccggtgtacggtccacagagtccaccactagtggcaccaaacaatgacgtgggactcgatgggatggttattaacttagctagtcttttagctggaaccgcaacgaacccttttggtaatggttactatcaaggtccacaaaacgcaccgcttgaagctgcttctgcttgtcctggcgtttatggtaaaggagcttatcctggttacgctggagatttgcttgtggatactacaacgggaggtagttttaatgcgtatggtgcaaacggcaggaagtttttgcttcctgctttgtatgatcctacgacgtcggcttgctctactatggtctgaatactaaaaaaaagtccaatgtttggtctttggtagtagaaaataatattctagcgtaattcttttgttatgtttggttacaaattctagtataattcaatttattcattaatattattctcatttttcccttcatgttgtatgactgaaatcttgtcgcttggactataatttaacggaatattattaagacactttggcttatccgtatacattgtcgaatacaaagccaatgcaacttcttaaatagaaacaaaaacaatgtaattaaataacttaagaaattatagatcgacagataattggatcataagaagccaagacaaaaaaacaatacagcttcttccagtgacataaaaacaaaattacaaaaatatatagtatctgtcttagatcattaatagtaccaattttaattaaggtccaaaaatcttaaattttcatttggtatataagtaaaatattgaattttaatgctactttcctagagtttaaaggtccatttcacatattaagaaaataacattaactgtctctaacaatttacaattttgttttatgatgtcatttttttcaaaatatgtataaattatatttttattagttatagaacctgaaaaagtgtaggcacaaaacctggccaaaagaacctagaaattgcaacaacttgtattaaagaaaaggcatagaggttgatgggatactaaaaagtcttttcttttcggtggacttactaaacttcgacgcgtgatgggtcacgtgatcatccttagggccatcgatcgatgaacggtagggacggtttggtaacgtatgctcgttttggtctcttgccgaatgtttttaaatttctttgtatcaaaatctttgtcccaccactactcattggttccttcatatgtaaaacgtagcttcgtccccagtcatcacgatacatctatgcatgctttgactttcttaacacaatgatttggtgggtcaagagtcaagacaatcattgataagtaaaaattatatatttacaccaaaaatcattgataagtaaaaaaaaattgataagtaaaaattatatatttacaatcattgataagtaaaaaaaaattatcgttagccgtgaaaaacagtaattatatatttacaccaaaaaaaaaaaaaaaaaaaaaaaaacagtaattatagttagcttttagtaaatcgaacattgataactaaacgtttggtattgtccgtaatgacttttgcttatttctttggcctatgaccgaaactcgataaattcctaaaaagaagagaggctcaagagttttctttttcattcacaattattttatatcagccaatatataggtaaacaacatcttatgtcatgctactctctgatacgtatctttacaaattaaggaaaaaaacattagaaaatcactgatttgtgaatcgtttcctcaattaacgccaattcttttactcacacaacgttatgaccaagttaatatagaccaatccgattttagtaaaccagtttgataaccaaaccgagttttcatcttcaaaaccctccctcaattggagcagacaaatttcgtatgcctaacttgttcctgaagactgcaaaattatctatggccagaggttttgttagaatatctgctaactatgaagttgtaccaatgtgacgaggtgcaatgttaccttgaacaatttcatcaggaatagagtgatatatagactgacattcaacttctacatatttcgttcgttcgtaaaacaccgggtttgttgcaatgtagattgcagatttattatcacaacacataacaattggttgatcatgataaatcccaagcgtgaacaacaactatttaagccattacaacttcgatgtgagaaaaaccatcgctcggcttcagcgaaagatttacttactgttggctatttcttagttttccaagagatgagggagttcacctagctggataaggtagcatgtaacagagggacgagttagagggcaaaagagatggctcttaacgatgtcgcatctctcaccggcttaaccacaataaacctttcaagacacctagagaatttaagtaaaaaattgttcactattggaaacagtatacacaatactccggtgaaacgagtagacatggttttgggagatacacgtgtaagttttcatattatagcgtattatatttacaaatattaaaacgctagtagattgtcaactatctgaagtatagtagaatacatggtcacacatgtcaagtaaactaaaagatatttagctacctcacgtatatggattgcatgaccacatatacgaagtataggggtgtcaaaatgggtcaaaattcatgggtcaactcaactcaactcaacccatgaacgtaatgagttgaaaatattgactcaaatgagttgatgggtcaaattagttattgggtcaattggtttgatgaataaaataaattgggttgtaatggttaatggtttcaatggtttacccaattaaccattaagttttgtaaaattgaattaaaccaactaaaatctctaaatcaatgtccatttaagttgaaccaacacatctaaaccaatttaataaaatcaatatttttccaaatttcttaaatatacaagcgatgaaattgagaagaagtaaactcgtaatttttccaccaaaaaacacaaaaccgtaattttctctccaaaaacgaaaacccgtgattttcccaccaaaaatgtaaacccgtaatttttccgccaaaaaaaacataaacccgtgattttcccgcaaaaaacgtaaacccgtaattttcccgcaaaaaacgtaaacccatgttttttccgccaaaaacgtaaacccgtaattttccgccaaaaaaacgtaaacccgtgattttcccaccaaaacataaacccgtaattttcccgccaaaaacgtaaacctgtaattttcccgccaaaaacgtaaacccgtaattttcctggcaaaaaaatgtaaacccgtgattttccgccaaaaacgtaaacccgtaatttccccccaaaaaaacgtaaacccgtgattttcttgctaaaaacgtaaatctgtaattttttcgcaaataaagtaaacccgtaattttcccgccaaaaacgtaaaccattgattttttcgccaaaaacgtaaacccgtaacaagtggaatccgtaaatatcctaagtttgatgataatgaattaataattattaataattatttattattattttataataattattaattaaattgttacttaaatggacccatttaacaactcaacccatcaaatgaaatgagttatgggttgaccttacccatttaacccatttaacccattaatcatttaactttaaactcatttgattatgagttgagttgagttgggttacccattttgacatccctaacgaagtatatgacgtcatgtagttaacatcaaaaggataacatcgctggacaatgggtcattattgaaaaattttctgtgtctcagaccatgggagaatttatggcgatgaagcaataattaccgaataaaaatcatttactccatgatttataataccaattaaatagtttataagttattcttttttattttttatttaaatttatctgtatatcaaatttcatttttcgtgcataaaattttgtaccaaactacatcatttcacatatgtaaaaaatatccctcgggattagttcttttgagtttaattgattttggttgataatatatatattatatatatatatatcaatctccattataccaaagttaaaactatatattaatattattttagttgatattagtaaaggttaatataaatacaaattaatatttttagttaataaaatactatattagcaaaaatctgggataaataatttgatatcttgtcaacattttgatacttcgataaataatgtattaatgtgttatttctttttgtcattatctacaaaatgtctaatgtaactaaaatctatttgataaaatgatgtgtaattttaatcataatgttttacaaaatgtctaatttaattagatatgtttaaaattaaatataaattttattaaaataatattaaaatattaattttatgtggatgagataatcattggggctcactaatggaggtaaaattgaagtatgagtttttctaaataaaacattcaaaaaatatagtctaatataattgagatatcatgtgggtatctcaccaataaagatgatctaagcgttgtctaacaaaacattataaccacctaatattaaacaaatgtcaaacttcgacattacaacatttagaatattcccaacatttttatgcattaaattttatatgtatatttaatccgggtcaaatggcacccctttctccttagtggatctgccacttaacatcattcattttcaataggtttgtgaaggcaagacttgtccccttaacggcaaataagattgaaaacgactatctcttgtcacacacttcgttatgtcacgagctatacggttactttgactttgaggcatcactaccttgaacttatacaccactagaaacttcgaactaggttgtgtatatggccaaagtatgtccgagaacgggcgcagggttattcagagtttcaatagatcatgtcagcttcgaaagaatccacaaaatataacacaatattgccgtaatcttgttaagggtatgtagaaaagcatcgtagcccacgcagcaacaccacatacaataaaacttgaattagtccatgaagaactcactatttacattctttgggcttattattgggttacaaaaccatctttgggcttattattgggtcacaaaaccatctttgggcttattatcagtgatccataattattcctttggaacttttttttattaaccctttatttctcatttgctctcactatcgttcgttacgtctctgtaaatcactgagaaaatggaacctccaaaggaacaacaaaacacgccggagaaatcaatctccgatgctccagccaccatatcctccgcctttcctccttccggatgctgcacaaactgcggcggaccaacgatttcagaagcaccaccaccactagcttcattcccagagatgtcaccaccaccaaactatcgtccgatccgagctccagcaatcaatctcccacacaactctcaagcaataatcctctctcccgttcctcacgccgaacaagtccccgtcgtatctccgccctatcatttccaatctcccgtcaaacgaatccactctcccgacgatatccgccgatttcacgaatccgcttcttgtaagaacttcttaggattcgtagtatctctctcagaatcgatccgtggatttaagatctcagatccttgtcatatctcaccaaccgtcgccgccatagtttcaatccttgaaacattgttacaatggatcgatgagattcctcctgctcaacaatcagctcgatacggtaacgtttcgtttaggtcatggcatgaacggctccgtgagagaggtgaatcgcttatacttgagtttcttcctgaggaatttaaagaatctgtgattgagattgttccttacttcttcgatagctttgggaactcaagtaggattgattacggaacgggacacgaaacaaatttcgcggcgtggttgtattgtttagctaggatggggatagtgaaagaagaggattatcatagtttggttgctagggtttttgttaagtatttggagttgatgaggaaattgcaaatggtttattgtttagaaccagctggatctcatggagtttggggacttgatgattaccatttcttgcctttcatatttgggagttctcagttgattgatcataagtatatgaaaccgaaatcgattcataacgatgatattttggagaatttctctagtgaatacatgtacttgtcttgtattgcatttgtgaagaaggttaagaaaggtttgttcgctgagcattcgccgttgttggatgatataagtggtgtaccgaactggaagaaagtgaatagcggtttgcttaagatgtatagagttgaagtgcttgagaaagttccgattatgcagcatttcctctttggctggctcatcaaatggtatgattcttcttttttccttttgtctcgtttttagctgatctctattgctttaaaatagaaacctttggttgtgtaatggtttgtcgattggattatctatcttgagattaatatctagaatgatatttcatgttggtgatcttaacctgtgatgatattgtgaattcattgatggcataccaactttagaatagatgataccggattttctagtatgcggtttcacatttgtgatcattagttggatacttatggagaataatttgctgaaaactgatgtgtaacagctgcacaatattgtttgcgccattgtctacccaaatttgcatcccatttttcattagacatgaatattgacagcttctcattggcctctatagctaaatctcttgttgagttctacacagctgaatcgttcgtttattttgcgccaaatgttttaaaacattatcgtggaatctaattgcgtaaaaaatggtgttggcagggaagagtgatttacttcagtgtgccatacatggaagcagggacagcgattttctcttccttgaggttgcttaacataaagtagagacgcttttgcttttgcatgtatctgataggcatggtttatctttgggttttttttttatcatgccatcttcttcttgtattctctgcgttttacaacttcagattgtcttttttgatgattcgcttctgccttaggtatctaatagagtaaagaaccagataaaggggaaaggaatgttttattcaaaaatccttaaagaccataatttccctctagagtgaatcttcttgcgcctcggttacaaccgaacaatgaagctaaaacattcttgcttgcgtctctcaatatcaggaaaatagaaaatacccaagttatctccttatgtgtactagactactagtgattctctttcctagttttatggcaagttcatgtagttactgggtatctaacttattgatgcctggttctatgcatatcgatgcgacaaacggctacgacagagtaaaaatataattgtgaagttgatcactttggctgaaaatgatcactgcgagttaggtgttgttgctgttttaatcgttattttgtatccactttgccaaaccatatcaaaattagtcattctctgaacattctctatttcattatattggttgcgagaaaaatagacttgaatgtacacaaccagctgtatatagtagtttcatgcgagtcaatctctctttttatggtaagaagatctgatacaagttgtcctatgaagatttttaaaaatctaattttttttttgtgatggtagtatcaattttgagaatatgtgtatgaatggaacttgaattagaattgctgaaatttatatgaagcaaaaagagtattgatgagataatgtcagtactttttttttttttttttgtcatatatagtgtcagtactttaggaacacaaaatgatgctaatttaaatagaagctagaatgaagaagcacataatgaaacaaatgtgtatatttgaaatgaatatagtatgttttaagatgaggaaaacaacatgagggtgactttgtcgctcatgaggagaatgcaaattatcaaaatacttatctggtaaagatgaatttaatcttttgttcatagaaatcgtaacattcgatgatgcaatctccccttcaactaaactgagtcttgttctcttcatagatatatgatcatcgtgaatcattctttctttcgaacataaaagtctagttttcttcataacttttgtagatgattcatctcaataaatgtatgacaaaacataattttaattgggatctatcttcatcatagacattctccttagatgtctatctttagcgtgttatttgttttgtcgataaaaatattttcatgcaaaaacccagtaaaataaaaaccatgataaaaaaaaaaagagtttaaccacgcatatcattatatttttctctgtgaagcatcatcttcgaaaaattatgatctccactttctgctacttgttgggttcttgactataagagaagaactttggaagaatatttttatttatgtcaagagagaataataccgactgaattcgatatctacatcaatttatgtaaacaatgttgttggctctttacttgtacctattttgcatacttcttgtgaatggtaggacattaatctgagccataaaaaatctatacatgcctcatgaaaggaataattttggcatgatttgaacaagtgacaaccaaattttgttaatgtgaatgccatgaatttgttgttttgtgttatatatttacagggatccaatatgcatctttcatcttcaaaactaacaaaaccaaatttggagttgtaaaataaaataagcccaagtaaattgtaccttgtagttaaagaagacatgttttaattcatttcaacgtctctttgtagggaatgaattagatcctacaagtagattactattttttttttttattacttttgttcatattagtttgatattttagggttctttacttgttcataaaagattgattttgtaaactttatctaatctattttctattttaaattaatcaatgagtatattttggggcaaaaatattgaattatcaaatttctcatttataaattactctcggatattaaccatttgtctttgtcatctgtaaaaaggactaattatttttttacctttttcttgtttttttctcttcttattaatcgtttttactctctttaatattaaaccaataaaaagaagctagaaaaaagataagcaagaagaagaaagcgatttgagtattattcagtcgatttaagtacgtgaatctactactcgtatatttaatatgaataagttataatataatgaagaagatgaactgaagaatgttcaaccaattcctgtgatctaacactagctggagatttgatttgaaaaagttaagatataatgataatttatttttttctctaatttttctcgatccatgtttacctctacttcaataaaaaaaccttggtgagccttctaagacattggtcgtcactaactttgacccatctataagaagatgatatatcaaaaggtatacgagctgagtaagtaataatacatctctacaatttttcttccaaaaatacttttaccattgctaatatgttttgttttggcagcaaaatcgtacagaatcagatctttgtggaaaatatgcatcaaacgacaaaaagtattatgaaatacaaactgacccactcgtgatgatcattgcatgtattttatgatactatatagaaagagttattctcattgtttattttgtattagagatcaaatgtcagttagactagattggtttaaatcagtttagttgatttatgtaagaactcttgtacaatatccattgaaacttgaatggcgatattttaatttctctttccctctccatctaagacattagagtaactaatatgctatcttgttaggctataatgatttaagttggttggtttagtttttagtttgggtagattacctaattctttctctaatatggatttcttcaaatgtgagatcttatagtatgattgctaagtcaaaaatccaattcactagcatgaaaggatattcatcaaatttattttttaccattttaacaagttctttctattattttcggacatagattgtcatgttgtgtttgaatggcactaaaaaatccaagatctagaatattcaagttatgtaaatttggtggttgatacatcaaatgaatattaaaaccatgatgagaggcatatatgctaggaattcttcaaccctcctttcaacgtgagtttttacattatctttttaaattaattattttttattctaaaatctttttgtggtcatctttcacgaatttttcgaattagtttttgattagaaaatattttctattttctctcttgatggaagtcatcagccttaacaccaaagtacccgcctctcaatttcttggtcgtatctgagaattgcattgtatttttctagaaaatacctcattttcttcttcatcaaatcaatgtattatgacaggtaaaacatcaccttcccaatgtagtttttactttgacatgtattcactacaatgcaagttataagtttttttgttttttgtcataaaaaactatttttcaacgatatgcataacattttatatattaacaaatttcgaatgattggacaaagtactattatcaagtatggagacataaaattctagccgagctctcatttgacttgattgcagtttaatgatcctttcttttggacatcaaaattacttttttacatatgcgatatatcaacaacttcgccaaaataagtacttttaacccacttccaaattagagtttttaacggtacaaaaataaatctttctagtaagcaaggtaaacatctaattttttttgtgttctgtcatttttttcttataattcaaggattaattacgtagaaaccacaaaaaaccttgtgcccttgtatccaatgtcactttttccctccttcgtgcgttcatgtacttttcagttttcttgtttcccgtttcacccatatccagctctccctttttttttccctattactatacgggtagccccaaaagtacctgctcttgggcagccacatgattcacttctctctgattgcatcatctccctttctccggtcgcggtctttctcctccaggatttccaaattactgcctcctcgccactcaccacctctgatgtctcaaaacctttaactttgatttcccttcaaccacacccccaatcacagtgttcccgatcgcaatctcccccaaaacctctcgtatgccgaatctttcactctgctcctgtccctttctatgcaattgaaatcaacatcttcgatccccttgcacagcctccggctcaccgctcaggtaccctttcctagtttttttctaagatccgcatttaatgttctcatatcggcagctcaataaatctgtgtttcttcggatagttggaaatctctatgtcatcacctctggagcagcgtcgtgtcctcctatcaggtttctcctccatttctcccgctcatatattgctttactttcccagcggttcctctgctgttgttgctctttagttatgtcatacagaacattgtttgggccgttggtgaatctttgcctattccatagggttccctcgacccttcacttagggtttattgtctgttacctaagaactattactgtctcctaataaacaatgtgtatatcactttgcttgggttccctgatatgtatcattagggtttattgtcctacactcagggaagactatcggcttttgtacaacttttctccattacccatgggttccctgatctgtatcataagggtttagtgtccgtaaactaacaactactgaatttccattataaaagttgtgtttgacattctatttgggttccctgaacataccaataaggtttatagtcctataatttggtgtctactatcctcgttttcgtaagctgtttaactacttccatatacacatttgttcctaccactgtgtttatgagacttgtcacattattcctcagctgtttatgagtttgttaccttgaccccagggctacgcctctctatctctttgtataaaccaccgtaatttgtttcattgaacgctcgtgcagcctttctgactaggttagatacccctttctttggaaacttcagtctgacattcctctctatgtgaacagcacaggctccatggaaagcttctagatatacttgccccattgcagcatatattgagcgatgtctatcagatactattaccacatctgctgcatcaggcagtatggtagtcagttgccttaaaaaccatgaccaagctggttcactttcactatcaacaataccgaatgcaattgggaagaccataaaattagcatcctgcatgctagcagttaaaagaacacctttgaacttgtgtttgattgctgtcccatcaatcagcacaactctccgcatatacttcattcctgccacgcaagctcctattgcaaataacagatacttaaactgtttgctgcctgcaaccgcttctgtgtactctaatttataccttgtccctggatttgcttgctgaagcgaatgcatatagacagctaatagtttgtaactatcctcgtcgctacctctacaccttattatcgcagcttccttcgcataccaagccttcatataggttactgaaactttcagctcagctagcacaatgtccggtatgtctacacctcgtcgtccaggcatcccgtttgcatacttcccctatagcactttcgcaatgaccttagatgttgcaagtttcccatactgcgagcgtgatgcaatattgcaagtgtgtgtcagagttaaggtcctgacttcaaagttcttcgattcatgacctgctgaaacagcataaaccctccaacgacaccgacggtcaacaaaaacaaatattaatctgccaggatcaaatctggtctgcttgaaatggaacaaccttttaatagcatatatcgataatgttgttcgcatatgctctttatctttgaacattctgccaatgtatatggcatcttcctcagatgaggctggagcacacccatctacaaaagtcagattgtacacgtcatcgaagactggctcagcatctgagaaggctagatcactaccatagttgtcattcctgtccaacgggtttaaaggtggcgatggttctggttgatgaaagatgcccagtctccatgtcattgatgaaaggtggcggtggagttagagattcctccctggcagcatcgtcatgctgcgattcatcagaaagatgcccagtctccatgtcattgtcactgaccccagtgggaaactcactagtcatcagatgactccagccctcgtactcccacaacccatcatcaccatctgcagaggactcattaaaaccgtcggtataactatcttcatctgcatcctcatcactctgaaatagcttacgcttccctttgcactgacgttttgatttctctgccctctcaatctcttctacctctcttaacatcctcatatcctccgcctcagtctcagattccacatatgcattagagactgaatcctcacaattatcggctaaattgtttgataatgatggagttgctgcatctgcaagattaatgataccatttgcattggtactcagccacggctctgtgctactctccctcagttgtggcacaacacaatcatttgaatcgtcaccggctgtgcagtttgcagctgtggcaatattcactccaacagtttcatttgcatctgttgcagcagcaatcacagttgacgcaggtggtctgaaactactcatcatattcaaacattcagctccattagtaccattcagaatccccaatgctgattggaaatatgttatctccttagaacattgtcccctttcttcatcagccttctcaccatctatagcttttcctttcccttagcactttaacaactccaccctcacaccatcaactagataaggtagagattctagagaaagcaaaagattaagctgaggctcactctcccttaccctaaggaagttcctcacagccatgtcgctaccaacaactacaggaggccttgtgtttacagagaacacagacagttggcccgacaaccaataactcaactgcggcttccagttttctgcatcaagttcaaactcctcacatacattgttattcagcgtttgaaatgtcattgccacattcatacatacggtccgagcgtaacaatctttagcaacaacaaatttccacactcccttctctgaacagtcccaacctccagctataacacagaccgctacgtctcccccctgttcaattgtttcacaaactgtaaatcagatcacttgtaccaaagtacaagtcacaaactatactacaagccacaaactatactagaagcaccaaattacatgccacacactatactaccagccacaaactatactacaagccacaaattacaagtcacaaactagtcagtaaggcacaaactataaggcacaaactataatagaagccataaattacatgtcacacactatactacaatgacaaatctgattccaaattacttacatgtgggctcatagcagcagcgtttggtcgtcggaatctttactattcgtcgtctactgacttcttctgtgcaatcaccttctgccgtcgacgatttctctagggtttggaaaaatcatcacaataatgtacacgcacacaacaacccttaaatatatccagcaatataaggcccttaatcgtcgttcacaagttgggttgccctcgtgcatcttcggcgtccacatagccacgaacagtgcaaaatagtaccgccggtcaagtcagcgggcagacatttcgaaacataacttatcccgccaaacaatttcgccatccaactcaagggtacgctcatcatttcccggccttataagtacctactctcacaagcccaccgaaatgtgtcttaccattagtttttgggctgaattgtaccctcccgtacaaaagcccctataattcaagctttttgaggactttgtgatatgttttctcctgtcacaatatttaaaatataagcaaaaatacattaaaataaaataataagcttactaaaaaaagattaaataacatgattcagaaacacttccataaatttagttatagatgaaactactgcgtgatatttttaagaaaataaatgcctccataaaattactaaaaacatactctaaatactttatttcatgtatcaaaggaaaataattagaacaatataactctacaattgttttcttcccatatgttaggtttaaacatttgtgatatacatgaatgtctagcaaatcattagacgtaaagtgtaaacactagtaaatcaatatttataaaatataagaatctactaaaataaataccataattttatgataaaacggattcgagttctactctgtattgtaaaattatcacatctaggctccgaatgatgacgtgcgattcaactacggataaagtgcggtgtggttttaatagtaacaaaaatatatacatatacatacatggctggtcccgactattcggagaccaaagcaacaagttatatattttgggattattataaaatattttaaattttggaggcctttttcttagaactgaatatttttggaggcctatttgcaaataagttttggtgtaaatttttgaaagaaaaatggggtcatattcaaatgtttcatgtggctcccttaaagactagtcttgtatgtatatatgtagatatttttgttactattagaagtatacgatactgtgtggtctgttctctattcggaaccctagtctgaccctttgttcaaaaaatcggccgcctagccgggcgcctaggcgctaatcagatgggatccacgacaatttttttcaaatcgagaagattaatcgttgatccgatttttatccgtatagacccgcctaaatccgtctagagggcgcctatcccaaattttttttttctaaaaagaaaatttaaaatttaaaatatccaacttatgttcgtaatttgtatgaaaaatcatatatttgaacctacaatcttattttcatatgtttaatataattttaaaaacaatattatataaatttcttaattataatgaattaatatgttttaaaaatattaaacaaccctaaaactaatccctgattaatttttgtataatctctgatttttttgttaggcgctaggtccactcttactgcccgactagcgcctaacgattttttgaacaaaagtttgaccagataatataaaatgatgaaatctagcttgacgagataataataaacttttcgcatggatctgcatttttttgagtaaaatagaaaagtggaaaaatgaaaaaataaaataataatatattaactgtttttattatataaattttacttttacgcaaaattatatattaaacgtcacataattaaaatcccttaaatctttatcctactgtatgttctgaatcgggcttttgtattttgattcgtgaaaagtctttcacttcaccggaccgaagatgattcgtgaaaagtccacatttcacatttctcaattcacacttgtgctttcgaaatgggcttttaactttggtcctaaagactttctctcatctatatgtctctgaattctaggacacagtcaacaagtcaacgtcggtaagagatcccacaacaacatctacacagacacgtgtacactatctctcactttttcaccgacacgtgtcggttctttcacctacaagtaaaactctctccattatcttcaataatgtcaaaaatgtcacacacacacttagtcatagtaatacccaatttccacggcacctatttgccatcgaacaaacaataaaaaactttattagttttcacaattaatacttttaactctttcccgagagtcgtaagaagagaaaaaacaaaacttttttctttttcgttgaagaatttttacataaaagttttgtagattctctgatcagaattgtgtaaaaggtattctctttttttttacttgttgaagaattaaagtaagtaaataattgatttcttattggagggacccttttgttgtcatagaatttactctgctgcgtttttttttactgttgttgctttgttcttgttgtttggttgtatattgttgatgctctctctctctcgttaggtgaagtagatctctcttttctctttctctttctcctctctctctctttccttactcagcttttgtggtgaatattgaagaaagtttctctggtgaataagagtttgttcttatttttatgaatttgttctgttttcttgttgatagtttttgggtttgataaagttgtttcctttttacttcttttagtatctatctttccaattctagtaacttcactggttcttgagctctttcaactttttgtttcagatctctctgtgtttttttctgatctttctccagtggtagcttctgagttagtgattgtactttacttccatacttcttgttcttgctcatagattttagctgtggttttgtggagttttagctctcagtgattgttttagttttagttccttaaacatgttttgttcatatgggtttgttagatctttgagttttcttcatttctttattatctctcttggatcttgatacaaaagtatgaatctttagattgcttcaagaaaaaaagttttaaagactttaagagattcttagatacatagaatttgaagatcttgtattggtttttgtgaaacagatatttgttagatggaagaagattgcgagtttcgacattgggatgagttgattccagatgctcttggtttaatctttagccacttacctcttcaagaagtactaacagtggtgcctagagtttgcaaagcatggaacagagctgttactggaccttattgttggcaagagattgacattgagctgtggagtaaccgttttcaccagtctgatcatcttgaccggatgcttgagatgttgatccctagaagcgctggctctttgcgaaaactctccgttactggccttcgaaatgactctatcttctccttcattgcacaacagtaagttgctatagtttaatgtattatgatcatatttagaataagcttttaagtggttataggcatagaatgtattaggggatgtgattgaagcaacatgatttcttagttcattgcttttgtatctaatattttacatgttttcttgttttgtttggtaagtgctggttcacttaagaccttgaaggtgccaagaagtggtctgactaattcgggtgtggtaaacgtagctgaaaagctctcgtctctcactttcttggatttgagctactgctgcaaaataggcccagaggcgatacaagccataggaaaacactgtaaatcactgagagagttttgcagaaacatgcatccattggatgtagcaagtgttgtctctcacgacgatgaagcttatgctatcgccaatacaatgccgaagctgaagcggttagagatagcttaccaccgagtcagcacagaaggagtactcaagatcttatcgtgctgtgtttttcttgagttcttggaacttagaggctgttgggacgtgcaacttgataacaagtttttcaaagagaagtttccggatatgaaagtgttaggtccacgcgtgatcggattctatgatatgataaatgattgggaggattgctgctcagattacttctcagatgggtctgattacttggcttgggagttttttgaagatggtgtaatgggagagttctatgaggatgagtttgagcatggttgggacgataatttttatgcggaaaacgcagttttagacatggaaccgcatatttggccaccatctccatgaaccaggccttgttatgttcgaagtctctacctaaaagttgcaactaggaatggttttagcctctcttaagtgtcttaatctatgtatggtgcttgaacttgtgtggcttctttgtgttattctaatctaaaaggctttaatctctctttacttagtgatgtttagattcatatatatgtgtgtgtgtatagaattggagatgtcaagttgatgtataagaaacaaaagaagtgaagaagtaagtaaaaaggacaaggctattgaggaagaattcaaatgagatggggtcacttcacaacaaaagcttttacttatctgccattttgtgtagtgttgtgtcttttctttcattaaatagaaatgatgtattggtctgttttactttgaagtctttgtcatacttatttacttgtatatgatcaaagttaactgtagtaatttacatttagcctagtttgctagcttttgaggcctttggttctcaagtataaattttggttctggtttgtctttggatacctcaaagactgtcaagctctcatgcacctctctagagattcccataggtttttgacgacttttgcaacctcttccttctctttaaaacaaactcttacttagttgagagatgatgtacattgtttttttttagcgtatcttagaatcattttcatgttgtttttcttacatttgcatcaagttttagagtccgtttaggatctttagtcttgttttttctcttcctaggcatctttggcgaaaatcataggaattggaggcaaaacatggattaagaagcttgaagccaaggaattttggagaagagtgatcaatgaaatcaagattgagtctagcaaaagttaggcggaagcaaataatttttcctataatattcaccaaaaaaataaaaaaattcctatgatgtttttctttctaaaaatgcaatacttcatcaattgatcaagagaaattaattatcattatctaaaccaaatactacatattcgcatgtaggcaagaagaagtggagtcactgctttcttgggtctatcattttcttaaggttttgccttgttacctcggttcttagtttgtgtcatcgtcctctttcgagcttggtttgatattttctgcattgtaatccgagtttagttcgtctcctttatctaaggcctagatttcggggaactccttttttccgccggcttatgttttcggagacttatagtatgtccgccggcatatgtttctcttttttggacacttgtattttaccttggttgacaataaaattctataataaaattttcagatgacaaaaaaaataccaaatactacatagaatacattatgcaaggccaccaagtgatgaagaatggtcaaaacagattggagacctcctttaaagttccatcaacaattttgttaggacttttttttacaccaaatcgattctcgcagctttgactttgatcattgttctcaaagtggtaactgtcaatttatgatatatccaagcccatcaacaaagagagattgcttctaacaacatcccgttttcccaaagccttgtgataatatatatgtcacttaattgccctctccttggctctctccctgttgtagctagtggacatagttgtagcatcgtttgttattattctgaaaacaggtaaatcacactcaatttatattgtagttaatcaagctcaacaacactgatgagcagcatctacgcactcgatttaacatcaattaaaatatgagatcatcgattctaaagtattagagtatttgaaatagagaaatgatctctaatagcacataatcaagtttcacaaaaagcaccataaactctttagataaattctcacaaatagcacaattttaagttttttggacaaaaatagcattaaaattttttttgacataaatcgcattcaaataattattttatatttaattattaaaatttaaaattcaaaaaattcaaaaatacacaaattctttaccaaaaattcccgccaaaaaattcctgacaatattttcccgccaaaaaaatttccgtcaaaatttttccgccaaaaaaatagaaattcatgacggattttacaaaatttaggaaggattctaagcaattcaagaaagattttacgaaatatagaatatattttttttgtatcccttcctgaatttcataaaatccttcctgagttttgtaaaatatttcctaaattttgtggaattcttcaaataatcattttctgaaatttaggaaggattctacgaaattcaggaagggtttcacgaaatttttatttgtgaaagctttcctgaattacgtgaaatcattcccgaataccgtagttaccttcttgaaattttttttgcggggaaacttttacgaagattgttttggcgggaaaatttgataggaaagtttttggcgagaaacttttttacgaaatgtttttttgtgggaaaccatttgacggaaaatatttacttttatttatttattttagttaactaatcgtttatatttaatatttaattaaagttttgagtgctatttgttgattttttcaaaagagatgttatttttggaagaaaaaacttttagtgctatttttgtaatcctcctaaattttaatcaaaccttaaatataaattaataattaagaaaatacaaatacgaatacacaaatttatcgccaaacaaagattattaagtttttcatatgtatttatactataaattgttttgtaaagcctttaatttgtggactatactataaatttttcagtagggcctttaatttgtgggcttttttttacatacaattatataaactaaaacctaaatgctagagttaaaaaaaagggcgatttgtgagtcaacttaatttttgtacaagtaaaaatcatagtttttgaggttaattgttagttttgcttatgaatttattgttattcttcctttctatcgtggcaaaatttgtaagaaaaaaaagatgcaaatcttgtgataatgtgattagttaaactccaattttagaatggatcgatcactagctttgttaaaatatgagacacaaactttcatcaaatttaacgtatttgaccttgatttgtgttaaatatttgtcgcaatataaagttgtaaacgttatataaggaaatgttcaatctctcttctttttttttgaattctttttaactgaatttgtagatgttatataaaaatatgacatatgacaatgttttataaacatgagtatatttgtcacaatgtttaacataataattttgaaaagagagaacaaactgcaacaatgttgttatataatacaattttccattaatattgaaaatatgagatttctatgggatattgcacaaaagctaaattacaattcataagattaataaaaatctttaagtacaatgtatcacaccaattctgctagttttagaaaaatataatatcttttttttgcctttttcataatgagtcaaatttatgtttatggaggatagaatctcaatgttaaaaaagagtaacaattcataaaattaattaaaatatttatgtgtaatgtatcacactatttttgccagctccaaaatgttacttttagaaaataaatgagaataggatatttgttttttgtctttttcataatgagttaactttatgtttacggaggatagaatctcaatattaaaaaggggtaacaatttatacgattaattaaaattttatgtacaatgtatcacaccatatctgctagctctaaaatgtaataaataagaatataatatatattttttgtctttttcataatgggtcaactttatgtttatgaaggatagaatctcaatgttaaaaaggggtaacattcattagattaattaaaatctttatgtatatacaatgtatcacactattttcgccagctctaaaatgacagttttcgaaaataaatgagtcaactttatgtttatggaagataaaatcttaatttaaaaaaaggtaagaaaatcttctatataaattggtcaaacttcctttcagtcttcaattcaaatcattgttttttattactaaaaggaaatataggatttaggatagtcccccaaaatgctaagtttcaactaatataaaaagaataaatctaaattacagctcatctctttaaatgaaattgtaatggacagtgtatcacaagatttttgccagtcctgaacgttctaaatctttaggcgtttatttgttctatttataaatatcaaatcgtagctttataatccattcatagtcctttgctcttgttttactactctcactaatttttttataaaaacaattcttagctactagctagctccatttataatcccttcactcaactttcttgtttcactattctcactaaacgtaagttttcttgcatcatttttctaaattttattgtcgatatcaaactagattcgaaggatttcaattgaaagtcttatgatatttaattgttacgtcgatataatctatgtgatgtagaaacactcatttttaggggtctaattacatctattcaagcaaatcttttatttaaagtgtgcatgctaatgatttggataattttgtttcaaattagggttttctcggaaatggagacaaaagttgggaagcaaaagaagagaagtgttgactcaaatgatgatgtctctaaggaaaggagaccaaagcgagcagcagcttgcagaaacttcaaggagaaacctcttcgtatctctgacaaatctgaaaccgttgaagctaagaaagagcagaacgtggtggaagagatcgtggcgatacagttaacttcttctttggagagcaatgatgatcctcgtccaaaccggaggctgactgattttgttttacataattcagatggagttccacagcctgtggagatgttggaacttggtgacatttttcttgaaggtgttgtcttacctttaggtgatgacaaaaacgaagaaaagggtgtgaggtttcaatcttttggtcgtgtcgagaactggaatatatctggttatgaagatggttccccggggatatggatatcaacagcgttagcggattacgattgccgtaaaccagcttctaaatacaagaaaatatatgattatttctttgagaaagctt

SEQ ID NO: 554 - DNA, 93489 bp, Arabidopsis thaliana
gaattcattgatggcataccaactttagaatagatgataccggattttctagtatgcggtttcacatttgtgatcattagttggatacttatggagaataatttgctgaaaactgatgtgtaacagctgcacaatattgtttgcgccattgtctacccaaatttgcatcccatttttcattagacatgaatattgacagcttctcattggcctctatagctaaatctcttgttgagttctacacagctgaatcgttcgtttattttgcgccaaatgttttaaaacattatcgtggaatctaattgcgtaaaaaatggtgttggcagggaagagtgatttacttcagtgtgccatacatggaagcagggacagcgattttctcttccttgaggttgcttaacataaagtagagacgcttttgcttttgcatgtatctgataggcatggtttatctttgggttttttttttatcatgccatcttcttcttgtattctctgcgttttacaacttcagattgtcttttttgatgattcgcttctgccttaggtatctaatagagtaaagaaccagataaaggggaaaggaatgttttattcaaaaatccttaaagaccataatttccctctagagtgaatcttcttgcgcctcggttacaaccgaacaatgaagctaaaacattcttgcttgcgtctctcaatatcaggaaaatagaaaatacccaagttatctccttatgtgtactagactactagtgattctctttcctagttttatggcaagttcatgtagttactgggtatctaacttattgatgcctggttctatgcatatcgatgcgacaaacggctacgacagagtaaaaatataattgtgaagttgatcactttggctgaaaatgatcactgcgagttaggtgttgttgctgttttaatcgttattttgtatccactttgccaaaccatatcaaaattagtcattctctgaacattctctatttcattatattggttgcgagaaaaatagacttgaatgtacacaaccagctgtatatagtagtttcatgcgagtcaatctctctttttatggtaagaagatctgatacaagttgtcctatgaagatttttaaaaatctaattttttttttgtgatggtagtatcaattttgagaatatgtgtatgaatggaacttgaattagaattgctgaaatttatatgaagcaaaaagagtattgatgagataatgtcagtactttttttttttttttttgtcatatatagtgtcagtactttaggaacacaaaatgatgctaatttaaatagaagctagaatgaagaagcacataatgaaacaaatgtgtatatttgaaatgaatatagtatgttttaagatgaggaaaacaacatgagggtgactttgtcgctcatgaggagaatgcaaattatcaaaatacttatctggtaaagatgaatttaatcttttgttcatagaaatcgtaacattcgatgatgcaatctccccttcaactaaactgagtcttgttctcttcatagatatatgatcatcgtgaatcattctttctttcgaacataaaagtctagttttcttcataacttttgtagatgattcatctcaataaatgtatgacaaaacataattttaattgggatctatcttcatcatagacattctccttagatgtctatctttagcgtgttatttgttttgtcgataaaaatattttcatgcaaaaacccagtaaaataaaaaccatgataaaaaaaaaaagagtttaaccacgcatatcattatatttttctctgtgaagcatcatcttcgaaaaattatgatctccactttctgctacttgttgggttcttgactataagagaagaactttggaagaatatttttatttatgtcaagagagaataataccgactgaattcgatatctacatcaatttatgtaaacaatgttgttggctctttacttgtacctattttgcatacttcttgtgaatggtaggacattaatctgagccataaaaaatctatacatgcctcatgaaaggaataattttggcatgatttgaacaagtgacaaccaaattttgttaatgtgaatgccatgaatttgttgttttgtgttatatatttacagggatccaatatgcatctttcatcttcaaaactaacaaaaccaaatttggagttgtaaaataaaataagcccaagtaaattgtaccttgtagttaaagaagacatgttttaattcatttcaacgtctctttgtagggaatgaattagatcctacaagtagattactattttttttttttattacttttgttcatattagtttgatattttagggttctttacttgttcataaaagattgattttgtaaactttatctaatctattttctattttaaattaatcaatgagtatattttggggcaaaaatattgaattatcaaatttctcatttataaattactctcggatattaaccatttgtctttgtcatctgtaaaaaggactaattatttttttacctttttcttgtttttttctcttcttattaatcgtttttactctctttaatattaaaccaataaaaagaagctagaaaaaagataagcaagaagaagaaagcgatttgagtattattcagtcgatttaagtacgtgaatctactactcgtatatttaatatgaataagttataatataatgaagaagatgaactgaagaatgttcaaccaattcctgtgatctaacactagctggagatttgatttgaaaaagttaagatataatgataatttatttttttctctaatttttctcgatccatgtttacctctacttcaataaaaaaaccttggtgagccttctaagacattggtcgtcactaactttgacccatctataagaagatgatatatcaaaaggtatacgagctgagtaagtaataatacatctctacaatttttcttccaaaaatacttttaccattgctaatatgttttgttttggcagcaaaatcgtacagaatcagatctttgtggaaaatatgcatcaaacgacaaaaagtattatgaaatacaaactgacccactcgtgatgatcattgcatgtattttatgatactatatagaaagagttattctcattgtttattttgtattagagatcaaatgtcagttagactagattggtttaaatcagtttagttgatttatgtaagaactcttgtacaatatccattgaaacttgaatggcgatattttaatttctctttccctctccatctaagacattagagtaactaatatgctatcttgttaggctataatgatttaagttggttggtttagtttttagtttgggtagattacctaattctttctctaatatggatttcttcaaatgtgagatcttatagtatgattgctaagtcaaaaatccaattcactagcatgaaaggatattcatcaaatttattttttaccattttaacaagttctttctattattttcggacatagattgtcatgttgtgtttgaatggcactaaaaaatccaagatctagaatattcaagttatgtaaatttggtggttgatacatcaaatgaatattaaaaccatgatgagaggcatatatgctaggaattcttcaaccctcctttcaacgtgagtttttacattatctttttaaattaattattttttattctaaaatctttttgtggtcatctttcacgaatttttcgaattagtttttgattagaaaatattttctattttctctcttgatggaagtcatcagccttaacaccaaagtacccgcctctcaatttcttggtcgtatctgagaattgcattgtatttttctagaaaatacctcattttcttcttcatcaaatcaatgtattatgacaggtaaaacatcaccttcccaatgtagtttttactttgacatgtattcactacaatgcaagttataagtttttttgttttttgtcataaaaaactatttttcaacgatatgcataacattttatatattaacaaatttcgaatgattggacaaagtactattatcaagtatggagacataaaattctagccgagctctcatttgacttgattgcagtttaatgatcctttcttttggacatcaaaattacttttttacatatgcgatatatcaacaacttcgccaaaataagtacttttaacccacttccaaattagagtttttaacggtacaaaaataaatctttctagtaagcaaggtaaacatctaattttttttgtgttctgtcatttttttcttataattcaaggattaattacgtagaaaccacaaaaaaccttgtgcccttgtatccaatgtcactttttccctccttcgtgcgttcatgtacttttcagttttcttgtttcccgtttcacccatatccagctctccctttttttttccctattactatacgggtagccccaaaagtacctgctcttgggcagccacatgattcacttctctctgattgcatcatctccctttctccggtcgcggtctttctcctccaggatttccaaattactgcctcctcgccactcaccacctctgatgtctcaaaacctttaactttgatttcccttcaaccacacccccaatcacagtgttcccgatcgcaatctcccccaaaacctctcgtatgccgaatctttcactctgctcctgtccctttctatgcaattgaaatcaacatcttcgatccccttgcacagcctccggctcaccgctcaggtaccctttcctagtttttttctaagatccgcatttaatgttctcatatcggcagctcaataaatctgtgtttcttcggatagttggaaatctctatgtcatcacctctggagcagcgtcgtgtcctcctatcaggtttctcctccatttctcccgctcatatattgctttactttcccagcggttcctctgctgttgttgctctttagttatgtcatacagaacattgtttgggccgttggtgaatctttgcctattccatagggttccctcgacccttcacttagggtttattgtctgttacctaagaactattactgtctcctaataaacaatgtgtatatcactttgcttgggttccctgatatgtatcattagggtttattgtcctacactcagggaagactatcggcttttgtacaacttttctccattacccatgggttccctgatctgtatcataagggtttagtgtccgtaaactaacaactactgaatttccattataaaagttgtgtttgacattctatttgggttccctgaacataccaataaggtttatagtcctataatttggtgtctactatcctcgttttcgtaagctgtttaactacttccatatacacatttgttcctaccactgtgtttatgagacttgtcacattattcctcagctgtttatgagtttgttaccttgaccccagggctacgcctctctatctctttgtataaaccaccgtaatttgtttcattgaacgctcgtgcagcctttctgactaggttagatacccctttctttggaaacttcagtctgacattcctctctatgtgaacagcacaggctccatggaaagcttctagatatacttgccccattgcagcatatattgagcgatgtctatcagatactattaccacatctgctgcatcaggcagtatggtagtcagttgccttaaaaaccatgaccaagctggttcactttcactatcaacaataccgaatgcaattgggaagaccataaaattagcatcctgcatgctagcagttaaaagaacacctttgaacttgtgtttgattgctgtcccatcaatcagcacaactctccgcatatacttcattcctgccacgcaagctcctattgcaaataacagatacttaaactgtttgctgcctgcaaccgcttctgtgtactctaatttataccttgtccctggatttgcttgctgaagcgaatgcatatagacagctaatagtttgtaactatcctcgtcgctacctctacaccttattatcgcagcttccttcgcataccaagccttcatataggttactgaaactttcagctcagctagcacaatgtccggtatgtctacacctcgtcgtccaggcatcccgtttgcatacttcccctatagcactttcgcaatgaccttagatgttgcaagtttcccatactgcgagcgtgatgcaatattgcaagtgtgtgtcagagttaaggtcctgacttcaaagttcttcgattcatgacctgctgaaacagcataaaccctccaacgacaccgacggtcaacaaaaacaaatattaatctgccaggatcaaatctggtctgcttgaaatggaacaaccttttaatagcatatatcgataatgttgttcgcatatgctctttatctttgaacattctgccaatgtatatggcatcttcctcagatgaggctggagcacacccatctacaaaagtcagattgtacacgtcatcgaagactggctcagcatctgagaaggctagatcactaccatagttgtcattcctgtccaacgggtttaaaggtggcgatggttctggttgatgaaagatgcccagtctccatgtcattgatgaaaggtggcggtggagttagagattcctccctggcagcatcgtcatgctgcgattcatcagaaagatgcccagtctccatgtcattgtcactgaccccagtgggaaactcactagtcatcagatgactccagccctcgtactcccacaacccatcatcaccatctgcagaggactcattaaaaccgtcggtataactatcttcatctgcatcctcatcactctgaaatagcttacgcttccctttgcactgacgttttgatttctctgccctctcaatctcttctacctctcttaacatcctcatatcctccgcctcagtctcagattccacatatgcattagagactgaatcctcacaattatcggctaaattgtttgataatgatggagttgctgcatctgcaagattaatgataccatttgcattggtactcagccacggctctgtgctactctccctcagttgtggcacaacacaatcatttgaatcgtcaccggctgtgcagtttgcagctgtggcaatattcactccaacagtttcatttgcatctgttgcagcagcaatcacagttgacgcaggtggtctgaaactactcatcatattcaaacattcagctccattagtaccattcagaatccccaatgctgattggaaatatgttatctccttagaacattgtcccctttcttcatcagccttctcaccatctatagcttttcctttcccttagcactttaacaactccaccctcacaccatcaactagataaggtagagattctagagaaagcaaaagattaagctgaggctcactctcccttaccctaaggaagttcctcacagccatgtcgctaccaacaactacaggaggccttgtgtttacagagaacacagacagttggcccgacaaccaataactcaactgcggcttccagttttctgcatcaagttcaaactcctcacatacattgttattcagcgtttgaaatgtcattgccacattcatacatacggtccgagcgtaacaatctttagcaacaacaaatttccacactcccttctctgaacagtcccaacctccagctataacacagaccgctacgtctcccccctgttcaattgtttcacaaactgtaaatcagatcacttgtaccaaagtacaagtcacaaactatactacaagccacaaactatactagaagcaccaaattacatgccacacactatactaccagccacaaactatactacaagccacaaattacaagtcacaaactagtcagtaaggcacaaactataaggcacaaactataatagaagccataaattacatgtcacacactatactacaatgacaaatctgattccaaattacttacatgtgggctcatagcagcagcgtttggtcgtcggaatctttactattcgtcgtctactgacttcttctgtgcaatcaccttctgccgtcgacgatttctctagggtttggaaaaatcatcacaataatgtacacgcacacaacaacccttaaatatatccagcaatataaggcccttaatcgtcgttcacaagttgggttgccctcgtgcatcttcggcgtccacatagccacgaacagtgcaaaatagtaccgccggtcaagtcagcgggcagacatttcgaaacataacttatcccgccaaacaatttcgccatccaactcaagggtacgctcatcatttcccggccttataagtacctactctcacaagcccaccgaaatgtgtcttaccattagtttttgggctgaattgtaccctcccgtacaaaagcccctataattcaagctttttgaggactttgtgatatgttttctcctgtcacaatatttaaaatataagcaaaaatacattaaaataaaataataagcttactaaaaaaagattaaataacatgattcagaaacacttccataaatttagttatagatgaaactactgcgtgatatttttaagaaaataaatgcctccataaaattactaaaaacatactctaaatactttatttcatgtatcaaaggaaaataattagaacaatataactctacaattgttttcttcccatatgttaggtttaaacatttgtgatatacatgaatgtctagcaaatcattagacgtaaagtgtaaacactagtaaatcaatatttataaaatataagaatctactaaaataaataccataattttatgataaaacggattcgagttctactctgtattgtaaaattatcacatctaggctccgaatgatgacgtgcgattcaactacggataaagtgcggtgtggttttaatagtaacaaaaatatatacatatacatacatggctggtcccgactattcggagaccaaagcaacaagttatatattttgggattattataaaatattttaaattttggaggcctttttcttagaactgaatatttttggaggcctatttgcaaataagttttggtgtaaatttttgaaagaaaaatggggtcatattcaaatgtttcatgtggctcccttaaagactagtcttgtatgtatatatgtagatatttttgttactattagaagtatacgatactgtgtggtctgttctctattcggaaccctagtctgaccctttgttcaaaaaatcggccgcctagccgggcgcctaggcgctaatcagatgggatccacgacaatttttttcaaatcgagaagattaatcgttgatccgatttttatccgtatagacccgcctaaatccgtctagagggcgcctatcccaaattttttttttctaaaaagaaaatttaaaatttaaaatatccaacttatgttcgtaatttgtatgaaaaatcatatatttgaacctacaatcttattttcatatgtttaatataattttaaaaacaatattatataaatttcttaattataatgaattaatatgttttaaaaatattaaacaaccctaaaactaatccctgattaatttttgtataatctctgatttttttgttaggcgctaggtccactcttactgcccgactagcgcctaacgattttttgaacaaaagtttgaccagataatataaaatgatgaaatctagcttgacgagataataataaacttttcgcatggatctgcatttttttgagtaaaatagaaaagtggaaaaatgaaaaaataaaataataatatattaactgtttttattatataaattttacttttacgcaaaattatatattaaacgtcacataattaaaatcccttaaatctttatcctactgtatgttctgaatcgggcttttgtattttgattcgtgaaaagtctttcacttcaccggaccgaagatgattcgtgaaaagtccacatttcacatttctcaattcacacttgtgctttcgaaatgggcttttaactttggtcctaaagactttctctcatctatatgtctctgaattctaggacacagtcaacaagtcaacgtcggtaagagatcccacaacaacatctacacagacacgtgtacactatctctcactttttcaccgacacgtgtcggttctttcacctacaagtaaaactctctccattatcttcaataatgtcaaaaatgtcacacacacacttagtcatagtaatacccaatttccacggcacctatttgccatcgaacaaacaataaaaaactttattagttttcacaattaatacttttaactctttcccgagagtcgtaagaagagaaaaaacaaaacttttttctttttcgttgaagaatttttacataaaagttttgtagattctctgatcagaattgtgtaaaaggtattctctttttttttacttgttgaagaattaaagtaagtaaataattgatttcttattggagggacccttttgttgtcatagaatttactctgctgcgtttttttttactgttgttgctttgttcttgttgtttggttgtatattgttgatgctctctctctctcgttaggtgaagtagatctctcttttctctttctctttctcctctctctctctttccttactcagcttttgtggtgaatattgaagaaagtttctctggtgaataagagtttgttcttatttttatgaatttgttctgttttcttgttgatagtttttgggtttgataaagttgtttcctttttacttcttttagtatctatctttccaattctagtaacttcactggttcttgagctctttcaactttttgtttcagatctctctgtgtttttttctgatctttctccagtggtagcttctgagttagtgattgtactttacttccatacttcttgttcttgctcatagattttagctgtggttttgtggagttttagctctcagtgattgttttagttttagttccttaaacatgttttgttcatatgggtttgttagatctttgagttttcttcatttctttattatctctcttggatcttgatacaaaagtatgaatctttagattgcttcaagaaaaaaagttttaaagactttaagagattcttagatacatagaatttgaagatcttgtattggtttttgtgaaacagatatttgttagatggaagaagattgcgagtttcgacattgggatgagttgattccagatgctcttggtttaatctttagccacttacctcttcaagaagtactaacagtggtgcctagagtttgcaaagcatggaacagagctgttactggaccttattgttggcaagagattgacattgagctgtggagtaaccgttttcaccagtctgatcatcttgaccggatgcttgagatgttgatccctagaagcgctggctctttgcgaaaactctccgttactggccttcgaaatgactctatcttctccttcattgcacaacagtaagttgctatagtttaatgtattatgatcatatttagaataagcttttaagtggttataggcatagaatgtattaggggatgtgattgaagcaacatgatttcttagttcattgcttttgtatctaatattttacatgttttcttgttttgtttggtaagtgctggttcacttaagaccttgaaggtgccaagaagtggtctgactaattcgggtgtggtaaacgtagctgaaaagctctcgtctctcactttcttggatttgagctactgctgcaaaataggcccagaggcgatacaagccataggaaaacactgtaaatcactgagagagttttgcagaaacatgcatccattggatgtagcaagtgttgtctctcacgacgatgaagcttatgctatcgccaatacaatgccgaagctgaagcggttagagatagcttaccaccgagtcagcacagaaggagtactcaagatcttatcgtgctgtgtttttcttgagttcttggaacttagaggctgttgggacgtgcaacttgataacaagtttttcaaagagaagtttccggatatgaaagtgttaggtccacgcgtgatcggattctatgatatgataaatgattgggaggattgctgctcagattacttctcagatgggtctgattacttggcttgggagttttttgaagatggtgtaatgggagagttctatgaggatgagtttgagcatggttgggacgataatttttatgcggaaaacgcagttttagacatggaaccgcatatttggccaccatctccatgaaccaggccttgttatgttcgaagtctctacctaaaagttgcaactaggaatggttttagcctctcttaagtgtcttaatctatgtatggtgcttgaacttgtgtggcttctttgtgttattctaatctaaaaggctttaatctctctttacttagtgatgtttagattcatatatatgtgtgtgtgtatagaattggagatgtcaagttgatgtataagaaacaaaagaagtgaagaagtaagtaaaaaggacaaggctattgaggaagaattcaaatgagatggggtcacttcacaacaaaagcttttacttatctgccattttgtgtagtgttgtgtcttttctttcattaaatagaaatgatgtattggtctgttttactttgaagtctttgtcatacttatttacttgtatatgatcaaagttaactgtagtaatttacatttagcctagtttgctagcttttgaggcctttggttctcaagtataaattttggttctggtttgtctttggatacctcaaagactgtcaagctctcatgcacctctctagagattcccataggtttttgacgacttttgcaacctcttccttctctttaaaacaaactcttacttagttgagagatgatgtacattgtttttttttagcgtatcttagaatcattttcatgttgtttttcttacatttgcatcaagttttagagtccgtttaggatctttagtcttgttttttctcttcctaggcatctttggcgaaaatcataggaattggaggcaaaacatggattaagaagcttgaagccaaggaattttggagaagagtgatcaatgaaatcaagattgagtctagcaaaagttaggcggaagcaaataatttttcctataatattcaccaaaaaaataaaaaaattcctatgatgtttttctttctaaaaatgcaatacttcatcaattgatcaagagaaattaattatcattatctaaaccaaatactacatattcgcatgtaggcaagaagaagtggagtcactgctttcttgggtctatcattttcttaaggttttgccttgttacctcggttcttagtttgtgtcatcgtcctctttcgagcttggtttgatattttctgcattgtaatccgagtttagttcgtctcctttatctaaggcctagatttcggggaactccttttttccgccggcttatgttttcggagacttatagtatgtccgccggcatatgtttctcttttttggacacttgtattttaccttggttgacaataaaattctataataaaattttcagatgacaaaaaaaataccaaatactacatagaatacattatgcaaggccaccaagtgatgaagaatggtcaaaacagattggagacctcctttaaagttccatcaacaattttgttaggacttttttttacaccaaatcgattctcgcagctttgactttgatcattgttctcaaagtggtaactgtcaatttatgatatatccaagcccatcaacaaagagagattgcttctaacaacatcccgttttcccaaagccttgtgataatatatatgtcacttaattgccctctccttggctctctccctgttgtagctagtggacatagttgtagcatcgtttgttattattctgaaaacaggtaaatcacactcaatttatattgtagttaatcaagctcaacaacactgatgagcagcatctacgcactcgatttaacatcaattaaaatatgagatcatcgattctaaagtattagagtatttgaaatagagaaatgatctctaatagcacataatcaagtttcacaaaaagcaccataaactctttagataaattctcacaaatagcacaattttaagttttttggacaaaaatagcattaaaattttttttgacataaatcgcattcaaataattattttatatttaattattaaaatttaaaattcaaaaaattcaaaaatacacaaattctttaccaaaaattcccgccaaaaaattcctgacaatattttcccgccaaaaaaatttccgtcaaaatttttccgccaaaaaaatagaaattcatgacggattttacaaaatttaggaaggattctaagcaattcaagaaagattttacgaaatatagaatatattttttttgtatcccttcctgaatttcataaaatccttcctgagttttgtaaaatatttcctaaattttgtggaattcttcaaataatcattttctgaaatttaggaaggattctacgaaattcaggaagggtttcacgaaatttttatttgtgaaagctttcctgaattacgtgaaatcattcccgaataccgtagttaccttcttgaaattttttttgcggggaaacttttacgaagattgttttggcgggaaaatttgataggaaagtttttggcgagaaacttttttacgaaatgtttttttgtgggaaaccatttgacggaaaatatttacttttatttatttattttagttaactaatcgtttatatttaatatttaattaaagttttgagtgctatttgttgattttttcaaaagagatgttatttttggaagaaaaaactttttagtgctatttttgtaatcctcctaaattttaatcaaaccttaaatataaattaataattaagaaaatacaaatacgaatacacaaatttatcgccaaacaaagattattaagtttttcatatgtatttatactataaattgttttgtaaagcctttaatttgtggactatactataaatttttcagtagggcctttaatttgtgggcttttttttacatacaattatataaactaaaacctaaatgctagagttaaaaaaaagggcgatttgtgagtcaacttaatttttgtacaagtaaaaatcatagtttttgaggttaattgttagttttgcttatgaatttattgttattcttcctttctatcgtggcaaaatttgtaagaaaaaaaagatgcaaatcttgtgataatgtgattagttaaactccaattttagaatggatcgatcactagctttgttaaaatatgagacacaaactttcatcaaatttaacgtatttgaccttgatttgtgttaaatatttgtcgcaatataaagttgtaaacgttatataaggaaatgttcaatctctcttctttttttttgaattctttttaactgaatttgtagatgttatataaaaatatgacatatgacaatgttttataaacatgagtatatttgtcacaatgtttaacataataattttgaaaagagagaacaaactgcaacaatgttgttatataatacaattttccattaatattgaaaatatgagatttctatgggatattgcacaaaagctaaattacaattcataagattaataaaaatctttaagtacaatgtatcacaccaattctgctagttttagaaaaatataatatcttttttttgcctttttcataatgagtcaaatttatgtttatggaggatagaatctcaatgttaaaaaagagtaacaattcataaaattaattaaaatatttatgtgtaatgtatcacactatttttgccagctccaaaatgttacttttagaaaataaatgagaataggatatttgttttttgtctttttcataatgagttaactttatgtttacggaggatagaatctcaatattaaaaaggggtaacaatttatacgattaattaaaattttatgtacaatgtatcacaccatatctgctagctctaaaatgtaataaataagaatataatatatattttttgtctttttcataatgggtcaactttatgtttatgaaggatagaatctcaatgttaaaaaggggtaacattcattagattaattaaaatctttatgtatatacaatgtatcacactattttcgccagctctaaaatgacagttttcgaaaataaatgagtcaactttatgtttatggaagataaaatcttaatttaaaaaaaggtaagaaaatcttctatataaattggtcaaacttcctttcagtcttcaattcaaatcattgttttttattactaaaaggaaatataggatttaggatagtcccccaaaatgctaagtttcaactaatataaaaagaataaatctaaattacagctcatctctttaaatgaaattgtaatggacagtgtatcacaagatttttgccagtcctgaacgttctaaatctttaggcgtttatttgttctatttataaatatcaaatcgtagctttataatccattcatagtcctttgctcttgttttactactctcactaatttttttataaaaacaattcttagctactagctagctccatttataatcccttcactcaactttcttgtttcactattctcactaaacgtaagttttcttgcatcatttttctaaattttattgtcgatatcaaactagattcgaaggatttcaattgaaagtcttatgatatttaattgttacgtcgatataatctatgtgatgtagaaacactcatttttaggggtctaattacatctattcaagcaaatcttttatttaaagtgtgcatgctaatgatttggataattttgtttcaaattagggttttctcggaaatggagacaaaagttgggaagcaaaagaagagaagtgttgactcaaatgatgatgtctctaaggaaaggagaccaaagcgagcagcagcttgcagaaacttcaaggagaaacctcttcgtatctctgacaaatctgaaaccgttgaagctaagaaagagcagaacgtggtggaagagatcgtggcgatacagttaacttcttctttggagagcaatgatgatcctcgtccaaaccggaggctgactgattttgttttacataattcagatggagttccacagcctgtggagatgttggaacttggtgacatttttcttgaaggtgttgtcttacctttaggtgatgacaaaaacgaagaaaagggtgtgaggtttcaatcttttggtcgtgtcgagaactggaatatatctggttatgaagatggttccccggggatatggatatcaacagcgttagcggattacgattgccgtaaaccagcttctaaatacaagaaaatatatgattatttctttgagaaagcttgtgcttgtgtggaggtgtttaagagcttgtccaagaatccggatacaagtcttgatgagcttcttgcggcggttgcgaggtcgatgagcggaagcaagatattttctagcggtggagccatccaagagtttgttatatcccaaggagaattcatatataaccaactcgctggtctggatgagacagccaagaatcatgaaacatgctttgttgaaaattctgttcttgtttctctaagagatcatgaaagtagtaaaatccacaaggctttgtctaatgtggctctgaggattgatgagagccagctcgtgaaatctgatcatttagtggatggtgctgaggccgaggatgtaagatatgctaagttaatccaagaagaagagtatcggatatctatggagcggtcgagaaataagagaagttcaacaacttctgcttcgaataagttttacattaagatcaatgaacacgagattgccaatgattatccactcccgtcttactacaagaacaccaaagaagaaacagatgagcttttactctttgaacctggctatgaggtagatacaagggacctaccttgtagaacacttcacaattgggctctttacaactctgattcacggatgatatcattagaggttcttcccatgaggccgtgtgctgaaatcgatgtcaccgtatttgggtcaggtgtggtggctgaagatgatggaagtgggttttgtctcgatgattcagagagctctacctctacgcagtcaaatgttcatgatgggatgaacatattccttagtcaaataaaggaatggatgattgagtttggagcagaaatgatctttgtcacattacgaactgacatggcctggtaagcttactatattcactgcatgtttctaccttatttattacttctgttgcttgcgaatcaggctagtgcctacgtggagattgaccaactttgctaaattttatatcgaaagaaattggttttactaactttgaaaaattggttagtgattttgcaaacataatgcaaaataaataaattgattatttttttagtaaagggtttaatattattttttttactctagttatttttttactttttgtgacaatgttttattttataattgcctctatgtaggtatcgacttgggaaaccgtcaaagcaatatgctccatggtttgaaactgttatgaaaacagtaagggttgcgataagcattttcaatatgctcatgagagaaagtagggttgctaagctttcatatgcaaatgtcataaaaagactttgtgggttagaggagaacgataaagcttacatttcttctaagctcttggatgttgagagatatgttgtcgtccatggacaaattatcttgcagcttttcgaagagtatcctgacaaggatatcaaaaggtgtccatttgttactggtcttgcaagtaaaatgcaggatatacaccacacaaaatggatcatcaagaggaagaagaaaattctgcaaaagggaaagaatctgaatccgagggcgggcttggcacatgtggtaaccagaatgaaacctatgcaagcaacaacaactcgcctcgttaatagaatttggggagagttttactccatttactctcctgaggttccatcggaggcgattcatgaagtggaagaagaggagattgaagaggatgaagaggaggacgagaatgaggaagatgatatagaggaggaagctgttgaggttcaaaagtctcatactcctaagaaaagtagaggtaattctgaagatatggagataaaatggaatggtgagattcttggagaaacttctgatggtgagcctctctatggaagagcccttgttggaggggaaacagtggcggtaggtagtgctgtcatattagaagttgatgatccagatgaaactccggcgatctattttgtggagttcatgttcgagagttcagatcagtgcaagatgctacatgggaaactcttacaaagaggatctgagactgttataggaacggctgctaacgagagggaactgttcttgactaatgaatgtcttactgtccatcttaaggacataaaaggaacagtaagtctcgatattcgatcaaggccgtgggggcatcagtataggaaagagaacctcgttgtggataagcttgaccgggcaagagcagaagaaagaaaagctaatggtttgccaacagaatactactgcaaaagcttgtactcacctgagagaggtggattctttagtcttccaaggaatgatattggtcttggttctggattctgtagttcgtgtaagataaaagaggaagaagaggaaaggtccaaaactaaactcaacatctcaaagacaggggttttctccaatgggatagagtattataatggagattttgtctatgtactccccaactacataactaaagatggattgaagaagggtactagtagaagaacaactcttaagtgtggtcggaacgttgggttaaaagcttttgttgtttgccaattgctggatgttattgttctagaagaatctagaaaagctagtaatgcttcatttcaggttaaactgacaaggttttataggcccgaggacatttctgaagaaaaggcttatgcttcagacatccaagaggtaacaactgtttttactatattcttacgtaacatttctggtaatgtttaaaaccttatcttatactcctttttttctttttctttttgcaaatttttagttgtattatagccatgacacatatattcttcctcctgaggctctacaaggaaaatgtgaagtaaggaagaaaaatgatatgcccctatgtcgtgagtatccaatattagatcatatcttcttctgtgaagttttctatgattcctctactggttatctcaagcaggtaaatattttaattatttttgttctacttaatattttctttcttatgactattttttgtttcttaatgaagttgaactgtttcttgaaatgtcttgtaacagtttccagcgaatatgaagctgaagttctctactattaaagatgaaacacttctaagagaaaagaaggggaagggagtagagactggaactagttctggaattcttatgaagcctgatgaggtacctaaagagatgcgtctagctacactagatatttttgctggatgtggtggtctatctcatggactagaaaaggctggtatgtatttatattctcatgtcatgcatatacttttatcttctaaacacttatgcatgttttgggtataacaaggtgtatctaatacaaagtgggcgatcgagtatgaagagccagctggtcatgcgtttaaacaaaaccatcccgaagcaacggtttttgttgacaactgcaatgtcattcttaggtaaatagccaacaaagaaatttttattactcttccatttagggcatttctcttgttggtttcagttgtttaagggttattaattgtagggctataatggagaaatgtggagatgtcgatgattgtgtctctactgtggaggcagctgaacttgtagctaaacttgatgagaaccaaaagagtaccctgccacttcctggtcaagcggatttcatcagcggagggcctccatgccaagtatatctctaaatgctttttctataacttttgtagaataagtgaaaagcttcttaatgatttggaaatttggcaggggttttctggtatgaacaggttcagtgacggttcgtggagtaaagtacagtgtgaaatgatattagcattcttgtcctttgctgattatttccgaccaaagtattttcttctcgagaacgtaaagaaatttgtgacatacaataaagggagaacatttcaacttactatggcttctcttcttgaaataggttaccaagtaatatttcctttttgtgtcacacttgattaatgctctttagtagaagttagcatatgcaatacatcagcaatggtttttaaaatacaagatttgttgaactatgtaggtaagatttggaatcttggaggcaggtacatatggagtttctcagcctcgtaaaagagttataatttgggcagcttcaccagaagaagttcttccagaatggcctgagccgatgcatgtctttgataatccgggtagtaaaatctccttacctcgaggtttacattatgatactgttcgtaatactaaatttggcgcaccgttccgctcaatcacggtgagagacacaatcggcgatcttccactagtagaaaacggagagtccaagataaacaaagaggtatggtttaataattacaccactagaagaaactatctatacatttacattaaataaactaacatgaactcatgtttgttgtgtctcttgtatgcagtatagaactactccagtctcgtggttccaaaagaagataagaggaaacatgagtgttctcactgatcatatctgcaaagggctgaatgaactaaacctcattcgatgtaagaaaatcccaaagaggcctggtgctgattggcgtgacctgccggacgaaaacgttagtcttactatatatgatacatcctatcgactacaagaattcttactaaatcgatctatatgtcaccttcatgcaatgtttttaatactacaggtgacattatcaaatggactcgtggaaaaactgcgtcctttagctctatcaaagacagctaaaaaccacaacgaatggaagggactctatggtagattggactggcaaggaaacttacccatttccatcaccgatccgcagcccatgggtaaggtgggaatgtgcttccatccagaacaggacagaattatcactgtccgtgaatgcgcccgatctcaggtaagaaaagttcttatgttccttcttcttcaatcctctagcatcagtaatagagtgtagatatttttgttttgttttggaagttaagtaatgttaaggttatggatacaactgttttaagtgaaattgttgtttcataataaaatgtaggggtttccggatagctatgagttttcagggacgacaaaacacaaacataggcagattggaaatgcagtccctccaccattggcattcgctctcggtcggaagctcaaagaagccctatatctcaagagttctcttcaacaccaatcataagaacatccaaatctgcatcatgtcaaataaaaaaaataatttatcatttcattttttttagtataatcttcttcttaaaattcagtcattgggtttcaagaatactggttatataaagttgtgtagaaaagatgtaaagtctaactggttataaaaattcattcagatctatatggacgtcgtaaatcaacatgtattatcaacaattggaaagtggccctctttgctcttccacacatctaagaaaagactcttcttttacaaagactcttcctaactcgacttgctttcgtttagcttgggaattttcttgtactcgtacgtgtttattccaccttctcttgcatagcctacggtaaacaaaacccaggcaagattataatgtttcatcaaagcttttatgcagtctaattgagggtatatcctttgttaccttgagctcatcttcgatggatgtgtttttaggtttataagcatcaacaggtcctgttcttgaaagcgcctttcttgtttctataatctcccattcttagtcatcttttacctttgcaatatccttactgaactaaccaaataaaccatatgtggtgaattctaaacaaaatcattgacatatccccaggcatttatagattcagagcttagtttacaatcaagaaagaactgacctgccttgaaggagttggccaagtccgagggctccaaatactgtgagagatatcatcggaagtccatattgtacaaacggatgtctccttccccaccttttaaacgatgccgaagactgcttaagagtacgcggtagtagcagaactggaaggagaagacttttgagttttcgattgttgtcatctttgtattaaccacaaatcacacaactgcaaggaaaaagcaagagttaaattaaaacctactaccatgttatcatgccatttgtttgcagtatgagaaactgtgttgcagaacaaagattgaggaatccattttctactctctaataacatagtcttctgaaattagtcacaaaacattgttgcaaatatggtaatctgtcaatttcagatcgagtcgatcaatttgaaaatagagcagagtttaaaattctgtttcatgtgactggatttgtttcctcgtatcttctacaaacaacagattcgtatgagtgacctaaataacgtttcctaaaccctagaaattctcaatctaaacccagaagtcaattccattcaaggcacaacgcaccgatttgtagtttcacataaatcaaaactaacctggagctgcgtgatggccggaatctgaagtagcttacgagatcgacgcatgacgaaattagatagagacggagatggagacgccgggaaatagaacgtgtgttatatgaaaaagcatgtttttaagctttgagtatggcactcgtaaatactaattcggcactgcttcggctttcaatgtaccatagaccatctacatttttttggtagaagaggggagactagtctcccattttattgaaaattaaaacaaactacaaaaacgagtatactcgacgagggcgcgcagactcaataacgtcatcactaaacagcgaatcaacaacaagaggaacaaaaacaaaagcataaagcccaatagcaaagagaacgcatagttagctaacccgtcagtaaggcggttagcctctctatacacatgagaaatacggactatccagtccttcgaaaaaaagccgtggcacaaccgtaccaagaaagacaaagggtgtcgctcgctaaccccagtcttgagaaagcccaccaccaatgtcgagtctacttccaactccactctcgtcaccttcttctcccaagcgaagtacatgccgtaatagacaccccataactccgccaccggagccgtacaacgaccaatgttaagagcgaaacccccacaccactctcccgcactgtttcttagcactcctcccgctgtagccagacccggattaccccgtgatgccccaccagtattgagcttcagccacccatcgttaggcacaccccaaccaaccattacttccaccctaccgcctatccccgaacctcctttatgtttactagtagcggtagttacttccttagccgcatccttaataaacctcgttctatcccgacacttaccacgtttgtcaaacacgttatcacagcgccacttccaagcccaccaaatagccatcgtgaaaaccgtagaccatacactctcatatatttcccggtcatcacctaggttatcatgctaccattcgatcaacgactgtgcaaagaaggatctcctccgccgctggggaatgatacgatcccaaagtcctgccattgcgggacaatcccgaaggatgtgaataatcgtctcacttccccccttacagacttggcaaacatctgttatacacagatgccttctaaatcgctcagcatccgtcattagagcttgattcccgactaaccaaagaaacatttttgctctctccgtcgccaccaccccccatatgcgactaaaaagaacaacacaacatatacaacaaaacatagaatatcaacattaaagaatataaaaaatatcaacaaaacatatacaactcgcagtgtattatatatttaaaatcaaataaaataatatcataaatttattaatcatctttacaaaaaaagatttttagtttaactaaaatataaacttacccgcggtataccgcgggttaatatctagtgcaaacatatttagtaggagtatcataaaaaatctcaaacattataaataatacttaaaaattccttatgataccatatgagtatcacccatatacatgctattattgtgggtaaaaatagatagttttgcgcaagacctattaaattatgaatattttgattatttgttccataattattaaaatttgaacatttttgttgttagcgcaagattcaatccttgctttggggaaaaattaaagctatacgtaatttcactgatcgtttttggaaagaaacatggaaattaaaaggtgagctttttttttagttgctgcttctctattgatgagttcctagcgttatgtggaatctagaaactttgtgattttgtttataatctatgcttactcttttctcatgtttacgcttctagatgataaacaacgaacacgttggaataagtcctacaacatcttgtttgggatggagccaggaagttctgagatgaatctatcttatatgcccaactacaaaggactttgttgatttcatgtttgaaaagcaaaagcctatccaattcttcactccaacggttaattttaaccacattcgcggttctactatatatccttaatgaaatgtagattctaggaccttaaaattgtttttcctctgtggcagagaactttttctacatcgatgcccatgaaagtctcttgacttcttgcctcctactattttatgcatcctaaagcgaatctcgataaggttgtaatctctattatatccatcctaaacaccgtttgtgtattctccatgtgtttgattccttttgaatgttttggttcctagctgaaactccaatatgaggggttagagcattagttattcaacctaaaactccattatctctgactcaaagacctatcattgtctttagtgtgactccaaattatgaggctttctctctaccttgcaagatcaaacttgaaagaaatcttgataaaatcctaacttcaggaaaattgtgtatatacatatgtcgtttaatcgatactctacatgtttgcttgtttaacaacgatatgtgtgtacgttttgtgcatactattttcagcaaatagtttttttcatagagaaattaaattttagtaaatacacgaatattataattatgatctcacaaaaaagaaaaaaaaaaccgagatcttcaaataaatataaaacttacttacatagacatgcaaagccttcttgacatgcaaatggatgttgtccatgttcctaatagaggggatgaaaccaatccacaaaatttatttttactaaagtgatgaggacttatagccttagaaatatagtaattatgagtatccaaaacagaacagttggtcttcttaaataaaaaaaataaaaaaaataattagatgtttataataatatcttattataacagttggtcctcttaatttttttttaaaaagagataattaaatgtttataataatatttgtaaattaacgatgtcggctcactagatttacgatgattgacgtatttgtttgtaaattttatgaaattacgttcattaaattaaatatttaaatactaaagattaacagctaaagaaatcttaatgaaatattgccatctttgggttttaaattttctatttttcatatttcatatcggatatccgattaaaaatgaaatcagtaagtataccaaaatacaagcgttatatttattgggcctattcgggccattcaataattaattcacccacgcgcaaatgagttaatccgtaaaataggctttaaagcccattcaataaacccgtttcgcaggaaaaaagcccattaaataagtaatttccagaaatacccttttccaatcattgaaaattcaaacttgacctaaaaagtatctgaaaagccagcgccttttttcgttacgaatccgtgtttttgccagctttcaatccaacggctctcctttcttctcacaatccgtaatcatcgctccccactcattcattataaacaaaaacaaaaatccacggagccgataaaaaaaaaaaaaaactctctcagatctgagaatcatttcttcttcttcttcctcactttgttcatcatcttcttctccgatctaaacaacaatggcgacaccaggagcttcctcagcaagagatgaattcgtatacatggcgaaactcgccgaacaagcagagcgttacgaagaaatggttgaattcatggagaaagtcgcgaaagctgttgacaaagacgaactcaccgtcgaagaacgtaatctcctctccgtcgcttacaaaaacgtcatcggagctcgtcgtgcttcgtggagaatcatttcatcgatcgaacaaaaggaggagtctcgcggtaacgatgaccacgtttcgttgatccgtgactacagaagcaaaatcgaaacggaactttctgatatctgtgacggaatccttaagcttctcgatacgattctcgttcccgctgctgcttctggagattcgaaggtgttttatctgaagatgaaaggtgattatcataggtacttggctgagttcaaatctggtcaagagaggaaagatgctgctgaacatactcttactgcttacaaagctgctcaggtttttgatctctttctccgatctgtgatttgatttttgtgtgatttaggtttttgaaattttggtttgttgtgtaggatattgctaattctgaattggctccaacgcatccgattcgtcttggtcttgcgttgaacttctctgtgttttactatgagattctcaattctccagatcgtgcttgtaatctcgctaagcaggtttggatctcatctgagggatgttttatatgattatgtattgttggtttatgtgtgtgtttgatgagtttttgtttatggatttatttaggcgtttgatgaagcaattgctgaattggatactcttggtgaagagtcatacaaggacagtactttgattatgcagcttcttcgtgataacctcactctctggacttctgatatgcaggtattatatattggctcctgtatgattgattttgttgcttgaattgtgaaacaatgagcctaattaagtcattgacaaaagttagatttggatatcaagtttatttgatgcattcttctggtctaattctgattttggtgattgtcaactgtgttagtaatcttgctaggtattatattttggccttataagcttgtttttgttgcttgatgaacgaataacgtttttgtttcttgatctctgaaacttttagcctataattaaaccattaagaaagacttgatttgtaataaaacagtttagtttacatttggatgcattctgctggctctgattctgattttagtgattgtcaaatgtatttaagcctgttttgttgcttgatttctgaaaccatgagccttgttaagccattgcggaagtctagatatggaaaacaaacagtttagtttacattttgatgcattctcttggtcatattctgattttagtgattgtcaaatgtgtttaatcctgttttgttgcttaatttatgaaatcataagccttgttaagccattgaggaagacacgaattgaatatcaagtggtttagtttacattttgatgcattcctccttatgccttgcttaagcctgtttgtgatttctgaaaccatgagcaagatatatgccattgagggagactagatttggaaatcaagttgttgcttagtttacattttgatacattcctcaatccttctttcttgtggtctgattctgattatgatgatcttgtcaaatgtttttttcaatcaggacgatgttgctgatgacatcaaagaagcagcaccagcagcagcaaaacccgctgacgagcaacaatcctaagtcgtcttaccgcaactttgttgtcatttcagtatctaaaacctctccattaatatgtttttctcttggaggtgtttctctgttggtttcttatttccttttatccccaagctctctaaggcagtctaattcttgtccttttttgctgcttttctcaaccgtggatacgaaaactcgattcctattatttttcgtttatctgtttccattttatcgtgatttgactcctatcttctgtgtctttgtttgtaatggattcaacttctctttttgtttcaatgtcaagaaaaatctttggtttatttcgaagtttcctctcatgttatacatatagtgtacatagcttatagcttgagtttgctcagattgatccgttcgacgggatatgtatatgcctcgaagttgatttgctgtcctaagcaacttagctttgtgaatgcagttatgagatcaacctacaaacatattcataaaccaaaacatgagcttgagtttgaggtagatgaatatatgattaaggcaaatcgagtgaaaacgaacctcgtaatcagtctgagatacggtttcacggcttctttgatacttctgaacccatggagcaacttgagggtcagtagctaagagctgttctgttgcagcttgatcaggacccaagaatgcagacattacagctagctacaaattcctcatacaggttagttacttcgagtgatcctagtagataattctctgtttaaaccgaaaatcatgtacctgacgaggacccaatccaacagcaatgaacttatctttcatctcttgcacagttgctttcccccattgtgggactctgccttctggatcagcctctgttgcatcactccttccaaaatttctatcaaacaatccccactaacagattcacaacggttcagtatcgatttgaacaaaacgccgcgactcaaaagcgaatacgatagcattgtttacctgaccagctgaaccatatgctgtgtaaagtaagttccccttctcttcatttccaccacattttcggatagccgatgctaaatatgtaaacttgaccgctgattgtcctacagaaaccaacccaagaaagatttcagttatccacaaatacaataatgctactcttcatgaacaagttttggtatatactataacattacctgctaattgaatgatatctgcatatgaaataggacctcccttcgagatagagtcaatctccttcttcacttcctctatcaaactcaacccatcagaaagtccctcattctctgctctacttagctcagagcttcacaaaaagaaaagaatgcattagacatcatctaaagattactcttataatgttcttacatcatataactacctgaaccgtatggatccattggctcccccggatttagtagcctagacaaaaagctagtatcattaaagggtcaccagagagatggacaagagcattatatgaagcctgaccttatcataagtcatagcatcattgagagctagtttgagtaaggaaggtacaagctccggtttagccttaatggtggttgaaagcaaaatcttgatctttgctgcataatataaaagtgaaacctttagtgccaataacaacctaatggtaccacactagtgttcttgtttcagatactcacattgaaactcggatcgttgtctacgttgattcaagtcagcagcttttgcatcacccacattgttaatgaaaccgttgcctattaattcctaacaagagagatcatcactgccaagaactcatcaaatgtgacatagagaggacaacttcaagaagatgtagccacagactatacattacaatatctcatttgtaccaatgtgtatgtaatttttgatcgagtcaagtgttaaggtaccattccgactgcagtgccggcgagtttgagaacatcacggcggtggaaagctaaactttcaccggaaacttgaggttcaatcttggaacatcgtataacagcctgatcagaagaagaattgttagcagaagaaatgtaaaatgggttagaagtaaagaatgtaacaatggttgaaactcacagagcgatgagaagaagaagagagtgtagtgagatgttgatgattggttgtgttggtgaaggaaggaacagtggagaggaaggacactcctcccatttctggtttgtgatgagacagagaagagagaagaaaggagaaagagttgtctgaagaaaatggagagtgtgttttggttttgtgaaggatacacttttgtggattctctgttatccaaatctcccaatcatatgggtccatttggtttcatcatataactccttttttttttttcaataagagttttttaaaaggtcaaagattttttttgtggttaaaaatcccaaaaaaaactcatactaatttttatttgcaagtttaatacccaatatttttgaattggtataaaaataaattatctaattatttactgtcataaaatacctcatatattaattattgttagaattaacctacggcttaacggacgttaacggaactatttaacggggttaaatttgaatctcatactttttaatctatatatacaattcggtgttactaacttatcgaatgccactaatcccagtaaaacacccaatccaacttcagagattctcattttttcccttgtccttctcactctcagctcctccctagagctatgacggcaggcggcatagacgatgattcttggtggctagacaaagctgggaactaacgcgatcacattataaggcacatgttacttgcggggagtatcatctacgtcggctagaattagagaaacgggagaaaaaaaacatgaattttgtgcgggtttcattctaccaataataaatatatgaggtattttatgaccataaatattagatgaagtatttttgattccaatccaaaaatattgggtattaaacttgcaaataaaaattagtatgagtattttttggggtttttgaggatttttattcattgtcccgctttaatttaccgttttacctgttggttacaatagaaacggtacacacattcagtagcagttaccaaacagggaattgagaagtggagaaatattgaaatctaagattcattggattcaattcaaagtttttattttattaactcaatctcgaaataacttgctaggagttgttgagtaacaaaagatatctaaggatgatagaataacacagtccttaactttaagctaatgaagacttcaaagttaaaaacatgtttcttctaacttcgtcacttggaagcttcagttgactcgtttgttttgttgacgtctaaagggcactgagatacatatggtttcagctataaaatacaaatgttccatcagcaaagctagatcacacaacaaagcttgcgttatacattaagctagcattctatttcaggttcctaacacaaaacttaagaccggaaaaaaaatcgtcaggatcacacatgcttaaggagctttgaatagtaagacatgtaaacggtttaaaaagggaatttgttctaatgttcaattaggatgcaagttacatactcggctatctatatagaggaatcaaaggaaaggaacagaagaatttagggtggcatgcaaaacacaacaaggttaatgcaagaagtaagcattccatttcaggttcctaacacaacctaaaacgaataagatcatcaggatcacaaacctaaggagcttcaaaccattacaagtttacgacttgtaaaaagatatccgaaggaattcactattgttttgttctcatgttcaatatcgaggaatcaaagaaaagtaacagaagagtttagggtagaataaaaaccttaaagccagtcaaatcagggactacgtagtttggcaatttatctggctgcacaacatatcctcatgcaaaccattgtcacaaatttagagaaaaagtaaaagaaagaacggaaaaatgcaaatactttatgatatacatctacaacaatgctatgatgaccaatttgccaaaattcagttcaaattcttagctttcctcttaaagaatcaggtctcttaaagtcatgtaaattgcttccttattacatatatctaacttccaaacaatttggcattatctagttactaattccatcactaagaacaacattcaatcatcaaccactaaacaagagttcataaaaacagcttaaatctcaactgcagcatgagaaaggcaacaaatttttccaatgaaatgcgtcaagcatttcacgtttttacgatcacttagccaaatttggagttcaagttcttagctttccacctaaaatatcaaactttgaaaatagctctccttagattgcctatatttaaaactcaaacaactttgcatcatcatcatcatcatcatcaaaaaaaacttttcatcatcaattactaaacaaactatatggaaacaacttaatctcaatagcagcataaaaagggtaacaagttgttccaaattcaagtcaaacgaatgaaatgcgtaaagtattacgcatcattaggttcaatttgctaaatgtgagttcaagttcttagctttctctacttcttagatttcatatatcaaaattcaaacaacattgcgtcatcatcatcaacaaacaacttttaatcatcaattactaaacaagtatacataggaaacaacttaaatgaccaaaatagagttcaagtccttagctttttctacttgttagattccacatatcaaaattcaaacaacattgcatcaagaaacaactttttttcaatcattgattactaaataagtgttgatgaaaacagattggattgaaaaatgaaacctttacgagtgtggaaaccaggaggtttacagttttttcccttgtaaaagtctctgggagctcgtttgggagagagaatatcaagcgaagaagctctctttcttcggaatgttcttccaatcccgaataacaaccctaatgtcatcttccaaaatctatcaaatctggtaaacaaaatatgttgtagaatcgataaaaatggaaactttcgaatgtatcaaatgttgaagaagaaatgtcagagatttgtagaagaaaggtcagagaaagggtttaggggttcttttaggtgaaaaggcccaaaactaaataaagcccattttcatacattcacttatttgtttataattctccaaattacctttaaggggatgtattcaaattagaatttaaagtgatttgagttttcttgagttttaaatgatttaattgatcttagggaagtttatatgatttttgtaaaatccattcaaatctcactttaaaccatgggatttggatttctgtatttttaactaaagaaatcctctcaaattctccaaaataattaaaattcaaatccacaaattgttttcaataacagtaaattttcaggtggattttgaaatcattagttcaataacactgaatttcatgagttttttaaaattcatgtttgaataacatatgatttataaattctacaaaagtctcttaaaatttcacttgcaatacacctcagattttacgatcacttgtgatttcagatatgctttagaaatgtgaattctagtatgcttagacttgctcaaatatgcttagatctgcttaggttttacttgttgtgaacttgtaaattatactttagtttcatcggaattgttgtgtactcgtaaatttaattttaaattatgttttaaaaatgtgaactctaatattttctcatgttgattttatatatgcttagatctgcttagactcgagtagtatataccaaattgtgatttgcttagacttgcttaatttataaattgtgatttcactcctacaatattttttttttgtcggtacaaagaaggtagttgaacaaacttgttctcaaaacaaaagtagtttccagaaaggctagtatagtttcagaaagacttatgctcaaaacataagtcaagtactattacaaacgtctagtttccgatacgaactaactctgtgagaatctctgcagttgatggcataagaagagggtctacagaggtcatcaaaattcctttgacagcgtacaccttttgatccattttgaacacacattggaccactttgccataccctccacgacctaggctaccttcctctataaaatcgtcatgataccttgaaggcggtggacgaatagactttgttgaagcgagtccaaccatccaagataaaagggattaggctttgccgactcgaacctgaacacaaaaatactcgaatattttaatcgaaaatctaaattttacccgaaccccaaaattttacgcgaaaattcgggtatcgcttctaaaatagggcctaaaaatctatatccgaaccgacctaaacctgattagacccgaaccgaaatcgaaccgatattttaaatttatccttttagatcctaaacttttttacccaaaggacctgtacccgatcgagttttatctgaacccgacccgcttactcgaatgtccacctctacgagtgagacatgaaaccctctcttccactccgagtctttcctctcaattgaatccgagataaaccggtttaatctccaaaccaatcccatattcttgtaccaaatgttggtttgcttcttcgtacaagaagatattttccgggaaaatgacaaacagagaaaatctccagaaaacaatgaaagctatacacaaaaactcgcgcttccgttcacgtggcaatcacttccaatgaacgattctccttcgtttctcccaaagtcccatcacaatcaaaaaccttctctccgagaatctcactcactacaaagagtaagattcgattcaaaaacaaactccgatcgttgaagcaacgaagatatgcttacttcaccttcttcttcttctacatatgatccattctcttccaatttctctccgtcgctcactaatgccttctctagtagcttcaccattcccatggggttagtcaatttcactctatcttcctcttcgaaatttgagttctgattctgaatttgtttggtattcgtagattgaaattgagtaggagagtcaccagagctcggatcttctctcgtaaggcacgtcttcttcgtaatccctaatctcgttcatgttcttaagtttacattccaaaaaccgaattagacgatcttcattgtttcatcgtaggtagattaaggatcgttcaacacttaaggtcacttgtcgtcgcgcacacgaacgtgtggttgaggtaaatctcttggtttagttttttgctctttagcggattttgaattgtgtgataagtgcttcttctgtgtaattttctaggaagaagcatctacaatgacggagacgaaattgtttaaagtttcttctggtgaggtatctcctcttggtgtgtcacaagtcgataagggaatcaattttgctttgttttctcagaatgctacttctgtcacactctgcttatcactatcccagaggtatataacaagtaggtttgaagtttgtttttgttttgcttgcttaatctgtgatgctaatgttctttggtgatatgttgttctagtggtaaggatgatacggatgatgatggtatgatagagttggttttggatcccagtgtaaacaagactggagatacttggcacatttgtgttgaggtagtctcatacactgaggaacttctttagacagatttatctttttgagttctcatttgctgtgaaattttcttacattttgataggatttgcctctcaataatgttctctatggttaccgtgttgatggtcctggagaatggcaacaagggcatcggtttgatcgtagtattttgcttttggatccctatgctaagctagttaaaggtcatagttcttttggagatagtagtcagaagtttgctcaattttatggaacttatgactttgagagctcgccatttgactggggagatgactacaagtttcctaacatacctgaggtaaaaattgcatttgtttccttcagctagttgttgcacgattccgactttgaatatggaatttgtattcctgcagcatttatggtttctcccttattttgtttcagttttgtaatcagctgctactgttttgcagaaggatcttgttatttatgaaatgaatgttcgtgcttttactgctgatgaatccagtgggatggacccagctataggaggcagttacctcggtttcattgagaaggtgattgtattctacttaaaacatatgtgttgagatgctgaaattactgcacattcatgcttactgcacaagggttgttagcaggagtcatttaccaaaaacgttaaaagtgtgaaaaagcttattatgatagatattgaggatacatctgcctgtatatgtacaaagcttcttttatagctcactctcttttttttttcttaagatcccacaccttcaagatctgggtataaatgcagtggaattattgccagtgtttgagtttgatgaactggagcttcagaggcgttctaaccctagggatcacatggtaatcacgaatcagcaatttacatttctgtgtgcttataatatttcttgcaggtcttatcgcaatggtagctataaaattcttcccttttcaatttaacttgagtctccatgaatggaagtttcagtgcttcccatacctgaaagagatttttctttttactaggttaacacatggggttactcgacagttaacttttttgctccgatgagccgatatgctagtggtgagggagaccctattaaagcttcgaaagagtttaaagaaatggtcaaagccttgcattctgctggtatagaggtagcaattcccttgtattgctccgttttcttggggtcgatgcagtttgttccttgttgaactttttattgtaattgattattcttcagaagtattcttacaagttttctctgcaggtcattttggacgtagtttataatcacaccaacgaagcagatgacaaatacccttataccacttcatttcgtggcatagacaacaaggtgagtcataagaggattaacattcatgtcggtttatttattttcttatcttaaaactctaaacagtgagatctattatgcaggtttattacatgcttgatccaaacaaccaactgcttaacttttctggctgtggtaatttaaagtttatattgcagactttacttttcaaaaattccgtacttgaaatgaaagtttggtttacagtttgctgtagtatgtgtgctcaacgtttcttttgctttctgtctccagggaatacactgaactgtaaccatccagttgttatggaactcatacttgatagcttaaggcactggtatggacaaaatctatgttagcagccactgtaactaattggaccaaatatcttgcagtttatcctggacatgacactgatatgaaagaattgcttgttgatttttctatcttcttgacagtcattgtggttacttcacatagttaatcattctggttctgctttcttctctttacttaaccgcagggtcactgaatatcacgtggatggtttccggtttgatcttgctagtgtgctttgccgagcaacagatggatctccactcagtgctcccccactgataagggtaggttttaatgcattgtgcttgcatattcagaaaataaaatagaaaatcttgtgccataatgttcattttgtaatttcttattgaatcaggcaattgccaaggattctgttctgtcaagatgtaaaataattgcagagccttgggattgtggaggattatatctagtcgggaagtttccaaattgggataggtaaccgttttagcttcataactagcttaagttgatgactcccaatagtactatacattgtagttccttccaaagttctgtggttattaactttgtgtaactggtatggctactggtggatttttcccaagtcaggtgggctgagtggaatgggatgtaccgggatgatgttagaagatttatcaaggtattcaacattggagtctttttcacctgatctttggaaaggcatgacttattgcagatgcactctaatcttccacattgttagggtgacagtggcatgaaaggaagctttgctactcgggtttctggatcttccgatctttaccaggttattatattttgtattcattctgaactttattcagtgaacacttagatgcattaactgcagtagaatccaagtaggtttaatgatatcatcgcactttccctcttctcttatataggttaaccagaggaagccttaccatggtgtaaattttgtgatcgcacatgatggattcacattgcgagatcttgtatcgtacaactttaaggtactttttgatttccaatgtattgattttaaaacatgaatgagtcagcgctttatgtatctcttctgtatgatagcacaatgaggccaatggagaaggaggaaatgatggatgtaatgacaatcatagctggaactgtggttttgaaggtacaattaaaagagtctcgcttcacaatattcaagcattgatcgtttctctgtataatattcttattacagcattcaagtttaataatctgtttattgacaggggaaactggtgatgctcacatcaaatctttacgtactcggcaaatgaagaactttcatttagctttgatgatttctcaggtgcgtatttgccaacatacactcgtttaaatactgtctaaaattctaaatgcatatgaaaccgatggtgatcaatgatcagggaacaccaatgatgctaatgggagacgaatatggacatacacggtatggtaacaacaatagctacggacatgatacctcccttaacaatttccagtggaaagaggcaagtcttacgcctcgcgttttgtcttccctgtttactacggattcctccatgaactgaaatcattttttcttattaaatccagctcgacgcaaagaagcagaaccatttcaggtttttctcggaggtgatcaagttccgacattcacaccatgtactcaagcatgaaaatttcctcacccaagtaactaacttcctcttggtttcatctattccttggatttttgagtgctactctaattttcaatgattgtctaaagggtgagattacatggcatgaagataattgggacaacagtgagagcaagttcctagctttcacgtaagacacaaaagtcccaaagtttcttacctaactgtgttatagtactctacagagttatcagatttcagattaataagtgactcttcttgcagtctccatgacggtataggtggccgtgacatctatgtggcattcaacgcccacgactactttgtcaaggctctgattccacagccaccaccgggaaaacaatggttccgtgtggtcagtctttctttcttttgtcttctttggttctctaattctatgactgattcaatgtcatgtttccgcaggctgacacaaacctcgagtcgccggatgattttgtgagggaaggtgtggccggtgtggctgatacctacaatgtggccccattctcttcaatccttctccagtccaagtaagataagcactcacacgataacgcacggtagaggaaaaataaggtttatgagttatgagtaaaaaagatccatgactccatgagtctcttgtaaaagttgattacatgtaaaataataaaatgtacgacatttccaatcacaaataaagatatatttagagcaatggtacatttttttctaatcatggaaatacgaaatatatgtagtgatattattaacttaattttagttaaatgtattatctatataatgtaaaagtggataatctggcgcgaagagtttttacccatccacatcctatcaactatgtcaacaatgtccttcaacattggcttatttgagtcaatttagtattttagtataaatgtctgacaaaaataaaaaaaatcatgtaaaatttgataatctaaataaatatcataaatcttaatgattttgggttttacaacccttacttcataatcgagtttaaatagtccatagtatttgatctgcaagatttagtacatttgacattatcgaaaaacacatttcaacagaattttgaatttattcaagcttcaaaccatatcctccacaaaatgtgataaaatttgtcaaaattttttatataggatttgtttttataacaaattgtgaataataataaaagaagtcaccccatttctgtctttcaacttaaggtgactcaccacctacttaccacattgatattgtcatcttcgaagaatccaaactattttttcttctaatccaaaccttttcttattgttagtaaacaattcaagatcgttctaaactcaagagaatccgaggttccaattattgaaacgttacgttaaaacgtaaaataatactccaaaaaaatccatttttaaaacgaataatgaaaagagatgcttcgatcgtagagtcaaaaagttaaataaatataagaatttacaagacgaatggaaaacacaaccgcgtgttagtcactaatcataatgataagtgaaagtttaggtcacattaattaattttaaaatttgattaatctttgaaaccttttaattcacgtggttagggcaggctttggcaacaacgcgtagttggtgttgggtcggtggtcgacgacctagccaaatccatggctcatatttttatctccatttgtttccatagttgttttaatgatacgtgtacgtatcacttatcagatgaaaataattaattacctcgactttcctaatcatatctacgtttccacaataacagtcttcaaacaaatccattagagtatgcaatttaggagtgtcaaaataagtcaacattcatggattactcgaactcgtcaataatgttaattggtttaagtaaaaatattttacccatatatataaaggagttttaatagattaaaactaataggattataagtttaatgggcaaaacttattagagtcatgggttatccataggttttactgtttcaaaattatatttcagtattgattctcgtgttcttaacaaacagcggagtcgactttttcctaagcatgttcaagctttactttgtactagatctcccaaacccatccattaaacactcgaatctatatgaatttaggtcgggttgggtcagattggtttacccattttgacatttttaatatgcatgtaagaaaaggtttggagcaagttgggtggttacggctatcaagtagtttactgaaattccaaattatttactttatcacttacttcagtagattttttcgtttaacaacttaccaatagcagaataattgacatagtattgataattgtaggtgtaagatatagacaaaaatatgttggcaggtttatcaacaacaaaaattcaatttcacattgtaattttttttttaatgcaaaactttttgccaacaaaaattatgcccaaaagaaggaaaaaaattatacatagtgtacatttcttgtcgggaaaaatgtcatttaatctcccaacttttaaaaaatggtcattttatatatcaacttcgtatgtggccgtttaaaacatgaactaaacgttgactaatttttaaaacatgatctttcgttgaccaggccaaaatagacatgccgttatcagtcattaacggaatttctaacgtccgttatcatccgttaactttattagtcaagtttcaaattgtggtcattttaaacatcaactttttatgtggccatttaaaacatgaactaaacgttgactaccatttaagacatgaaaaatttgttgaccaagccaaaatagacatgtctttatcagtagaacctagaaaccgttaatgactgttaatctgtccaaaacaacgtcgtttgagaataatcgaaagaacataaagatttttcccatataaaatctccatatcaaaaagttttaagcagaacccatagtttgatatagagataatcacagtgccagtaattggaagcaaataaaagtgttttcgtttatatatttgttttaaattttaaaaggaatcatggaagcaaattgaagactcattataagattgttcgtcttgtttgagcggttgtagaaatagatttggggaactggagtttcatttagaaaacaatcctgattttcttttggttattctcaaaacaaagtcgttttagggatactaatagagtcgttaacaagtgataatgaatgttataagttcttttaatgaatgatgacaacatgtttattttggcttggtcatcgaatttctcatgttttaaatggtagtcaacgcttagttcatgtttaaaatggccacatataaagtcgatgtttaaaatgaccacaatttaaaacttgactaataaagtcgttaacggatgataacgaacgttaaaagttccgttaatgactgatagcggcatgtctattttggcctggtcaacgaataatcatgttttaaaatttaatcaacgtttagttcatgttttaaacggccgcatacgaagttgatgtataaaatggccatttttaaaaagttgagggattaattgacattttttccatttcttggctccttttctctaacgtacatttatcagttcatcatccaaaaattcaaaattttcgaacacatgtttggatatgaaacaaaattcgatttgtctttatgttgctttcatatagaaaagtgcaaaactttgttagagctcatgtaacttcttaattttaaaaaacaaaacaaatcagatccaaagtgtaataaagagaaactctagggacttctttataaataaaacaaaaaacatttacacgtcttcgtgtaatttcgaagaaacatcgattctcttctcttatataaaccctcttcgtctcctcctcctctctgctcgaaacaagatccttcacttctctcaaactacgaaaactatggcttcaaaatccgtcgtcgttttgctcttcctcgctctcatagcttcatcagccatagctcaagctccaggaccagctccaacaagatctcctcttccatctcctgctcaacctccaagaaccgccgcaccaactccttcaatcacaccaactccaactccaacaccatccgctactcccacggcggctccagtttctcctccggctggttcaccacttccctcctccgcttcaccacccgctcctccaacttctctcactcctgatggtgcacctgtcgctggtccgactggatccactcccgtcgataacaacaacgccgccactctcgctgctggatctttagccggatttgtattcgtcgcttctttgttactgtaatttggttatattttagaatcatctattgagatagtgtttttctatttaaggatttttttgttcgtgttatttttaatctttggttttatgttgtattaagaattgagttagcgtttggacgatagaattaaatcattaatcatatgtgttttttattatagtctttagtaaacactttctggtatatcgttagtttaatcggtaaagattctatacgaagtttaaagatcgtcggtttgtgacgtttactacaaaactaatattatatgtttcggatttgggaggattacatgttttagttcaaaaaattttggtattaaaaagaagaaagaagagaaattcttatcactaatgttttattatggtatttcaaagtccgtatggatttgaattaattgatttagtgaagccttgtggaattcgaaatgggtggggttaagtggttagtgaaatagaaggtgattagtgatgactgatgaggtcagcaaacgtgtgcgtgtgtaaagacacgtgtcgacgtatataagaacggtgaatttgtcgttttattggtagtggcgaaaaaacagctgtttggttttctgtctgattcttcatctcttttttttacacttttatttgagctaaacgatataaatgagattggataacgaagattgaaaagtatgtaatattaacgagactaatggcgtttagaattgaaaaatcgaattaaaaaagtctttggtttggtgagaaaggtaagagtaggttttgtcacgtggagacagctgtaagaatacatataaagcatttttcaggattctttcattggctcagccatgtgggctttcctacgtattatatttatagtaaccattttaggttaaaggtggcgtgacaaaatattatactcaatactataagttacttaaaattatgaaaaagtttaattaaatcaatgcgtttgctataaaagttagacgaagaagatatactatcgtttttttgttaacataaatcgaaaagaactctcaagtctttttaggtttttgcacaaaaggaggataaagagaaaaaaaggtaaaaagaaagttgaagaaattgttcctttttaaagggaaaggctggagagcatttgcattcattagctgtgaattctgattcattttcattccctccttaatattccaactcaacgaaaatgaaaagtagccacaatttgtcctttttcatataccaatgtcatttattctttagccattaataacctttaaaacgtaccacataaaattttatatataaagaaaaagaatggaagacaaagtacaagaagccttttttgaattagtactttagtaccaaatgctcgaggtgatatctaactgaaccatagtgttgttgccgcgcgaaaaggacaaagtctcaagcaagaaatctaacggaatgcatgatctttattggcgacacttctggtatttttgtttcacactgttcagacctgatttctatctttaacaatcaagacgattgaccgacattcgcagtggaattagcttcctatcgatctttagtttgttttttctcttttttccatattagatttttttcacgtatttctaatactcgagcagattgtttagctaaaaacgctcaggctcgaaatagtctttttccccatataagcacatcggttcctaaatggctctctctagcggatagtttcttcccgataacttaatataaaaggtgtgtggagaaaaagaaaaagaaaggaggcagtttcaggttttagtgttaatctatcctaagaagcggtctaaggacttgtaggtgttacaatgaagccggaggattgttccctctccacagcttatacaatgtcttaaatcaaaattcaaactaatcccaaaaccttttgtgttttggcttttataaatagaaacctagctattaaagtaattttaatttgcgttttacaaattactaacataactttcttaagagtacgggttcatatatgaagttacacactaagcatataacaaacgcaaacaagtaatcgaaagtagatgacaaacaaagaagcattgtgtttaactgaacaaagcaagtttcgtaggagccacatgagtttgtttcttgagatttgatctggtctgatactgacgtttggtaatacctgtctcttactagttttcagttctaacaaaatcggtcttgtacttcttacctctccaccatttactcaaggtaggtactacttgtatgtacccactcctcttgttggtcaaaaactaagaagaataaagacctaaaagctcgaagcttcttcgtcaattccaatatctccaacaatgatcctgcaacgaagactaagtatatatacggattcgattaattcagagtttaaagttgatgatacaacagagccaggattaagcttttactaccttctaagttttatgcagccggagtttcgtgctcttgggtcattgtctcagactgagatggttcctcctctgcttcctcctctggtggctgcaacccttcttttgcttgcaacttcacaaactgtttgcttttagctaatcggattggccttcccaaaaaatcctgcgtatgttcatttcacacagtcaattccaccaacttaatcagctcatattctagagctggtattagaaacatgtcataaatctttctgttctacaattctgggattatggtccatatactcttaaagtgtctagtatctacccacataatggctcagagaaacccatttatatttttgtctcattgatgcattaagagtctaaagactagaaaaatcggtttacgggtccatctatggtccctaagctcaaatggtatcagcaacatacccaaataaaccaaaacataaacactctcttgtattttttattccattcaataactatatcagacggtaataatgagcttcaactttgctcaaaattaacataactgataagcctagaatgctttaaattatgattagatcattatcatttagaatagcttggatttacctttccttggaactcaataagcgctgcctcggcctgtttcttggttttgaaagagacaaacccgtaaccactcgacctccttggattttcatggaatataacttcagtggagacaacattaccagtgtctgcatcaaagaactccttaagatgcttggcccttgcttcaaatgccaagtttgcaacaaacaaattgaatgtaggcactggtgaaggcgtctcacgcggcgcatatgtcttcttctttttggtctttgcatagtctaccttcaaacgacgaccctcatattcctaaacaacaatacacaattaaatggcagatgaaaatcaaagaaagaccaggtacaaaaaaaacacaaatcaatcaaattgggatgctgcaacatgaaaaggtctattaacacaatgtacagcagctgctaatctaaaagacagataaaaatgagacaagcacagcaaaatctcaacaattatatgccaatttagacataaaagaagcgatgaatgcaatattcttacataggattcaagagatatgaaagctgtagaagcttcttcaggggaagccatttcaatgaaaaccaaacctaatagaactacaacttctactaacgtatgatacgattggtgtactaccactacaacatcttctaacataaaggcaaatagaatgagacaaacacaaccaaatgagagcatcgaccgaaaaacaacaaagtcaatcagactaagtaagagaaaattttgctccatcaagttttaggccagaaaaatctattgtttacacgggatactgcaacctgaaagagtctaataacataatgtacacttccactactcataaagtaatgtaaatgagagaaatatctcaatgattctgtgctaacttagagatggaggaagcgaattgcaatgttcttacatacaataatcaatcaaattgagataactgcaacataaaagagcccaataagcacaatgtataacttctactaatcgtaaagccagataatatgaaacataacgcaaccaaatctcaatgatagtattccaatatagacatgtaggaagcgttgtacttacacacgattcaagagatttaagagctgttgcagcttcttcaggagaagccatttcaatgaacaccaaacctctatttctttccttcttatgcatagacatctacaaatcaaaaatcaaacacaattcgttaaaccaaaacacaaaagattcaattcatcgatttcaaaagaaggaaacgagaaaaaccaaaaacctcaatgtcgataacactcccgtacttctcgaacaacgatctaatatcttcaggtgtagatgtccatggaacattctgagcaatcaatctggttttagaaatctcttcttctactacctcaggagctgaagaagaagaagaagaagattcgaggactggctcttgtgttgtggtggagaagtacgaagtgaggtttctggattttgctggaattgagtctggaaacgtcgcgtgacgatggagacgacatagtgaaggagtagataaagagagagagtgattggtgaaggcaacattgggattagggttcttctggtttgatttgtgacctagaatttggagggaaatgccaggaagacgaagaagagccatgactgagagagttttggataagaagaagaaatcgaaaagcaacgcaatttcacatttattgtgttggaatagactaacgacgtcgttcttagttttaaaacgacgtgtttcatgattctcactgtttgttgtagaagcaatgacgtcgtttagaaaatgtacttgaaaacgacaacgtttgtataaatttcactgttcttgtagacgcaacgacgtcgttgtaggttaccgaaaacggttgcgtttttgtaagaaatgttaaacaccagtgtttagtaagctatgtcagttttacactgctgttgtatataataagctagttatttaccagtttgaaaacatgattttctggtcaaatttgttcatagcaatactgatacatgttgttagtagcttcagagaagcaacaatataatccggtttcacatatgaatgatacagatagttgtttgattttgtttatcatcaattgttgttcatcttagaatctggtgagttattccatacaggtgatagaggcttcctgctaatttctggactgctaaactcaagcctcttctcgaccgggctactcatcgtcttcggactctttctcttgtttgactgcaaacagaacaacactcctaagttagaatcaaagagagagtccacatagctgctttttccttcgcagtgtttacttctttctttttgtggtacttttacctttgcagatgcgctgtttcggttcttgtctgcggagcaaagagggctttgttgttgccttagcaacttacgattttctttatccagctttcggtttagcgtgctcacaagttccacctgtaaaaagtttgtgagtcaagtggaatcatttaagaacaatagagtgttatcgtttatgattattacctcttgctcagctttagcgagattcatgatgatgcattctttttccttttcgaatttctttgcctttgaaactaaagaaagaaccttttgcgttgaaggctttaagtgatcccacttgctcagcaaggcttggcacgattggtcgtggatgtttgcctccaagaagagacgccccattatagtttcatctttgcttatgagtgatcccaaaactgaatcaagcaaatcttcttctaacggtgtagtacagttttcaacctttagagagaaatgaaaatacagacttctgtcagaacacaaagatactatgtttccagctgaaatgatgaaaagtagcaactaatagatacatcttctgactaatgttgacactaacagatctttctaatcttcatttgtttgataaaatatgctacatctcaaggatacagaaagataaatcatggatggaacaagcaatctctcaagcatcatagacaatcaaacacttatcaacagcctttatccacctcaagctatcaaaaacgcctaacaatactgtatatatgaataatatgaaaaacccatttgatatatcagaagaatccaaagttttattaccctcagaaagcaaaacgatatggactgacaattataaaaaccagaaacataatgtggactaccattagagtctctctattaagtgcatctactggataatatcaacaattgtaagactttctgcaaaggaacacaacatggatacttatgaaatgataatacagagttctgtcagaccacaaagaaactatattgaaatgattataagtagcagctaatagatacattttcttactaatgttgactctaacagatctttctaatttctatttgtttgataaatatgcacctcgtattagtaccattaaacattggatggaacaagcaatctctgaagcacatagacaaccaaaaacttatcaactacctttatccacctcaggctattgaaaacaactaacaatagaggatatatgacaaacccatttgatatccacctcaagttatcaccttcagcgagaaaagcgatatggaaggacattttatatttcatagtactaagagaaacttaatgtggactagcatagtctctctctcaagtgcatcatatctaccattctatgacttttctgcaaagagactcaatgagaagtcaaacttcatgagaacttagataaatcaagttgtcaacttaacaaagaaaaccaaatgatggtaccccatgtgctaattaaagagtagagagaagacaatagcacttgagtaaccatttcatcaagaacaagctaaccaaactataaaccagcaagtgcaaaaagcaaactaatttactcgagggcaatgcaattctaaacccaacttaacccaattaaagaaaatttagggttaatatgaagaaactcttacttcaccatctccgatttgacgcttaaatctctgcatttcctcagacattcttccaatttcatcctccaattcacgaaccctagcttctgcttctctagctctctcatcagattcattcccaaactccatcaacgcatcacgatcttgatgataaagcaaacactctttctccaatttcttacactgactcaacaaattcccacactcactagccaatttctgattctcttcaacaaacttcttcaacgcttgcgcattcatactcgcttcagacttataaaaaaaaaaaaaaaaaaaaagattcagattcaaatcaatcaaatcccagaaaacgaaagatacccagaaagaaattactaaccctaacacgatcgattacatgatctttctcctttaatcgcgaaatcagaccctgatactgttcgcgaagacggcgttgagattcttcagccgtataaagcttcttctgaagagattccatggagatcggaagacctaaagaatgatcaattgtatctttgatatattcttcgacttcttgcgagagatttgttctcgattttgtttctgcttcatctgaatcaattctctcgctccgcatggtttactcttgaaacaagatttggatttcaagaagagaatttagggtttcaataggaagaagaagaaaggggaattagtaaaagagacggaagagaagaatttcaaaaatgaaatcagaagtttgtagccgttacaaaagttattgcatcgatcgattcgtgcctacgtggcatgttttaagtggcggaaatatttggctcctaatgcaattttttggttatggtttttgggatccggtttggtttattttgtcggttttacttgtggaaaacttttttttttctctgttcggtttgacacaattcggtttttgttcgagttggttttttatttcggttttgtttttgtttaaaaacgtattttaaatatcaacaaaaagtgattacctaaaattacaatttaatgtcattatatcaaacaaataattatcaactaagtaattatttttcctctattttcagctcaattttttttattggtttatttttattttttcatcttgactagtattaagcaaaagcgtatcattcaattatataattgtatcaatttccaatttatttctatataaatttttcattttttgagtgtactaggataaaaaaaaattatatcattgggtggaatgaaaccttaatgtttcatgactatgcataaaaaatgaacgaaagatgagaagaaacatgaatcaaacctttatttttatttagatgattagatgagatatatacattaggaattttgattcgttcagttaattttgttcagtttcataaaatttaaatttgatttaaggttcagttccaataattctatttataagattttaaactattagtattattcgaatttggataagttcggttagattcattcatgttttcaccactcatttcctaagaaaacctttttaaaaacaaggtcattttaagaaacacataattttacacgaagtcgttttaaatgaggtagtttaaacgaggtcgttttatcttagtaaaacaaacaaactcctatgcttttctctatataatgcagtgtacgagtcttaatttttcgttatactacgtattcccaagaagatcatcaccagaaatctctttcatcggtaagtgtttctcgcaatctaatcttgtattttgtttttatggctcgatgattattaagcctaaaagtctttactatgccttcaactcatctttttaaaatgatttagataagataaagataaaaagcatcgttttataaactaaatatacttagaagcagaattgagttgtttatccgagatgtatgaattttatatttagattgtattcaagaagtgatatatttcatatttgattcgtttagttaatctgttgtcgatctactactatcacagaacgtgtgatcccaaacggatactcatagcagatctaatgaatttctttagtttttgtaaaaaaatgtttcttatttttcaattaattttggtaaataatttaattataacattaatttcttagatttgtttcctttttatttaaagtcaaaagttactttatttttttcttataagaatttatattttcttcccttttatcttgataagggtgagtacacttatgtaattgtgcacatgcactaaaatatctaattattctctatgttataattatttattaaaaaatgaaatttgtattatgattccaaagttgatgcatatgtattatttttggtctgtaaattacttttaaaaataaattttcctttccatatagaccacgttctatttcaaatgaaagaaatgattaaaaaaatgaactccatttgagcatttaaatgtattttccttatgaacactgattgaaattctatcaaaaagtattttttgattaaataattttttgctttattgtaaagttttatcattttgttttttggtaaattatatatctgaatacaactatattatataagatattattgtttgtgtattattgtaaattaatagagatcatttttttttaattttgttgtcaagtgaaatttgttgtacctccattagccatgcccgtcaaatggtaggtttgatgattacataaactaaataaccattattgtaatttcttttataatacgttaaccttttttcaaatttctttgggggaatacttttccaggcttttgcattggcaaccaaatcagggatcaacatttagcagccaaatcctaaacgaagtaacacaaagcatagagagtctcaatggcgtcaaagagggaacatggaaagccactctcaactattacaaacccatgttgcaagatcaggcgaatcaagctgagttcccgcgtgaatttgtaggaatttcgcttccggaggagccagataagtactatttcgtcatcaggtcgcaaaggatcgtcgtggaagcagattcttcaattcaaatgatcatggagagccttcagtcttacaaatgcaaactctcgttttactttgaagggcttgagtatcaacttggggattttcgtttgagagttggtaaagttgttcctactcatgctgagaccattagaggcgtagtcatggaggtaacaaattttatatcttttgagtacgttgagatatattaataatcaatgttaatgattatctaacactctagttaattcataatttggagtttgtaatgtaactcagtaactaaaggttattagctatgattggtaacacacataatgacggtttctaatgtgattaggcagaaaatttgtcaattaagaaaatttgcataatctacggttttccatgcaacaagttttcattatacgaatttttagtgctatcaacttatgccattatgctattatgcactactttcatttgaaacctataattatgtgtgtgtactatttaggtggagtatcttcctatatcatcaatgggaatggcaaaaaaattgatggaggagttcttggagatatggcaagaagctatgtcgaaaaggtcgttgccgggtaagtttgtgaacaaagaactcaactttgaaaagtttggacttggagacaactacactccgcaacataccgctgttggatatgctttcttcatggctaatttgatggcagcaattcaagctgggagaggctaaagataatacaacaaagacttttatgagtttttgtggtatcattgattttagaagtcattaaggattgaaaaacaaatggtagttttaaaaagttggaagaccaatttgtaaacttgagattggagcagattgtgaattcagtttcttaccaactttttggtttgttttatgactgtgaaaactttatgaatcttttgaccctaaactcaattactggtcacttgtgtctataaaatgcataaataaagcgaaaatgttggattacgattgggcttagtgttagttatttgggtcagtcattgagttgggcttaaggcccataaatgagaagaatcccaaatgcagaatcaaaacgcaaagaagttttggcggttgcgattgcatgttttcttccaaacagagcttaccggtagtaacaaacaatatagagagaaagaagtgtgagagctacaagtttgaagaaatcgagtagagagagagacagatctagattcttcttcttcttcgtcttcttcgtcaacctctagaagactcgtgtaggtacgtagctttgaatctcttcttctgtaacctgaaattttgttaattcctcttgagagtgaagcattatcgagtttgatcttcgagaaattgtacataaatcgcttgtttctctcgtgttctttctttgtactgatttcaaaacttgaatcgcaaagaacaagcgataagatcaaaatcaactaccaaaatcactacagagagctatttttctttggattttggttttaaacatgtgtttgattacgattccagactgaaatttgtatctgagtcagtggattttttggtgttgccttgttgattcgttcacgttgtagtagtagatttcagaattttgctttcgttgctttgagtttagcttaggatttggcttttaacagagtttctatttgagtagaattgtaaaatagaatttgatgtctgccaagtgtttgatgaaattcctctgagaaatgaaccttaagttattctagtgtgtattaatggatttcttctttgttgttcaggttattgtgatggaagctgtgaaggaagctgtgaggaagattaagtccttagtcataccacatgcagatgagaaagataatggtattgtttttgagatcaagcttaatgagacagatcagagagtagaaaagtggggtcttgatccttctttggtatgtattgtcttctactaaacttggcaacttttttatgttataagagttttctattgaatttactatgtccttcgtttgattatcttgcattattaggattttttcgaggtaacagggaactgtaatttgggacgtccaaatagcgagggatctaatcagtctctcatgggttctgtgaccattaggaacatctttaatcctaagctggtacacttgtttttacatatgcttctgatacctatctagtttattttgtagtttgatattttgatcctttaatacgcttggttttctcttaggatgatcttttgtctaagattgagtatgtacggtttctggaagctgttaaaaaacctagaaaccgtaccttcaaaacgagcttcttcaatagcagaaaacttagcccagtgttcactggaggaccaggctatgaggatctagtgcctccaatgtttgtgggtcgagattgtcttaaagctactataactgaggtaaccaagtctcctatatatatagatagtcaacttgtaatcatctctcacaagcaccttttttttcacgtccagaacttaacccgtcagagagaactcacatatggagttatgtttgaagagataataacccgagatgaaaacaggcgaatctctgaaaatgggctcttgttatcgcctgacggtggaatcagtattaatggacctccaacaactctaagtggtaccggtattgaccacattgccactctacaagccaacataacccgagacaacaccaagctagtgaatggggctgttgttggagagaagaatatctttcaggttttgtatcaaatcccttgatgttggtgtttttaactaaattagagctttaatagtgtactaacacaaatcgcaggtggatcaaggcttaggtataggaaataattttccgctcttcaaccgccaccaactatcattaacaagtttcattcagctgaagcaagtagaagaaggatccgataaaccacaaccaccagttctagtcctccatggtcgttacggtggctgcataggcgatcttccaagctatgatgtttttgctcttggtggacctaactccgttcgaggatacagcatgggagaacttggtgcagctaaaaacattctcgaggttaaatataattacgaaaaacatgcttttgttttggtctttcagtttataaaatctgataatgctaattgtatatagcttttttttggtatgttgctaattgtatatagcttggtgctgagattagaattcctgtcaagaacacacatgtgtatgcatttgctgagcatggaaacgatttgggaagttcaaaggatgtgaaagggaatccaacagggctttacaggaaaatgggacatggttcatcgtatggtttgggtgtgaaactcggtatggtgcgagctgaatatactgtacgtcacaatcgtggaaccggtgctctgtttctcaggttcggggagagatactaaggtcatgccatgaagactttgtgctgctttctttcttaactctaatactttggtttataatcctgatactctagttatgtaaatgcgtgcatagcaagtcattgagtttaggcatttgtttaaagcgatagaagagaataagaacaagccgtttcatgtctctcgtcacgacagtaaatgtttagttagatttgtttttgactttgaagaagtctgttcactgtagacgtagaacacgtactacatttactcatgccctctctattaacttgttgattacgcaaaacgacttttccgacacttatgacctagtccttattggtccactcgcatttctcggatgtttatgtcctctcaatgggatgtgacggaccaataaggtttattgtattacatctggccggtttgtgaaacaccgtcatatatccgaaatggtaacttgtatatatttttactgtatatagaaggttccagatttttaccacttgtttgcgtaactctctagctattaatgtattaaagattttatttaacaaaataaaactcaaaagtcacgagttctaatgtcgaaggttaaaaataaacaattttacatatgttgtgatctctttgtgagtttatctatttctgattttaatggttgttagaattgcttaaaacgaccagtactgcaagttgatatctattaaacctttgatgagcttattgttctggaattatcaaggattggggtggtctcatgtattatcaaccgtctaaaggaaatgcataaaatacagtttagaaagtttttatttcaatggagactaaatataatagagacgtgatggtagattttcatgagtggttaagttatgaacttatgatggtatatatttgagcctcgtggtttgagtggtgaaagaaatttgttcagactgagtggtctttataaatatatttattttttgggattttgaagtgcaatttggatatgtctcgtttttcatgtcttatgtatacaatcaaattaattacgaattgtattcatcaatggatgattgtattcactaatgaatgattgtaatcacctatcatttattatgcatattagttattaaaaccaaatatatatttttaagacactacacacatttatcaaaacttggatccgtaaaaacaaatgtgaatgtaatcacatatcatttattgtgcatatcagatattgaaaccaaatatatatatttttaagacacatacacacatttaccaaaactgagatcggtaacagcaaatgtgccagtatttttgaagctacatgcctttttggtacgaccatgactctgataataagcattcatcacaaatgatgcatgatttacaagactattagggatataacaggatccgcctggttgaattggcccacaatcaactccttcactacatccaaaattaatatttccttgtagttgcgcattcgttgcgttcatctttgctacacaccattttgtggaactcgccacatggaggtggttgatcattatggaagatagaatgatgaaaagaagtgccaaaagtgatgatattttggccattttttttaaatgacaattcaattgagattcaagtaattttgtttttggatgtctatgtgagtaaatgtatatgtgtctttatatattactagatagtatttagaagatagtttatatgtttttatatacatagatgtctataaaaaaaagtttaaccatataagaagtcaaagattttaaaaaacttatgaaaatgaaaatatacatatattattagaaatatatctttataatttgaaatgatatctaaaacttttaaccactagatagtagaaaatcaaagatataaaaatattttggaagaaagaaatatatctttataattagaaatatatctttataatttgaaatgtatgattatagaaacaaaaagataactttataactttgaaattatatgtctatgaaaaaggttctatatattagaaaaccaaagatttaaagatatttaagaaaatagaaatatatgagtaacatctcaaatccaaagcttggtcaatgagagagagagcgctactaaatcgtcaaaagagaataaagctaggaaaaatatataaagttggtttgggggtttgtcacgaatgaaaatagaaaattaaaaatgtaaacaagagaaagaaacgcaagaaaaagtcaataaaatgattgttgggaattcatggattttgcaggggtattgatgatcatttcattcaaagaaatctaagatatgtaataatttattctatgttcacaaactagaaacacaaatgaataaaagagctaccatttgcagaatcaattatgtaaggtctagatacaccattactcaacaaatcgctggacgacacatctagtcatgcgttataagcaagtaaattcacatatacactaaaactaatgggtatgtattagggatattgtctcacatcagaagatgagtatgattagtggtatatataaaatatgagtctctccactcattgctaattggttttaagttggaaatccacagtctaatatggtattggagcccgatccgcacatactcaacccaattcacatcggcccatcccaatacttggcccaccaatccatgcccgagcttatcaagattgatggctagattttcgaagagtcctattaaggatattgtcccacatcggaagttgagtaggatgttaagtggtatatatagtatatgggtctctccattcattgtcaattggttttgagttggaagcccacagtctaatagtatatgcttattaagagatctaactcatccaagtctaggttcaagcaagtaaactacacggttggcgattctacttccttggaataaccaatcaattcttgatgtcaaccatatgcattaagattaagtataaacgaagaacaatgtaaaacaaaacaaccctagaaatcgccactcaaactaactgatcatgaagttctctttgaataaccctttataaccaactaatttaaaggaatcaacaaaacaaggtatatatatatatatatatatatatatattaagattcagtgagtatacttgtttttatgatcgagcttttgtggaataaggatatgtaaatgtggtcagttcagaagtgacttacttattttcttaaaaagataaaattttcacaaatagcatcatttcaagttttttggacaaaaatatcactcaaataaatattttatttttaattattaaaatttataaataagaaaattcaaaaaataaataaatttcagacaatatttccccccaaaaatttccatcaaaattatttccaccaaaaacttttataaacaaattttcccgaaaaaaaaaaaagaaattcacgaaagattttataaaattcatgaaggatttaagaaattcatgaagggtttcaagaaattcagaattaaacttttttttttttgtaacccttccttaatttcatgataatttttcatgaattttgtaaaatcttttctgaattttgtggaaactttcaaggaaatttaggaagacttctacaaaactaaggaagggtttcacgaaagatttttttttgtgaaatccttcttgaattttgtaaaatctttcttgaatttcgtgaaattttttccagttttcgtagaatccttcctaaattttcttatgtggaaaaaatttgacggaatgttttgacaaaaattgtttttggcgggaaagtttttacggaattttttttggcgggaaaatttgacaaaaaaaaattcacggaaaaatttgaaagatttttttttcacggaaaactttgactgataatttttttaattaggtgctattttaggaagaaaatgttttgagtgctatttgtagatattttcaaatgaggtgctatttttggaagaaaatgttttgagtgctatttgtagatattttcaaatgaggtgctatttttggaagaaattttgtgtgctaattgtgtcaatctttttttttttgttaaccgatattaattagagctcaacaaagtcaattcacgtaaaatgttgtttacatatgtgatatattgtggttcaatataattttttttgtgcaaaattatccgtatttatatttgcactatgaaatattaaaggtaaataaaaacttatgaattcttctttattaattccttcaaatatactgagaataataattcttgtaaactagagaaattttaacattaacctatttttctattttctttgggagtttcctattaaggtaactttaagaatagaaactagttatgtatttaaaacgatacaaactaggatatctaaattgtattaaaaagattgtacattcaaaatttgtatacgagatcttcaaattttgtatataaacatcgaattatataaaatatttttaataactaaaaaaaaatatttgtatctttggcggtcaactaaacctttttttatagcatatatatatgatatataaagtttctttatgatataattatctatctaacatttaagattgtattaaagtttcgaattttatgtctacgtaattttgtttcctttcattttatacacaatgttgtattgtttgtacatgaattcttttcaaaataattttttagatatcattcatataaaatagagctaatgagataataaattaccttgaaggcttgaacattgtcgagacaaaagttgaaaacagaaggacaaaagatcactgtcaaataattattaatacatcagaaaaataattaaaaacgataatattgttttcagtattcacctacacataatatgaatatcatgtttacatatttcgaccttttttgatcggttctaataatctatatctcaaaactaaccaatctcatctagattccgtcaaattaagtttagtctataattacgaaactaaaaaatattagcaaatgggaaagtgctagagtcattgcactagtttattatgtgaaacacgaagaaacacggtggcgcgtagaaatcacctagaaactacgaagaagacgtgaaccccacgtctctctttcttcttcttctttctctatctcttcccattacaaaactcaagaagatgttaaagtacgaaacatgtcatacttcaaaagaaacgaaggaacaattgtgtttgcgtttgcgagcatcgggttcatagcgttttatatcattaattactacattcggcgatgcagaaaccgtgccgcagcagccggggacattgaggaagctcgaatgagtccgaggaggccaccgcgaggacttgacgctgaagccatcaagtcgtttccttcattcgtttacacggaagctagaggaattgagccaggaataggcgagctagaatgtgttgtgtgtttgaatgaattcaaagacgatgaaacgctgcgtttggtaccaccttgtgtacatgtgtttcatgctgactgtgtagacatctggctttctcatagctccacatgtcctatctgtcgtgctaaagtagttccttaatacgagtctcttaattagccttttactatgcattttgcgttacatagttctccctttgtaaataaattatctttatagtgttgatattttaccaaccgtaatgatgatactactccatggaaggaaataatctacaaaggaattgaggcatattgaattattcaatgtcatgatgatgatgatgaattagactagaaaatgacaaaaacatagtttatctctttggttacttgttcatgtattacacactaaacacatctatttggctttggagagggaccacctatcatgctgtgtacaacaaatatgtatatatgtaagttacaagttaatgaaacgttcggatatatagttatataccatactttgaaggctttaattagttactcatatgatgtaaacatttgttatggtgcgaataatctagcaccaaatacataaaccttattggtccgtcacattccattgagaggacgtgaacatcagagggatgtgactgaccaataaggattaggtcaaaactgttggaaaagtcttgttgcgtagatcaacaagttaatagagagggcatgagtaatgtagtacttgttctacgtctatagtgacgtaaagacttcttcaaaagtcaaaacgttagaggaagaagccaaatcaatcattccgaccaaaactaatctaactaaacatagtagtaatacaatatgtattgtcgtgacgagtacaaaccaaaatgtgtttagtattataaaaacggcttgttcgtattctcttctctcgctcaacacatgaagctcaagtgatccaccgtggttagcaaaaggacggttcacatcatgactatattcgcgagagatctcatctataggatcgaaacgaaggttttgttgccgctcttccttgtccatttgttaccttatgtaacatgccagcaagagtcagaatccgtagaccgcaatagaaaaaccaatttcccaacggaaacggtaatcgcaatcattgtgcttgcaatatttatctcattaagcatggtcgcttgtttcttgcacaaaacattctatagagcagaggttgaggcggcaagccaagaagtgtttcacagtagagcgaggcgtgggctcgagaaggaactcgttgagtcctttccaattttcctctattcggaggttaaagggctcaagataggcaaaggcggagtagaatgtgcaatttgtctaagcgagtttgtggataaagaaacactacgttggatgcctccttgtagccacactttccatgctaattgcattgatgtgtggctctcttctcagtccacatgtccggcttgtcgtgcaaatctgtctctcaaacccggtgagagttatccatatccgatcacggatcttgaaacgggaaatgaacaaagagatgaacattcattgcttcaactaggtacgaatctagatcgattcacacttcagttaccagaggagatgcaaagacaattggttagcttgaatctgataaggacaagcaacatgaccttacctcgagccatgagttcgagacagggctacagaagcggtttctctcatggacgacaaacacttcggcgggccatatctatgtctctaagtttctctttacaagctgcttctgttcgttccacagttggcagagacgatctagtgctagagacttcccaagctaaggacaaagatttatgtgaacagtcgttccaacacctcatgccagagaaggtctaatcttctctcttatcgctccacgtgtcctatatgtggtgctgatgtagttccttaatcgtgtctcttaacctttgacttttgattttccgtttcatgcttccctttgtgaataaaattatctttgttttaggctttcaacaatttcagttgtctaaaaattaaggattaggtcaaaacaatttcagttgtctaaaaaataaagtcttgttgcgtagtcaacaagttaatacacaaaccttattggtccgtcatattctctttgagagaacataaacaacaaatgatggtttttcaattgtctatacgtagggcgaggtcaaaactgttaacatagtcttgttgcgtactcaacaagttaatagatagggtatcggtgtagttgtagtagtacttattcaaagtcaaaacgttaagaggaaaagaccaaactaatcattcggaccgaaacaattccaacttaacatagtagtaatacaatatttactgtcgtgacgagcagatcttattgatctacgaatcagaatctctaaagtgtaacaacttcttcttctctttctctcgctataatcaaaatcagaatcttattgaggacgttaacattatgaatatcttcacgagatatcaccttcctcgggtcgtatcaggtgttatattgccgctcttccttttccatcttttgccttacgttacatgtcagcaagagtcggtaccaacaaacagcattagacaaaccaatctctcagctgactcaataattgcaatcgttgtgcttgcaatatttatatcattaggcatggtctcttgttgcttgcactgcatattctatagggaagagattggggcggcaggtcaagatgtattacacagtagagcaaggcgtgggctcgagaaggaagtcatcgagtcttttccaactttcctttattcagaagttaaagggctcaagataggcaaaggcggtgtagaatgtgcaatttgtctgagcgagtttgaggatcaagaaacgctacgttggatgcctccttgtagccacactttccatgctaattgcatcgatgtgtggctctcttcttggtccacatgtccggtttgtcgtgcaaatctgtctctcaaacccggtgagagttatccatatctgaacatggatgttgaaacgggaggtgttcaaaaactccccaatgagagaagcttgacaggtaatagtgtaacaactagatcgagatctacagggttattgtcgagctggcgtatggctgagatattcgtccctagatctcattcgaccggacattcattggttcaacaactaggtgaaaatctagaccggttcacattgcaattaccagaggaggtacaaagacaattagttagcttgaatctgataaggagaagccacatagtcttacctcaagccgtgagttcgaggcagggctacaggagcgggagcgttgggagcgagagaggtggtttctctcagggacggcaaacgcaccgaagggccttatctatgtctttctctttctctttccaaactgcttctgttcggtcaatacatgacatgaatgatcaagcccaagctaaggacaaatattttggtgaacggtcatttgaacgccttatgccagaggagaaggtctaatctatatacttttgtttcccttatattgaagaagataagtcacaatggtgttggtcagtcacgcgtgccacggtttggtttaaccattaactagttccagttatttcattcaaagtgtgtaaacatagttagattaatgagcctactcatatcaaaagttccatcttcaatcagcggtttcaattagcatcattcgaatatcttgtacagtttctcggggatgctacctgcaaaaaaagtataaagaatgtaactaatgtctttgtaaaatttgattctcccgacaaaagttttttacttaatataacatgtgaagctccttctggtaatttagagaaatggtagcctttgatttctcacctttgagtttttgactttgcatgatcatccttttttgttttcctcaaaatgatattacaccctaattcaatgtttccgagactttttcgacagttttttcagttgtctacaagtaggaggaataggtcaaaactgtctggataaagtctagttgcgtagtcaacaagttaatatagaggacatgtgtgagaattgtacttgtacttgtacttttaaaactttttaaaagtcaaaacgttgttggaaaaggccaaactaatcattcggaccaaaatatatctaacatattaagaatacaatatttgttgtcgtgcgggcagatcttattgttctacaaatcagatttgtattttatgttgaacgacttcgtcttcttctctatctcgcttgcgctaaacggagacatggagctcaagtgatcgaccattatatagcagaagaaccgttaatatcatgactatcttcacaagagatttcagccatcggatcctagcatgtgttttattgccactcttccttttccaatgtttgccttacgtaacttgccagcaagggtcggaatcagcaggtcgcaatggaaaaagtaaagagtcatcgataattgggatcgttttgctttcgttgttcctcttacttttggtcgtttattgcttaaactatggatgttgtattgaagagaatgagacaggaggtcatgaagtgttacacagtagagtgaggcgtgggattgacaaggacgtcatcgagtcctttccggctttcctatattcagaggttaaagcgttcaagataggcaacggcggagttgaatgtgcaatttgtctatgcgagtttgaagacgaagagccgctacgttggatgcctccttgtagccatactttccatgctaattgcattgacgaatggctctcttctcggtccacatgtcccgtctgccgtgcaaatttgtctctgaagtccggtgacagctttccacatccgagtatggatgttgaaacgggaaatgcacagagaggtgttcaagaatcccccgatgagagaagcttgacaggtagtagtgttacatgtaataataatgcaaattatacaacacctcgatcaagatctacagggttattgtcgagctggcatgtgcctgagctattcctccctcgatctcattcgactggacattcattggttcaaccatgtcagaatatagaccgattcacactgcaattaccggaggaggtgcaaagacaattggtaagcctgaacctgataaagagaagccatatagccttacctcgagccaggagttctagacagggctacaggagcggaagcgttgggaacgagagaaccggtttctctcaaggacggcaaacactcaggcgagccatatctacgtcgctatctttctcttttcaacctgctcctgttcggtccacacttgacagggacaatctaatgcgagagacttcccaagctaatgacaaagattttggtgaacggtcattccaacgcctcatgccagagaaaaactaatctaattaacgaggataagtcacaggaaaaggttgagtttgattgttatggttttggtcagtcgtgtgtgccacagtttggtttaaccgtaaactggttccactttcattcaaagtctagaaacatagttagagcaaatggaagctactcatatcaaaagttcttctacaatcagcggtttcagttagcatcgttcgaatatcttgtacagcttttcaagggatgctacctgcaaaagagtaaaaagaatgtaattaatgtctttgtgaaatttgattctccagaaaaaagtttgtttacttaatgtagcatgtgaagctccttatggtaattaaagaaatggtaacctttacaaaagtcccatttgaagccatggaagctggtggcttcaagaacaatctcattgacggaaacaacacgtgttggattgaccattcacgttgtgcccatgcgttttcagcatctgacagaagatcttggtcaagattgtcctccatatcgacgttaccctctgcaacagttgaatgtaaaattaaatgctctcatccatttcaaatgcagagaaccaaaagcgaaaacattgtccactagaggaggttacatacctaaatctgacttttcctgagagctctcacctctcttactatagaactgaataccgtcacccgatgggtttggcaaaagaggaggatgcatggcgtaaaagttcccaatagctgcagaaactccttgaaagcaactcttctcatcttcccactcaacctaaacagtacgttagggtgacattagaacccactattactatgattagtagcacttcagtaggcacgaatagtggatataattgtacaaatagtaatcgcgtaactcacatcatttcccaagcatagtaaaaattcaggaacacgatccatgtcaggtgtatactggtcgagtatcacaggaagccttgacaaatttgcactggagtcaatgtgcacgctgaaatactcctctaacatttctgctttttccttgaggagttctgtattcatctacatattaagatgaaacaagttaaccaaatccatatgcaacattacagcctcaagaatttgttactgttgaggataagagctgatagaaggaaggaatagtacaaaaccagtagcagaaaacgatgcagaaagcagaacttacttcagcaattctttctttcagatcatcttttgtatcatttcctggatctagatcctcctctttcagagccaacaatatcaactctgacaaaggggctggatcgctaagctgtattgcgttaaaatgagcaaaacgacgaagagtttgctgatacattagctctttgctgcaaaacccaataagatggtatgcggaatgagatgttttgttacgtacagctaaaacccatcaaacattaaatattaagaataatacctgagattcaccacatttgctagatatagatgggtgttatactgaactaaagcaaaaacatcatctgccattccaacatatgtgcaattccttacagtctccagcatacctaacagagaataatgttgagaaaagcagttatgaggattgatttaaggttttgttcggaagaataaccatgcagagtaaactacctggatggcagcagctgtcaactccagcaataagttcctggacactagaaagatcagcagtttcctttgggtttcttctttgccttacagaagacctgcaattccgtaataagatcaagtgaatatactgcagttgcgcaacacatctaaccaataaagaatcatgccaaagaaacacctgcaggaaacaattttcacggaaattaaaggagtgaacatctactggtaaataagatgagagttttgaatacagtaatgacatgggatccaatgttgtttatatgtaactacacgtcttgtatcaggtggggtcttaccttactacactcaaactagaaaccttgtcagggagactttgtggcttgggttgcaaaaaggcatgtaaccttccagctggatctgatgaatctgttctcaccattttgttcacaggaactttctgtgtcttttgtcctagtaaatgagaagagcacaagcttttctatgaagcgaaaagtacagaagagtttgcaacaggaaaagttttagactatgaaaggcattcaacccagaaaaatggtacaataccagaaggcttctgagaaactggagaatcacttttctgagatgttaacgtagattgaatgtattccactttctgtagcatgcaaatatcgaaagaaaacatgattagtaaataaatgttcttaacctccagagaaaaatgttgcttcaggttcttttgcgagcatacctgctcttgaaacgtcctagtatcatttgcgtttctcagttttacttcaacctctgactgtatcatctcaataatgatttcctggtttagaaggctaacctgcacgatagaccaaagcatctattattttgttgtataaataaggaatttattattcaagcaagttaagcaacaaatgcacaattttctcatataaagtgttgactgttgaacccacatacatgaatatagagcagctactaggccttaaaggtaaaataaaaggaggaaagcaattacctctttctttgttgggtgaatattgatatcaacatgttcccgtggcaaattgattgacatgtagacaaaaggttttgatgcttttggcaatgttgcagcataaacaatttcaatggctctttttaaggcagagcattccaccaatctatctgttgtaatcaataaattaaatgtcacataggcttatctagtgataaatcagatattactaacttttcatttctactaaggaaaaaaatcctcaccattaatgaaaagcaccaatatagtcttcttagcaacatagttagaattggatatgaaaccctccatatcaaaagtacaaccagaggagtcacaggaggaaacttctactttcatcaagttctttgcaactgatactccatatacagacctaattgaatcaagccttgaaggtgacacgactgagtgaacatcagccttaacagctccatgctggcgagacagtatcatccaaaattcacttcacaattccaaaacacaaaagattgctaaatacgactagtttagttaataagtataccaacctttcgacaagaaaagctgacattattgtaatgaatagccatccggctcagcaaatccacgattttcccgtaatcatcagcagaattttgaagtgtcttccttctagcaatcatattgtagaacaaattctccacctaaatcatacataaacatggaaagttaccgaagaaaatcgtttcccccgctctttgcttaaccagatttgaaagattaccattatctgtgttcctttgacagcagcacacgcctttggttcatgctccatgacaccatctctataagacactctgaacaaacaaaaaattgcagattcaatacaacaacactgttcttcacacattgaacagaacaaaacataacttaatcaaaccaatgttacaaacctataaccatgaatctggcctttagtaatagtagtcactgtaacatgagcaacataggtcatactagctaatgcctctcctctaaatcccattgaactcagagagaacaaatcctcaaacttagtcagcttcgatgttgtatgtctctcgcatagtatcggcaagtcttcacgctacaaatccgaatcaacaagaacacaaaaacaaatccagaatcagaaatttcccaaatttgtgaaattgaaaaagagagtgtgtagaagaaccgtactctaataccgtgaccgtcgtcggagacttgaatgagtttcaaaccaccgtctttgacaacgacgcttatggaacttgaatcggcgtcgaggctgttctcaacgagctctttcacagctgaaactggacgctggattacttcaccagctgcgatacggttgactactgattcttctaagcgttgaatcttcggtggctctctcggtacaatcgtcgtcgccggagattcttcctcctccatctccgccgtaagagacgaatcgtcgatcatctcctcctccgcagaaactaaaacctcgcgccagatacaaattgggtctgcttaagcccaattagattctgaaagcccactagtggcccaaatttatttagggttataatttgtcgtcgtgtatacctttttcctttccctaagctgcaagaaatcattcgttgtgaaagttgaaacaatgacgacgatgatctacaatcttccaagggatttgatcgaggagatcatttctagggttcctttgaaatctatgaaagcggtgagattaacttgcaaaacttggaacaatttatccaaaagtgagggttttacgaagatgcacattggtaaagtgacaacaccaacaagagatggagagactatgatgatcatgatgatgcctcacaaactttgtttaatgagcggtgtcgtcgactttgatccatctatagaggttaaaggtcaacttttcattcacaatcaagtgagtatatctaatattttccactttgagggtttgttgttatgcatcttgaaagacgacgttactagggttttggtttggaatccgtattgggggcatacaaggtggatcaacctccgatattctcaacctccgaatggatttgataggtttagttatgctcttggatacgaagataaggaatcttgtcgtacctttaagttcctgaggtttctagattatttctacaatacacccgaaacacaatctttttggtatgaaatctatgattttgactcgggtttatagacaactcttgatgtcactccacactggggtgtacattgttcttccagtggcgtttctattaagggaaacacttactggtgtgctaaagaaaggaggtcacagggtcacaaagatcacattatctgttttgattttacaagagagagattcgggccgcttctccctctaccgtgcagcgctgtagatgtgactttatcttgtgttaaagaagagaagcttgcagctttatttcagcgttatctgagttggagatatggattacgactaagattgatgccgaaacggtgtcgtggagcaagttatttagaattgatacgagacctaagataaagatatcacatagtttcttcgtagacgaagagaagaaagtcttcatgggtttcggtagaaaccttgaccccgactctaattgtctcaaaacatttattagcatcgtcggagaggatggatacttagaaaaactgaatcttgtagacggaaactgtaaacaatatgttatctcttatattccaagtttggtccaaatcaaggaaggttcacgatgcaaaaagagaaaacaaagtggtttagaaaagcgtcgatttgatcaaaacatgttgagacttgcctcaattgaaaagtttgtttatgagcaatatatgttgggctgtgtggccttagcccatttatattgtatagattaactaggtctaaacttatcgtgtatataaaggcattgcctcttgccgtaatcaataagaatcttcttttcacaacctcgattgattcttgacatggtatcagagcacaatacctaactactaaaaggtttttgtgatcgattctgtgatctctccttccgctataagagatcgctttcttattccttctaacttctctacttaatacttgcatcaaactctccgttcatcatgagtactgaattggctctcgctagctccaccacaccagctaggactgaaacaaggcgtacaatctcgccatatgatctcacatccggtgataatcccggaactctcatctccaaaccgttgcttcgtggacccaactacgacgaatgggccacaaatcttcgtttggcgttaaaagctagaaagaaatttgggtttgctgatggatctattccacaaccagttgagacagatcccgatttcgaagattggactgccaacaatgctcttgtggtttcatggatgaagctcaccatcgatgaaactgtttccacatctatgtctcatctcgacgattctcatgagctctggacacacattcagaaacgctttggtgtcaagaatggacaacatgttcagcgactcaaaacagagttagcaacctgtcgtcaaaaaggagtggccattgaaacttactacggctgtctctctcaactgtggtgtagcttggcggattaccaacaagctaaaaccatggacgacgtcagaaaagaacgtgaagaagacaaattgcatcagtttcttatgggacttgatgaatctgtgtacggagctgtcaagtcggctcttctctctcgagtgccactaccttctctcgaggaagcttacaatgctttgacacaagacgaagaatccaaatccttgagtcgcttacataacgagagggttgacggtgttagcttcgcggtccaaactacttcacgacctcgagattcttcagaaaacagagtctgtagtaattgtggccgtgttggtcatctcgccgaacaatgtttcaaattaatcgggtatcctccttggctcgaagaaaaattgcgtcttaaaaacactgcatcttcttcacgtggtggtttaagttcgttcaaaggaaaacagagtcatggtcgtggatcttctattaatcatgtcgcttcttctggaatggctgccaatgttgttacgaattcatcgctcacttctccattgacatcagatgatcgcataggacttagtgggctgaatgattcacaatggaaaattttacaaacgattcttgaggaacggaaatctaccttaaatgatcatcagtctggtaagtattttcttgaatcttggataattgattctggagccacaaatcatatgactggttctcttgcatttctccgtaatgtttgtgatatgcctcctgttttgattaaacttcctgatggacgttttacaaccgctacaaaacaaggcagtgttcagttaggctcttctttagatcttcaagatgttctgtttgttgatggtcttcactgccatctcatctccgtttcacaactgactagaacacgtcgctgcatttttcagatcactgacaaagtttgcattgtccaggaccgcaccactctgatgctgattggagcaggtagagagctgaatggcttatattttttccgaggagtggaaacagcagctgcggtgactagtaaggctttgccgtcttcacagttatggcaccaacgtttaggacatccatcctcgaaggctttgcatttgttacctttttctgatgttactagtagtacttttgattcaaagacttgcgaaatctgtattcaagctaaacacactagagatccttttcctttgagcagtaataagacgagttttgcttttgaattagtgcattgtgatctctggggtctgtatagaaccacttcaatatgcggctctcgttattttcttactctagttgatgattattctcgagcagtatggttatacctcttaccatcgaaacaagaagctccaaagcatctcaaaaacttcatcgctctagtagaacgacaatacactaccaacatcaagattatccgaagtgataatggttctgagtttatttgtctctcggatttctttgcacaaaaaggaatcatacatgaaacttcttgtgtaggtactcctcaacaaaatggtcgcgttgaacgcaaacaccgccatatccttaatgttgctcgtgctctccgatttcagtctggtttacctattgagttttggagttattgtgctcttactgcagcatatctcattaacagaactccaactccattacttaagggaaagacaccatttgagctcatatataatcgtcctccaccactgcagcatattcgcatttttggatgtatttgttatgttcataatctgaagcatggaggagataaatttgccagtcgtagccataaatccatttttcttggttatccatttgcaaagaaaggatggagggtctataatatagaaactggtgtggtttcagtttcacgtgatgtagttttccgtgaaacagagtttcatttccctatctctgttatggattcgtcaccatcacttgatccggttctcgttgattcatctgaattagaagaaatctctatgactcctccggtcactccgtcttctccggctactccatcttctccggtcactccgtcttctccggttactccgtcttctccggttagtccgtcttctccggttactccgtcttctccggtcactcctctatcttcaactacaacctcagctgcgatagacaccattgaggatattaccactgatcttgaggattcaacctctatggatttttttcctgatgatgaagatgagttttctcccactgctacagaatctcctgcttcatcgtcatctcctgtacaccctccagcagttcaactagagcttctcggtaaaggtcatcgtccaaagagacctcctgttaaacttgctgactacgtcacgactcttcttcatcaaccattcccttccgcgactccgtatcctttggacaactacatctctagttcacgtttctcagataattatcaagcatatattctcgctattacatctggaaatgagcctcgaaactataacgaagctatgcttgatgatcattggaagggtgcggtttcagatgaaattggttcgcttgaaaatcttggtacttggacagtcgaagacttgcctccagggaagaaagctcttggttgtaaatgggtgtttcgtctaaaatacaaatctgacggcacacttgaacgacacaaagcacgtttggttgttcttggtaacaatcaaaccgaaggtcttgattacacagaaacttttgctccggttgcgaaaatggtcacagtccgcgcttttcttcagcaagttgtttcacttgactgggaggttcatcaaatggatgttcacaacgcgtttctccatggtgatcttgacgaagaggtatacatgcaatttcctccgagatttcgtactggtgacaagacaaaagtatgtcgtttacgcaaatctttgtatggtctcaaacaagctcctcgttgttggttcgcaaagctcacatcggcattgaagaactacggttttattcaagatatttcagattactctttgtttatctttcacaaaaacggagttcgacttcatgttttagtatacgtggacgatttgatcatcacgggtactactattgctgtgattacagagtttaaacattacttaagctcttgtttctatatgaaggatcttggaattttgcggtacttcttgggaattgaggttgctcggagtcctgaaggtatctacttatgccaacgaaagtacgcacttgacattatcacagaaacgggtctccttggtgttaaaccggcttcttttccattggaacaaaatcataagcttgcttttgccactggtgaaacaatagacgacccacttcgataccgtcgtctagttgggcgcattatttatcttgcgactacgaggcctgaattatcatatgttattcatattctctcacagttcatgcataatcctaaaccggctcattgggaagctgctcttcgcgtcgtcagatatctaaagtctagtcctggtcaaggtattctcctacgtgctaatacacctttggttctctctgcctggtgcgattcagactttggagcatgtcctcattcagatcgatctctcaccggttggtttattcagttgggtggctctcctttatcttggaagacacagaaacaaaatgttatttcccgctcttctgccaaagctgaatacagggctatggcagaaacagtgagtgaaatcatatggatccgtgaattacttcccgctctcggtattccgtgtactgctcctaccacactccattcagatagtttatcagccataagtcttgctgctaatcctgtctatcatgctcgcactaaacatgtgcgtcgagacgtccatttcattcgcgatgagctcgtcaatggcactatcgctactaagcacgtctcaaccacttctcagctagcggacattctcactaaagccttaggacgaaaagagtttgcagactttcttgccaagcttggtatctgcaatctccatataccagcttgaggaggggtgttgggctgtgtggccttagcccatttatattgtataaattaactaggtctaaacttatcgtgtatataaaggcattgcctcttgccgtaatcaataagaatcttcttttcacaacctcgattgattcttgacaatatatataactaggaggaggcgtaaaaggagaaaacaggtaattttttgctcttgtacctttgatatttttactgaaagtgaagcttatggtgattacacttgtggtctacaggagcagaacattgagagtgggtcgagtattggaaacgcttcaagatgttcttggaaccatatgggacttcttgcattgtgatgcctaataaagaaccatatgatgatgttgttcgtattgttgggtttctcttttactttctgttgtctcttttgtagaataaataatgttttgggtaatgaatgatttaacttgcttgtgaccaaaaaaataaaataaaaatgttgttttgttacgagtcatttcgattgcagatacaatgtaacagtcttcacacattgaacaaaacaaaacctaagttaaacaaataactgtttctttaagtctttaaccatgaatctggcctttattagtaaatagtaatagtggttattgtaacatgagcaacatacgtcatactagccaaccaatgtctctcttcttaaactcatcgaactaaagagaggtcaaatcctcatacttactcggcctcgatgtgaattcacgttataataagaaacaaggaaaacacaaactaatcattttcttagtcctaggtgttcggttttaaaatttagtatcattcaagtattttgaaatcttcattttggtttggatccggttcttttgtttttaaaatttagtatcaatttggttatttttccttggatattttgattatttttgattattttcggatatttttttgttatttttgagtattttactttttctatttttattttaaaatttttgattttttgatcaataaataattaatattttgggtatttttggttaccaaaaatatttcagttcggtaccaattataatttttttttgttatataataatatagtatacatccaattatttttaaatttttgattttgttcgattctttttgcttcggttccaattcagtagcttcgattcagtttaattgcctagacctacattttctattagaactgacacaaaaacaaaattggcgtcgcttataaggtctacaatatatggttggcctctggcccaatagtaagcccatatattaaccgacgtcggtttatagccccgataaacacaaacaatatagataagatagtttcttctacttcaaaaaatggatgctttcagaaatttccagaaattacgggtccaattgagaaaaacgcgtatcgtcgtcttcttcatcaaaagcgaacaatttcgaaaacaaacctaacgaacaaaaatcaaatcttctctctgttaaaatctcaccgactagagaaaagctttgttttttccaattaaagttacattttttgtttgaacaaatcactttctgtgatctacatttgtgtggtcgtgaaatcaatgacggaaccagaaagattaggaggaatctccctgagttttccggtgaatgaagaagatacggtaacgacaacatcaccaaagactcttccacggaggctccgtcgtcgtcttctcgaaccgaagagtcctgtctccgccgcagagatcgattccaaactcagagaagctgatctccgtcgtcaggtaaaatcttaaagtttgaaactttgggttaaaacagaaccgaatttgaaaaaaagatgaatttttgcagcaatattatgaatcactatcgagtaaggcacgacctaagatgagaagtccgagatcaggaagtatagaggagcttagtcagagacttgaatcaaagcttaatgctgctgaacaaaagaggtaagaagaaaagaaagagattagttttgtgtaataaggaggaatttgtgaagaggatttaatcaaagttgttgataggttaagtattttggagaaggagctggctcgtttggctaagatggatgaagctagacaagctgcgaagaatggacttgagcaacgagttgagaaagagcgtgatgagttagagagtaaggttgaagaaagggttttgaaggctgagaagaataggatgcttttgtttaaagctatggctcaacgaagagcggcgaagaggcagcgtgctgcgcagagtttgatgaagaaagctattcaggagacgaggtataaggagagtgtgcgtgctgcgatttatcagaagagagcagctgcagagagtaagcggatggggattttggaagcggaaaggagaagagcgaatgcgagattgactcgggtgtttggtgctgctagttctgtgcggagtcaaaaggaagctgagagaaggaaaatgaaggaccgtttagaagagcggcttcaaagggtatgccaaaacattcaagcctttttccttaaagaccatattgaaattggctataagtatgattattgtcgtggcatttttgttaggcaaagaagctgaaagcgcaatatatgaggcgaaggagaggtatggatagttgttcatcttcaagatcagaaacaatgcgaaagaaccaagtgcatcttgttaggatgttagtaaggtaggtgtattgccctagaacattttgtatgatgtttaactgtcttacgtcgatggtctgattgtctttttaaatctcagatgctggaggagatttgctaaatacaagaaatctacttttgtcttggctagagcatatcatgagttggggatcaatgaaaaatccattgagtcagtaccatttgagcagtttgccattcaaatgaactcagtttctgtaattcaaacggtcaaagcattgcttgatcgcttggagatccgactcactctatctaaggcatccaatgtggagaacattaatcatcttcttaagcacatctttccgcctgttcgaagagggaaatcacccagtcccatgagtaaaggcgagcaaaattcacccaattccaagatgggatatcaaaaacttaaaaagattgcgagatatccagctagaatttttctttgtgcctacatgatcaagcaacatcccggtgcaatttttagaggaagaggtgaacatgagattgcgcttgtggaatctgcaacttgtcttattcgggagtttgaactgctggtgaaagttatattggaaggaccagaatctaccctcccgggcaatgtatctttcgtagctcaacgtccaaaaaaattcagatctcagctagaagcatttgataaagcttggtgctcttaccttgagggttttgtagtctggaaaattaatgatgctaagcttctagaaaaagatttagccagaactcaagagtctgagctgtctgaggtatcaaaacatacttcctctcccaaaataatagacagtggcttgaatcagaagacggtatacccaatttcctctctttttcgtttatctttattgattctgtgtacacgagcctaaagttagcttattatgctgcacaaatatcttaatagcagaccatggaatatcaggggcttgatagggagaatgacttatctttattttcaggtaaaggcatcttctccaactaatcgggctttattctctgaaactgatggagcacgagaatcaaaagcacctgcagattcgcatcttccatcttcatcttcaccttcaccgggctcatcgaatttgtcaccctctttgaactctggtaatcttttcaatctggataaccttttaagctcacagataatctggcaagtcttcaatctaatgagttttatctagcagggagcgaggccatttctactccaaacgtggtagctaatagctttgatgcagcgttggctagtgagaacgaagtaattgtaaatgaaattgtccatgacaatagcagtagttttgctgatagcctcgaccctaacactggggatacaagcaaccttcaggtacataaatataagctagttaaggctgtgactgatgcattttgacttcactattctgattcattaagttggaactataatattttcgactttactcatatttcttcacttctgtgatatccaggtgagggttaaggagacaatggaaaaggctttctgggatggtgtcatggaatccatgaaacagtcgcagccagacttcagctgggttattaaactcatgaaagaagtcagggatgaactctgtgagatatctcccaaagactggagacaagagattgttcaaactatcgatacggatgtgctgtcacaggtgcttgttactacagtcttgtctttaattattggtacaacagatacgttatgtacttaatgtctctttcttttcttggcatgattcagttactggcttctggtaatgtcgacatgggttatcttggaaatattcttgagttttcccttggcattttgctgaaactctctgctccagctaatgaagaggaaatcagggttactcaccataaactaatgacagaacttggagagatagttccaactgatggccattcgaattcgtcatatgcagtcttaatggttaaggggctacgctttgttttgcagcagattcaggtatgcacattttttccttttcgtactttgtggacataataattttgatcgttttgagctttctaaaatgaactatgaaatagaagaaacttgtagatggttatatttctataattttactgaatagagaagaggacagggtttctctagtagctaccaacttacaaacataatttgtccactatctccacaagcattactgtaataaacttctcctctcatgtgatacactttgttaactaccacaactaatttatttttcaccctctgaacaaatgaaatccaaacctagggactaaatctggtactggtagtgccttttaacgtcatacgtccttttacttgcagattctaaagaaggaaatcagcaaatctcgtttgaaactcttggagccacttcttaagggacctgctggtctggaatatctgaagaagtcattttccagtcggcatggttccccagaccaagcgtcttcctcgctaccattgacaaaacgttggcttttaagtgttcgaggagaagcagagagggagtggaaagaacacaaagatgctctttctgctgtcataaataaccactctggatcatcaggcctcccttcgaccaccatgcgaactggtggcaatgtctcctctgtttcaaaagtcaataccccttcatctccatttccaggtttggtgtccatctatcaattttagctatctttttgggattatttttgtaagaacttagtttagcgaacacaaaccaactggtaaaattcacctgtagaaaccgaacatgttcccaaaaatatttcatacgataagttagtgaatggtagccatcatggtgaatgcacctttgtcatttgttaatttaggtgatcatagttgcatgctggttattttctgttgcaggaatcgaactgtcagagtgcaagggagaaactgtggatcttcttgttcgcattggcctgttaaaaatggtgagcgaaatcggtggtcttactttagaaactgtccctgaaacatttcaacttaacctatctaggctgagagatgttcaatcccaaatccagaaaatcactcttgtctccatcaggtcagtagtgacaaaacttacctcttgaaccctgtctcactcaaaatggtgattatataattctcatattaaccgttctgtttctttcttcttcaagtgttttgatcctccagcaaacactagtaagcgaaaactcatcctcgattgacatggaggctattacacggacttgcataaaccgtctttacgagatgctagacgcaaaacctgatgcaggtctttcagaaatcatggaaacactctccgagcttcttgattctaacgatgcagagacaaagaaacaagtaatcgcaaacatgcttgtgaaaagcttacaagcaggagacgcagtgttcacacatgtatcacagaccatatacctagccattagagccgcggttttggccggaaacaacacgaagagaaagcagttggtggaaacaatgctaagaaagatcggagcagcttctctctcggacaaggtcatagaggtttcagacattcttgttcttgtggcaacagtgtcacgttctgttcatggattgtggtatgaagaattgctaaagaaaccgaattaagagactatgtggaccaatggaccagtgtgggtttgtttatggttggttgggtccagattaagtgtttgtagataagagtcagaacaacacaccacgtttgtatttataactattagctgtgatgcatctgtaatacactgtacctacaagaattccagttttctctattgtgattgattctaattaaaccaagtctgatttcaattaaacccggttcaatcattttggggccaacatcatttaattttggttccagtgacaaaccaagtgatatgttggggaaatgtgtcccctacagacaattactgactaaagaactaaaagtaaaagatgtttttttttttgtcgtacagtaaaagatttttaatactatttgattatttgaaacttactgaagataaaaagttaaagaaaccatataaagaaaagaaaacagttcagctttgtgacaaatattatttaaatttaattcatacatctaaactttttttttgtgtgctacaaaactttttttttatagattttggtagcaaacaaatacttccttttaaaagttctaattgcaatttattgttgtcaaatttggttatgcattaatttagttgttcatatatctccttccgctttagtttgttgtatttaatgatttttttttggtatgattgttgtatctaatggctaatgtctatactaaaatatcttacaatcttaaattataagataactaagtatatttggtctattctgtttagtaataaacattttagggatccttgtgtaaatagttctcctaattcatttggcaacaaagtgccctatgcaatgtatttagattctaaatttgtgtattatttgtgaggtataatttaaaaataatatatgtacctaagtatatttgatgaccaatagaaatactatttttaaagtctaagttctttatggattttcaattgtaaaatgaataaagaatgaaaaagtatttttcatactttattatattaattatatattattctatatatatatatatttatttacttttgctccagataaaatactttactagatccttcactgatatcaacaactaatattatttttgaattttttttatgtgtgcttattttgatgttattttaggatatttctcttcaagtttctatttaccacctaaaaatgcgtctcttttattatttttgatgttgtcatagttatttcagaacagtccagacttaaatgtttatgtgataattattttcttgaactttgactaaacttttttaagtatggaaatagtcaaatagatagagaaaaacgtattacgcattaatgtagcactaggaaaaggaaaacaaacaagaaaaaaatctatgaattaagttaattgctataattttaacaaggtgagaaggtgcaaatcgtagtaatcaatgtagtcaaacccaaaaattttaacattcattcactttctttttatttttatttcttcttagatgtatacctatatatatatataaacacacactacataacaataaagcaaagaaaatagcttttcatttatcatctctaatttacaaaacattagtagctttcttttgttgtgatatacattgatcatggctaagatatcatgttcttatttactcatacttatgcttgctttgtcaggtaatttcatgttttccactttcaaacatctaagcatgtacaaatatatagtttcaggtcataacatatgggattttaccttttcagttttttcagttgttgagaaggctaagggagataagcgttgtagtataatcattgatctttctccatgttaccctattgaatgtcgtctatcatgcattaccgagcgcaatggagatggagaatgtgttgtatccaaagttggtagtactcctaattgtttgtgtacttatgattgttaacgagacaaatttttaagtattaatatattctagttaataaaataatttccttaatctatatgaataaattttttggaagttcttccaccttgttataattgaataatttaaattgaaaacattcagaagatttcagtcaccttactgttatttaaaacaaagatcatggtctggtcgagtgtaaaaataattaacggaagtttttaaatatatatagttacgctttaaatttgaagtaatcattacgctgataaaaaacattatatatttttaaaattaataatgggtttggatagtaaccattttaatagcaatacaattttgtacagttttgacaattaccaattataatttttttatcaaaagtgttataaaaagttttactctcagcttttttgtacaactttttttaacagttttgctattcggataaaactaacaactaaaaaaacttgtacagcttttggttatcaatcagaccaataaaattatattaatctgtatgaataaaacataaaagacccccatcatttttatagtgcttatgatgaatagattaaaaacaaatgtggaatatttcgactatttttttatttatttctatcgtcttttttttttgcatcatcattcgtaaagtttttggatgcttttaactttttacaacaatataatgtacgtacacaaatgattttaaacattttacaagataacctaatgtatacaatggacgaatctatacacgatcggtccaaacatatatgatgcctaaagtccaacaaaaatttatcgtccttttaaaattaaaatataaaataattaaaaaattagacagtttgacaaccggtccaaacatatatgatgcctaaagtctaaaaaaatttatcgtccttttaaaattaaaatataaaattgtaagaaaattcagtttgaatatcaaactcgtgaccttttataactaattagatgagtatctgcactacgtgcggggttatatattattatttacaaattattttatataatgtctgtttatataaagtaaagttgaatccatcggttttgaaacataaatataatttgtaattgtttttgaaaagtccaactatattagttcatctgaaaaacgaatgtgtttgagttgtttttattgttgttctagattctcagtttttttatatatatatatccttgttttttttgttatatgtttagattgtgagacggtaaaattttatttcttacactaaaaatataacatgtctttattaaccatgtctctgcatattcaatctaatcatattcaacttgatgtttttggaaagtttagttaagttcttgtcataatcttatatcttacgtattagttataaggatagctcctcaaacatctttcaaattacttgttttcttatcataaatttcgaaaaacttagatatatttaatctgcatattcatttagtttatttcataataaacgtctaatttttaggtaaggaatatgtgtagcatgtttggattttatgatcactttagccactaagtggatctcaaaattaaaaagaatatattgaattaaaaagatatagaaagaatgatggttcaagttctgactaattatactctcatattttagttgttatgttgaattaattactaattatgtattagttattttatgaagtctaggtggcaagctctcatgtgctgatgtgtcaagttgtgggagagagttaaccttctttcatatatatgattaaaacatcaaccactagatttttatatgattgtgatgccccttaaaactttgatatatttagcgccttggatttatagatcacatgtaactggattctgaaagctaaagtcgtgagtttttgtgtagaatttttataaaaaacaactttaagaactttaccccacacacaagctttagaaatcattacaacgcttgattagtgttgttgtagtcaacatatgtcattatatgattaagtataagaactagatatgcaacgagattcagaaagttaagtcgtatatgtatttgtgtagaagctccaaaaaaacttctataacatcacccccatccacaaagctaagtaatcatacaacaattcaatcattaagcatcaattcaatccatatcatatatatttatgcataagtctacacttagctaatatctcatctagaagctaacatttaggcaaccaaatcaatcaaaaactctagatctacaaacgaaagaaaataaacaacaatcaatcttgtttagatgagttccatgaactacatgtaaccacatgaaacacataaccctaattcacattggtctggatgaacgagaaatcgctacccttgaccaacccgatctcgatctgcctaagctttctctgactcgtactaatgatggatataagcttcagaccaaaaaaaaattagaaaaatattctaaaaatattctaaaaataataaaagactaagggcgggtaacacataccgattatccgactaacttgactcttagctatccgactaatgataccgaccaccacagtttctctgacgaagcttaacgacctaattagtttgcttatacgtttaagttataataaaatgatgcatgaaaaacagtattgtttgtataaaaatcaaataatataaaaaatcatataaaagacaaaaaaaaaaatagactaagaatatcaaaaacttacaccttattacaaactgtacacaatcaatcataattttataactaaaaaacaacaaaaagtattatatacaacaaattcatcggtttatacaaaaagaacaaattattaatcttgcagtatatattgaattatacgtcttttaaataaaagtattataaaaaagaaaaataacaaaatgatatttagttttacaggatgggttatatggtaggacagattttgggtcgaaattagtttgagactgtataccatgggtaaattcttaaaattaacaatcaaaatacaatttatacaatcttaaacactagacaaaacaactataatttaaaattttgattataaaagatcgacccccagtgtatccacaatcaaacataagtttataccaattaaattaaaatacaacaatatcataagtttataacaaaaaagatatatatatatcatccggtgtacctttggtcaaatcctgttattatgtaagtaagctaaacttttgatattattaatttgtcttaaacgtcatactcaaacacgacgattacacttaaatcccccattaatctttgatattaatatatatatatatatatatatatatatatatatatatatataattacatattgttatttacgttattatttgttttacgattatatttattttgggtttttatgcaaataaaagggtactacccatatttaagttccaaaattgaaaaatattatcaattaattgaaatttgccactattttgcaaatcacaattatacaatatgtcaagctctattaataatttttttttttttcagtcgaatacggataaagaatttagaaaatattttaatatattaacaaaaataatcaatagaattaagattaatagtttaatatattgaaatttccgttataggaaaaggaattctcaccttttttatataattttttttaacttatgcatatatttttttctgatagagttatacagcttttcttatatttatctttaaatatattaataaatttagatttgagacatgatgatatcgtgatcacatgagttagcaacttgtaaaattcaacttataataagatggtcacattaaataaaaacacatgtatgattagaaatttccattttacaacctaaattatatgtctcttttataacaataataataatgcgtctgttaaaaaaaaaagcgtcttttacattttataacccttggtcttctctaacttgctaaattgagtgctaaaacaatattcgagaagcattcttgtactcaccaaaatcttcacatttcttttgtttacaaataaacgtactaacaattcaacctggaaatgttctgaaagaccattagctaaacccaaaaatatatgcacgaacatagatcattactttggtagttacaacttacaacttagtagcataataatttaataaagtactactggttacaactttaaaaaggaaaaggacatcttttactttattaggacagctttttgagttgtaaatttagagcccaacattggattcctcttctttgaccattcctctctacctgaataacccgttaatctctctctgtccctttcttcttcttttttcaagaacaataaaaaaatgtctcaagattctgcaactactactccgccgccacctttaacctccgacgtttcaatgccttccggtgaagaagatgagccaaagcatgtaacatcggaagaagaggcaccggtgacttcggagacaaatctgaagctacctttgatgccggagctagaggagtcaaatcatacggcggaggttgtttcagagaaggtgacgccggagacgatgactttggagtcagaaggtctcaaccacgcggcggaggattcagagcagacacatgaagtgacgccggagacagagactgcgaagctagaggttctcaaccacacggcggaggattcagagcagacacatgaagtgacgccggagaaagagactgtgaaatcagagtttctcaaccacgtggcggaggattcagagcagacacatgaagtgacgccggagacagagactgtgaagtcagaggttctcaaccatgcggcggaggattcagagcagccacgtggagtgacaccgacgccggagacagaaacatcggaggcagacacgtcattgcttgtaacttccgagacagaagagcctaaccatgcggcggaggattattcagagacagagccatcacagaaactaatgttggagcagaggagaaagtacatggaagtagaagattggacagagccagaactaccagatgaagcggtgttagaagctgcagcgtcagtccctgagccaaagcaaccagagcctcagacaccaccaccaccaccatctactactacttccactgttgcatctagatctttagccgaaatgatgaacagagaagaagcagaagtagaagagaaacaaaagattcagattcctcgtagtctcggttcattcaaagaagaaacaaacaaaatctccgatctttcagaaacagagttaaacgcacttcaagagcttcgtcaccttcttcaagtatcacaagattcaagcaaaacctctatatggggtgtgccacttctcaaagacgacagaaccgacgtcgttttgttaaagtttctaagagcaagagactttaaacctcaagaagcttactcaatgctaaacaagacactccaatggagaatcgacttcaacatcgaagagcttctagacgaaaacctcggtgacgatttagacaaagttgtgttcatgcaaggacaagacaaggagaatcatcctgtctgttacaatgtctacggtgagtttcagaacaaagatctttatcagaaaacgttttcagatgaagagaagagagaacggttcttgagatggaggattcagtttcttgaaaagagtatcaggaatcttgattttgtagctggtggtgtttccacgatatgtcaagtaaatgatcttaagaattc

SEQ ID NO: 555 - DNA, 83078 bp, Arabidopsis thaliana
tagcacaaacagaaacaagaattacaattaagaacaggcaggaaaagacactttacccatgactaatgctgcgagacatggaaatcttttcaatttccctttcttttttaaccctcaatgattcttcaaaatgctgaaataaaggtggatcagataatagaatattgtatcagaaaaatatgccacatacatgcaaatatggacatatgtgagagatgcatattattctgcttactcaatagttattctccgactatgcaagaaaagaaaagtacgaccttacctcaaagtcaaaagaaaacgcaatctgtccgccgaaattgacagtgacagcttcgttttggctatgcaaaacaattgtcgggtatacaggacgcctaaattgcctggggattgtccctacgatagttccatttttcctataatcaaagaagtagtcatagatgtcagcaagtaaaacatacgcagggacatgtcaaaaacattgtgacatgaagaaatgaattgtgtatcttgatatctacttttccaattgtaatgaaacatgttcagatagggaaacagttattacttacgtgaaaaagaattcttgtgaaaccgagtctataccgcaaccaactaaatcacctgttgtataggtgtcactggctttagcaacagttcgatcaccatctccattttgagagcatatgagtccactgttaccaatgtaggcacagcttctgacagtatatctaacattacagagaaacatgaaacagtgaattggaatgcttaattactgaaaggtgaaaacatctaacaaagcaaatctcccattaacttgtaagataccagatctaacagccaacacaatcaaattgagcagcaaatcacataacctatttccaagtaacgaatccaaaccattgaaacagtgatttgaactactgatctaccattgtatctaaacctatttcccaatttgttctctcagtctcaggtaccaaatcaaacagaatcaatgattgtattgagtatcaaatcacgcaataagtggtaaatgcgaattgaaagggaaagaaaacgatacccttcgctatagatgtgttccttggagaaaccaatcgcgatctctcctttttcaccagcattcatgatatgaacctcgaagtagtaagcaagacagttagtcggcgccggattttcagtctgaagaactacgccgtcgtgatcagggcccgtgtattgaccggagagcccatcgggagaaacaaaggtaaattcgtctgaaccaccgaccgtgtatagcgccgttggccgcaattcttcttcctcttcgttttcctccatagcttctctctggtcagaatcccccaattcgtccgaatctattgaatcgtagagaaagaaaccctagaaatgcgattgaaatgaaacccccaaatgttgttgaagggcatcaaaaaccacttcgcgcccaatgttgtgtttgccaacaataaatacgattaaaccagatattttttagttaaccggtaaatcaaataaccgtatattattaagtaaatagatgaaactcggtatattattaagtaaccatttctatgtttttttctcttttggtttttactttttagagtgcttttggggtgaatttacaccttatgtgaacactgtttattaatgtttattaatgtttttcaatatcaattatacaataaaaatttattaacataaacttttctctctcggttctagggatggtattctcatgtgatctcttacttccaaatgatgccatgcttctttattcagatccggaaatcagtactatgacgaaggatatggagctcctccatcacacaagcctccttctaactgtggaagtccaccttacgaccctgctccttcaacttcatcacacattgatatggggcttgcttgttccctgtggcactgttggaggaggttttggtacagtcagtactcccagtagcattccagagtttgatcatcacatgaaccttcttcaggcactttccagacacccgcaccgatcccattcgtgctctcttccgtcaaggtacaactttgttggggtcggattcccccacaagcaagaccgagccaaacagtctaagaataacaatcacctcatggttaaacatatgattggcccctagcctagaacaaagcacctcgggaccttattcgatcgaccgtcccgaagagagtttgtaaaatggctcgggtgttaatcatatgaacacagcccgaaccaatcgtgagaacgctgcgggaaacatctatatcggctcgggagacagccaactgagcttaatggacagtcatcaagcgcgccccgagccggtacataccgtttgccccgaagccacctctcaaacgaccaccgagccgtgaagaacacgcgaggcaaagacttgtaaaaaccattcattctccaaggatcatttccggtaaaatgggatcttttatgggactttcagaaatgataaaggagaatctttgaagataatgtcgaaatcaggaaatctccccaaaacctccgaagaataaggagaatatccttaggacgattatcctctagaaccgacctaaggataaataagaatcttccgaagaatatcgctagggaggcggtttaaggatcctatataaagtgccttagggacttcacaaaaagggggagatcttgggatattcacaagaaacatagaactttatacctattgaaaactacgaatggcttgatcccttcacagggtacgtaggcaatccatcatggatgcagctatacctttttaaaactctaattctttttctgttcttgagcaaaaccctaatgtatttcataagagattagaacccctcttgtaatcgagtcttggatagaatacctaatgaagagaaattactagatttgttttccctctctaaacaaatctattgtgtgaatccttggttcaacaaacttcttggttaaactccatgaccatggtcaacactaagttccctttcacaacacccgcagctattagatactatatatactataaacagtttaagattcgtatttgaagccatctcgaatataaatctatgtttatgactagtctgttttataaacgatccgtcaagtcctttgaagccagctttttaggtaagggagagagatagaataactaagataagcaaaacaaagattaggacgtatatgcattgccgaatagtgagataagtagacaaagaatgagcaactgttttttttttttttggttcttcggtcacacaccaaacaaacttcaaaatgaattcttatgtagctttataggaaccataccatggtggagaataaaagcctaaccagtaaaccaacatttgaaaacaaaaaccctctcttgttattagtactacctaggggtccaatattgtcatgaataagaaaatccctaaatcataagagcaaggctaaaaactcccccctcactcaaaatactcactaggaagaaatggtcatcatgttcttgcgacagatcagttatatatcactatatatgttcccttttgcagagccgttagttgctgaaagggaagaagaatcattctggtcggtatatgagctggccagtggaaaaatcattcatgcgtggatacacatagactgttttttcatccagttgattctgagtccaaattgcatgcagaaacttaaggattatttgtcaagtctcgacatgtatgaccctttataccttaataagttgttaagtacgacatgcttacactatttgtgtatattaactttcttttattatttgttagcaaaaaatcgttggaaaatggaatagacgaggttgatttctacggagttttcatgaccgaaagaaagttatggccagattcaaattatggatggttgggtgatgaagtaagttattgttatattctgtctgaggttgtctattttatggctgagttatcgtgttgtttaggctgagttaaataaattatagctggtttattctggtgtgcagactgagttgtagttggttatgtctaagttatggtattgttctgcctgagttaaagtagataatggtgagttaatgttgttgttttttttgtctgggttggttttatttttgtacagcatattgctgcgtatatgaaagtcctcgcccggaggctccagcgagatccctgcccataccacaacgaacgcgtcataattctagacccgtggttcacgatttattaggttacagattacaatcagttcaagatctaacagaagagtttttttttcaaagacaccgcgtatcaatagtggattaacggtatgagaagagaagtggcaacacggaagaagttgataacagatgtggatcacttgtatattatccaccaaaccggaggtaatcattgggtgacccttcacgtgaacttgcttaggtctcacatcgattgctatgattgcatcgtcggagagcatacagacgatatcgatggaaagatgctggaagtttgtaggccgttcacgaggatgattccacagatgattaacgaactgtttccttccgaagtccgtaccccgcaatacgaccaattttcattccggcggagggacaagaaaaaggtcccgcaaaatcatatcagaggggactgcggcgtttacgcgttaaagattcttgaatatttattgcttggtgtttgttttgatggcattactgatgcaaatatccaggttctacgggttagggtggcagcaaagatcttcgatgaagcaccggaaaggatgcctgcacgttttctagagacgtgattggctttttcgaacatatgttcgtgtcttttgggatttttagcatgtgattgtactaaatattgacgctttaggattagaattatgtttgtatgaatctatgatattgaatgcacactgttaattatgggttaaatcgatgtaatggctgacttatcatcgctcaattcgtgttatagctgagttatcgtagattaattcgatgattagctgagttattctaacgtggtggctgacttgtcatcgcacaaataatgtcatggctgagttattctaatataacggctgacttatcatgcattaattcgatgttgcggctgagttagtctaacgtggtggctgacttgtcatacccaaacgtcgctgttatcaaagaacccaaacatcactagaggactatacatacaccggttgaccttcttataaatataactcaatagtcaagaacccaaaccttgctgatatcaaataactcaataatcgcaggtcctgccatttgagctggtagtggtggcggtggaggtggtggctgttgttgctgaggtagaacattttcttctggttgttgagctgttggtgctggtgctggtgctgcctgaggaattcggttcattaactcttcaaacattcctctgatcccctgaatctgtcctaatagtgatgcattgatagctgcctaatctccaactggaatatcacctactagtggttgagcttccccgtcagcgggtgcatcatcaacacggttagccctttggttcgcaacacgtcctcttttccttaagggtgccattttgaccaaacaaacatcaatatcagaacaatcacaataattcctaataacataagtaatgctcaagtcttgcttcttctggttttttttttttctttttctttttttttataaaaaacaatccattcccattttgaaatcacttttaaaaaatttactctaccataaaacatcttaacataatcaatcatagtctcccggatcagcaccggtttgactttaacctccgctctgataccaaaattgtaacactcctctcccaaactacagagaaggcgtgccacttttcctataaaacattatttcatactcattatctatccttaacacattcacattcaccttattcaagaagtatttttattaaattcataaaagttacttgtcttaagcaacattgaaaactcgtaaaaataactgaagaaatttaaaggaaaaccatgtctttgttttattgaaaagtaaactcaaatcccaaagaacaccatgaagagagacaaacttgagcagctattcaacatcattttcatctgggaaagaaggagaaaaagggggtgagtaaagaatactcagtgagcgaaacatagaacaatttcttaagttatacaacaatcatcataacacacaactttagatacaaacaatcaacttaaaaatactttcttttctaaagaacataatcaagagaaccatcttatgtatattaatataaacatacacatcgttaggtccagtcatcctcgtgacgactagaacaataggtggaggctggccctcgtggctcagacactcccattccgggctcgtcagccgttcttgaccagctgttaacccgtcagtccatcactgtctatacttaaatcattctcgtacatacatcatcatatttaacatttacttatatatcatagcattaccaaacattacaatcattcattatcatcatacctaacatttactctcaatcataacatcatataatctaatcctaatcaatcaaatccaagcctatatgctacaagtcatggagcataccaaaagaaaatgataccatccttcgtggataccaccctcacctcaattgattggaaacaacgactagaaagctggaattgcaatttggaaactgtgactgcgttctggaaattgcagctgaagaaacagattcaaacaacaaataagggtttctgggtttaagcagaacgactcattcttggccaacaagcaagcgcttccatggctatggattaccttttccaattgatctgaaggttccagtggcttccctgacacttcctctgtcagaaaccaccgtcgttgggtctatcaatgctcctgagtgaccagaaacgcctcgtaaaacccttaagatgaaactgcaatgttcctgacacttaatatttttttgagttcaggaaaattgtgatttttcacttgtaagtcattttgcgaatgaagcttaccttggatcgtgagaacgaaacttgctaattcttgctctcctcgagatctttccaacgacaccaaattcacaatttgattccttcagatccgacgggaaatagatccttaaaacctctaccagaaactgcaaagtttcagatacttggaaaaatatggctctgaaaactgtgactaattatcaactttaaacgtgatttgccgatcgatcttacctccgattttggatccaaaaattgttctgaaaacttggaaacaagatcaattcagaaacgttaagaactagcccaaactccttcggacgtgatgagaaacggatcaccaattctaccacttgaactgtttccttatttcacatgttcacacaaaaatccaatagttgaagttataatccacaaatccaattgctaagtggaataatttcagtagtgtagttcatagccatgagaggttttccttacctaacaatccggtgatgaacggcgacgaaaccaaccacgttaaacaatcatgaccccaacgtgacgtcaactccggtgtcacaacgatgatgataatggctgagattgagatgagagataaagaagtgatggtgatgaagacgatgtgagaagaagctgcgtgaagagggagatatatacatatgtacatacacacgcttagggttttgtgtgttacttgggttggttgggaccctcttgggcttgggcctcacaataccaatacgttacgactgatttatgctagaagattttgtggtttgaccgagttataagaaaccagatgttattatgagatttcaaactagccaccaaattgttggttctattagtttcaagatctataatatgaaaacaaaaaataaattgggttttcggtaagtgtcgattgacaaactatgttgaccaaacttctaggaatgatgttgttgggtatgatgttggataaagtatatagaatattagatagtttcatgattccactagttggaatgtgattatgatatgttaattacttgattgtaccaactgatggcttaaggaaagcactttcagggtttgaccgagttataatagtcacacagcttagttatgactgcttcacgactgagttatctcaaaatacagagataaagggtctccgttattgaccagatacgacgtcggttgtgaaagagtctctgttattgaccagatacgacgacgttgtgacataaacaaaagatccccacttataaatccccaaaatcaaaccctaagtttgaaaattccaatttctggtttcaaatctggatcggggccttattggttccaatccactctagtaatatattattttccgaaaaatgctcaaacgacgtagtttaataacttatatacatacttatacggtttgcaaaatctatacacgcccaaggattatataaaatctatgcacgtggttatattgcgggtgacttttgatatcagagtattgacctacatgtattttatatgaaaggttatgttgcaagaacaatatttttgagggttgttggcacaaaaccctaaaatatttgttagatttgggttagaagagtttgatcacaccactctgatgcattctctcatgttgaagatatacacaacacattttctaaacaaaaattgtagttttaaggattttatttttttataatatatgtatcaagtatatgaattgatatagaaactatatataagtacataaattattcgatgtagccaattacttcaaaaattgataaaatgatctcaaacacattttttaatatagcaaagttctctttctccatctcttgctactcaatcatttttgttgtatctactttatcatctattcgcataaatttgtacataaccacttgttcttaaagattatttttcattacattcgaaaacattgtcgctaacacatcctgcctaactcttttaaaccttcaaatatgtattaaaaaaaagaaagacaagttttccacgtgatgaaagtttgctccattttttttttttgcttgcttatgacgcatgggaggcaaaagaagttatatatagtctccacaaatttgtaactctaattatacagaagaacttatatatagtctccattttttttgcttgcttatgacgcatggaagctagaatattcgctgcatttttaggtgttattgagccttcacttattattattttaatgcccaattagataaaatatttgttagatgtgggttagaaagacacaatggttttatctcacaccaccaatgatgcattctctcatgttgaagatataattaacacactttcacagcaaaaaagttagtctatagtttttttattttattaatatatgtatcaagtatagagggtttttgttaagaacaatcgactataaaaaaaaaaaccaatcaaaatataagttgcaagtttcaaagtgtatccaaccctttgttttaaatgatttgagtttttatgattttgttgatcttaagtgaatttagagtagttattatgatttgtttgaaaatcttcccaaattccatttaaatcatgttatttagatttatgtgttttcaactaaagaaatcttcaaaattatcttaaatcctcaaaagagatatgatggaggatgttgtgttttattccaagtcacatacaacctctcacaaacctatatttgatagtaattaggatctagatatatgaaaactcatgattgtatgatgaatcgatgtagaaactataggcatgattacacataaattgtacaatgtagtcagttacttcaaaatttgaaaaagtgatcgcaaacacattggtcaatggaacaaagttccctttttctatctccttctcatcaatcatttttgttgtatctattatatcatctattcacataattgtgtatctaaccacttgttcctagatattacttctcatcacattcaaaatcattgccgctaacacatgttgcccaactctttataccttcaaatattttctactaacattttacggattctgatacggatattttgatgtttatccgagtttcacatatccaaaaagtatagattcagataatttcataacttatatattattgtccacatctaaaaaccacatagtaaatgacctggaaagaacaaattagggttctaaaaaggtaaaacaatggagcggttatatatgggaaagtccagagaataaaaacaattttcaaatgatgataagaataacatatttcaattagaagagtgataatatgaaataataaacaatggaacatacgaaattatataaaaagatattaaattcatagagattggattaataaaattcatctaattttactttaaacatgattagcaaactttagtattaatagaactaggttttgaacccaagctacacgttggtttcttctacatcttttgtaaacgttcaatatgactaataacaattattaaaatattatctttcaaaaattagtgtttggaataacatacatctagtaaatcaacaaattacagcaatattaatttctatatattttaattactgcttgtttttctccttcaaccaaacattaataagaaaaccaccccatgaatggaacgaattatttttaatacataatttggaaaattgtattgtcgatataaaaaattaattgttagtaatggtaaatgatttatattttataatacactagataatgtccgcctaaaaacgggtataagaaataaatataatattatatcgattatatagaaaaattctttctaatgccctttcatgataaccattttcaactctaccctttttctttagccattttcatttctaccctcttcaaatttttaatgaccattttacccttatttagatattgttttaggttaacaaaatgaaatattaatatttttatccaaaatattctaaaaaaaaattcccgccaaaaaaattttccaccaaaaaatttcgaaaaaagatttcccgcaaagttttttttttcaaaaatatattttttgcaaaaacattttttggcgggaaatagatttacaagggattttaaaagggttttaagagatttacaagggattttaaaagggtttgaaaagatttacaagggttttaaaagatttacaagggattttaaagggctttaaaagatttataaaggttttttaaagacttttaaaatggttttaaaatatttacaagtgattttaaaaggttttaaaaaaattgacaagagtttttataaggtcttcttgtaaattctttaaaaatcttttaaaaacccttgtacatcttttaaaacccttttaaacccttttaaaatctcttttaaatcttttaaaatctcttataaatcttttaaaatacttttaaaccctttaaaaatctttgtaaatcttttaaagccctttaaaatcccttgtaaatatttaaaaactattttaaaatcccttgtaaatattttaaaacacttttaaaccctttaaaaatctttaaaaaacctttgtaaatctttcaaaacccttttaaaatccattgtaaatattttaaaatccttttaaaatatcttgtaaatctatttcccaccaaaacaaatttacaaggatttttaaaagtattttttattgctgagaaaaaatttgttacgaaaaaaagttttggcgggaaatttattttttttggcgggaaaaaagttttgcggaaattttttttttggcgccaaaaatttggcaggaaaatttcagttgtcaattacatgttcctactagttgagggtaatttggtcattctgtttaatgaaagggctatttttaaaaatggacaacacaaaagggtattgttgcaagagggtagtaaaaaaaggtagttttgcaaatctcccgattatatttgaattctaaatagtaatatatgttttcgttaacatttaatttaatacttttttcaaaccaaattttaatcttacacattccatttttctatacaatttaactatttatttcataacaataaaatgcattttaattctacacactatatcttatcgataaattttgaattataaatagtattttgctcacttttatatatttattttagtacttttatttaaaacagaattcaaatcttacacattccattagcaaatacaatttaactctttgtttaatcatgataaacttgattttgaatctacatacctaatcttaataaataaatggtaaaagcatttctcatacgataacagatttgtatcttagttaacattagggtatcagggttttctgcaaaacaacccttcaagtcaatttcgtttgcaagttttcatccaagtccgaattatgcaagtcaatctcacaatctcaaaagtcacccgcaatacagtcctcccatgtagcgatgacatggcactcgataactctcttttaaaacataaggcttttgtgcaaaaaaaacctcaatttaatttattttttttgcaagacaaacctccatgtcaaatacatacaagtcaaaccacaatctgaaaaatctcctacaacatagcccttctgtgtatcgataacatgacggtcgataactcattttagagcatgttcaatgggtagagattttatttatttaaggtgcaatgtgcaatgggtaaagattaaaacttaaataaatgaaaaccgtaactaaccaaaatattatcatattcgttgtgttttttttttctttcaaaataactaaaattaaccaaatttaacccaaattaacaaaaataataattcaaagaggaaaatattagaaaaaattaattattaaagaaattaatatctctatatatatactcaacaagcttaaactgaattttaaattgagtgaagtaatttatatatatcaatcgtcaatatatacgctcggactaatccatggtctaaaataaaatcctgtccgtccaacttaccacgtcaacaattttgtttagcgagaagctaacaacaacatgtcattaaaatttgtagccaattaaattacaaaagttagtatgaacagctcaatatttgccgatttgtagatacatacttgcaaataaaaattctcaagctccaataaagtctcgtatatagttgtgaatcaagttaaagtatgatcgctagttttagaacgttggagcttacacaaaggctctatcaagagaaaagagaaaaaggaaaaaaaaaaaagaaaaaaaaaagtcaagatttcattcacgagcatagagtgagcaggtggctccaaactctctaagcactcttgagtaatctccttcccacaacagctcttgacagctctaccacaccttatcaagttttgtttggcaaagcaccagattattcagctttgagaacgtttggatgtgcctgcttccctacactttgtgcttatgctcgcaataaatttgatccgaggtctctcaagtgtatctttctcggttacacggataagtataagggttaccgctgcttctatcctccaactagacgagtgtatctaagtcgccatgtcgtgtttgatgaaggctcttttcctttcattgatacttacactggcctgcagcattcttccccaactccgatgtttgacgcttggttaaaaggcttctcaagctcttcagttccattggaaaaggaacaaactgatggctctaatactggtacaaacgtccctgtcatcacagaaaatcaacaacataacctttcattagagtgcagtcctgctattataattacagagggggagacaacacctcataacaacaatcaagacataccaagtgaaccggtctgtgttacaccattgcgaatcattccttctcaagataatgctgaagaaattgaaactctgtctacgggaaatgaggagtgttctgagtgtacggcaagctccgatcttgatcctattggcaacagcgctctctcatcatcctctaggcatgaacaaccaaccttcagtattcttcattcagctacagaatccactcatcctatgaccacgagattaaagaaaggaattatcaaaccaaatcaacggtatgctcttctcacacacaaagcttcatatcctatgtctaaaacagtaattgcagctatggtagaggaaatgggaaattgctctgaaacacacacttggtcacttgttcctcttacaccaaagatgcatgtgctaggctccaaatgggttttcaggatcaaactcaatgcagatggctcattagataagtacaaagctcgactagtttctcaaggcttcaaacaagaagaaggaatagactacctcgagacatatagtccggtagttcgatctgcaaccgtccgagctgtgcttcatctagctactatcatgcaatgggaactcaaacaaatggatgtcaaaaacgtctttcttcatggagatctcactgaaacggtctacatgagaaaaccagcaagattcattgacaatgctcatcctgatcatgtttgcttattacataaagctctctatggcttaaacaagctccaagggcttggtttgacatattcagcaaattcctactcaattttggttttacctgcagtatgtctgacccttctctctttgtctacgtaaagaacaaggatgtgatcatgcttcttctatacgttgatgatatggtcatcacaggaaatagctcaaaacttctctccagtcttcttaatgagctcaataagcagttcaagatgaaagatttgggcagactcagttattttcttggtattcaggcgcaatttcatccaaaaggtctttttctctctcaacagaaatatgcagaagatcttctagctacaactgcaatatccaactgttctcctgttgcaacaccattgccacttcaacctgagagagcacctaatcaaaccgagcccttcgacaatccatcatatttcagaagtttggctggtaagctgcactacctcacacttactagaccggacctccaattctctgttaattacgtgtgccaaaagatgcacgcccctacagtgtcggattttcttctcctcaaaaggattctccggtacatcagaggaacaacaaccatgggaatttcattcaacaaggacacagattgtcaactgcgagcttacagtgacagtgatcacgccggttgtcatggtacacgtcgctccaccggtggcttctgtacatttcttgtcaacaatctaatctcctggtcttctcgaaagcaagtctcagtcgccaaaagctcaaccgaagctgaatatcgctctatgtccgatacagcctcggaaatcacatggctagtcaatttacttcgtgatctgggtgttccgcagttacagctccccgaactcttctgcgacaacctctctgccgtttaccttacagcgaatccatcgtttcatgctcggacaaagcattttgcaactcactatcattatgtccgagagcaggtagcttttggtgagctcatcgtccatcatatcccgggttatctacagctcgctgacatatttacaaagtctctcgttaaggctcctttcgaatctctccgattcaaacttggtgtcgatttcccacctcctccaagtttgagggggagtatcaacagaacagctccaaacgacacagttttggaattgggctcaaaaccattaaagcccaatccgaaacaagtgcccaatccaagagccaagcccaacatagtgcaacgacaacctgcaacaacaaaggacaaaagcagaaaagttgcagagcggtccttatctccacgcagtacggaagtaacgacgaggaatcgctatgaggctcttgaatcatgtgaagacaacgacgccacataacagccaagtgacagctatgcaaatcaagaagacactaggttaaatcaatctagatgtataaatagacatagcttgtaatcacaaaggcttaagttgaaagcaataaacaaaagactttcgatttcatattttaacttacagctaacaacaacatgtcattaaaatttgtagccgattaaattatcaaaattagtatgagcagctcaatatttgccgatttgtagataaatacttgtaaataaaaattttcaagctccaatataatctcgtatatagttgtgaatcaagttaaagtatgatcgctagttttagaacatttgagcttacacaatgactctatcaagagaaaagataaaaagaaaaacagaaaaagtcaagattttattcacgagcatagagtgagcaggtggcttcaaactgtctaagcactcgctcaagtgaagcagattgctggtctctggtggccggatttgtagatagaatcgcttcactgactgcagctgctactatgttcttctgtgtttctcctagaagatatgcagcacctgattcttctatagtttcacactcgaacaaagcagagcaatcctgaaatagagaaaaacaaaactattagtgactcaaatatgagaaacctaatctaacagttagagaatcactacatacatcgaaaaggttttttagtaggcttgaatccctaaagtctttaaaatcttgatttccaaatgacttagcctctgctattgctcctttctgcattgtagttagttagagaaacacaccatggatatgtgtaacaaatatacaaggaataaagaacatacccgtactaattcgacaatcttttgacagataagaagaaaataagcttctgatccaccctgcatatgatacaagcagcttgttaaaatagttcaaggaatgttaacaatgtgaatcactcgatatattaactagttactcagcccacctcaataagttggggatatctatccttgagtgcagcaatagcatcatcaatctcagcagtcattataagctttaacaaacagaatgcatggatcagttcgatatgaaacagaaaagatgtagcaatgtagcttgcttttggttgattttgtacctcacagaaaaaaaataaaaaaaaaattacagcaagataaccatagcagtgaaaagtacctctctgagctttttcctttgatgcaattcatactcatcaaaactattttcttgtgcaataacagtatgacgacttgcagccaggttaaaagctctaaagctatcttcatatccataacgaagaaggtaggtttttacaagcctggaaaaaggaagctttagcacaaacagaaacaagaattacaattaagaacaggcaggaaaagacactttacccatgactaatgctgcgagacatggaaatcttttcaatttccctttcttttttaaccctcaatgattcttcaaaatgctgaaataaaggtggatcagataatagaatattgtatcagaaaaatatgccacatacatgcaaatatggacatatgtgagagatgcatattattctgcttactcaatagttattctccgactatgcaagaaaagaaaagtacgaccttacctcaaagtcaaaagaaaacgcaatctgtccgccgaaattgacagtgacagcttcgttttggctatgcaaaacaattgtcgggtatacaggacgcctaaattgcctggggattgtccctacgatagttccatttttcctataatcaaagaagtagtcatagatgtcagcaagtaaaacatacgcagggacatgtcaaaaacattgtgacatgaagaaatgaattgtgtatcttgatatctacttttccaattgtaatgaaacatgttcagatagggaaacagttattacttacgtgaaaaagaattcttgtgaaaccgagtctataccgcaaccaactaaatcacctgttgtataggtgtcactggctttagcaacagttcgatcaccatctccattttgagagcatatgagtccactgttaccaatgtaggcacagcttctgacagtatatctaacattacagagaaacatgaaacagtgaattggaatgcttaattactgaaaggtgaaaacatctaacaaagcaaatctcccattaacttgtaagataccagatctaacagccaacacaatcaaattgagcagcaaatcacataacctatttccaagtaacgaatccaaaccattgaaacagtgatttgaactactgatctaccattgtatctaaacctatttcccaatttgttctctcagtctcaggtaccaaatcaaacagaatcaatgattgtattgagtatcaaatcacgcaataagtggtaaatgcgaattgaaagggaaagaaaacgatacccttcgctatagatgtgttccttggagaaaccaatcgcgatctctcctttttcaccagcattcatgatatgaacctcgaagtagtaagcaagacagttagtcggcgccggattttcagtctgaagaactacgccgtcgtgatcagggcccgtgtattgaccggagagcccatcgggagaaacaaaggtaaattcgtctgaaccaccgaccgtgtatagcgccgttggccgcaattcttcttcctcttcgttttcctccatagcttctctctggtcagaatcccccaattcgtccgaatctattgaatcgtagagaaagaaaccctagaaatgcgattgaaatgaaacccccaaatgttgttgaagggcatcaaaaaccacttcgcgcccaatgttgtgtttgccaacaataaatacgattaaaccagatattttttagttaaccggtaaatcaaataaccgtatattattaagtaaatagatgaaactcggtatattattaagtaaccatttctatgtttttttctcttttggtttttactttttagagtgcttttggggtgaatttacaccttatgtgaacactgtttattaatgtttttcaatatcaattatacaataaaaatttattaacataaacttttctctctcggttctagggatggtattctcatgtgatctcttacttccaaatgatgccatgcttctttattcagatccggaaatcagtactatgacgaaggatatggagctcctccatcacacaagcctccttctaactgtggaagtccaccttacgaccctgctccttcaacttcatcacacattgatatggggcttgcttgttccctgtggcactgttggaggaggttttggtacagtcagtactcccagtagcattccagagtttgatcatcacatgaaccttcttcaggcactttccagacacccgcaccgatcccattcgtgctctcttccgtcaaggtacaactttgttggggtcggattcccccacaagcaagaccgagccaaacagtctaagaataacaatcacctcatggttaaacatatgattggcccctagcctagaacaaagcacctcgggaccttattcgatcgaccgtcccgaagagagtttgtaaaatggctcgggtgttaatcatatgaacacagcccgaaccaatcgtgagaacgctgcgggaaacatctatatcggctcgggagacagccaactgagcttaatggacagtcatcaagcgcgccccgagccggtacataccgtttgccccgaagccacctctcaaacgaccaccgagccgtgaagaacacgcgaggcaaagacttgtaaaaaccattcattctccaaggatcatttccggtaaaatgggatcttttatgggactttcagaaatgataaaggagaatctttgaagataatgtcgaaatcaggaaatctccccaaaacctccgaagaataaggagaatatccttaggacgattatcctctagaaccgacctaaggataaataagaatcttccgaagaatatcgctagggaggcggtttaaggatcctatataaagtgccttagggacttcacaaaaagggggagatcttgggatattcacaagaaacatagaactttatacctattgaaaactacgaatggcttgatcccttcacagggtacgtaggcaatccatcatggatgcagctatacctttttaaaactctaattctttttctgttcttgagcaaaaccctaatgtatttcataagagattagaacccctcttataatcgagtcttggatagaatacctaatgaagagaaattactagatttgttttccctctctaaacaaatctattgtgtgaatccttggttcaacaaacttcttggttaaactccatgaccatggtcaacactaagttccctttcacaacacccgcagctattagatactatatatactataaacagtttaagattcgtatttgaagccatctcgaatataaatctatgtttatgactagtctgttttataaacgatccgtcaagtcctttgaagccagctttttaggtaagggagagagatagaataactaagataagcaaaacaaagattaggacgtatatgcattgccgaatagtgagataagtagacaaagaatgagcaactgtttttttttttttggttcttcggtcacacaccaaacaaacttcaaaatgaattcttatgtagctttataggaaccataccatggtggagaataaaagcctaaccagtaaaccaacatttgaaaacaaaaaccctctcttgttattagtactacctaggggtccaatattgtcatgaataagaaaatccctaaatcataagagcaaggctaaaaactcccccctcactcaaaatactcactaggaagaaatggtcatcatgttcttgcgacagatcagttatatatcactatatatgttcccttttgcagagccgttagttgctgaaagggaagaagaatcattctggtcggtatatgagctggccagtggaaaaatcattcatgcgtggatacacatagactgttttttcatccagttgattctgagtccaaatcagctccttcaacaagcgctccaattcaggacctgttgacaattcacaaaacataacatcatcatcatctcacttggtacattgacaaagtttcaagagctggaaatctgaaagacacatgagagcaactagggactgtaattatgacacttttggccatcataaacaactggttctgttttttggtagataagctcattatttttcaccatttttaaaagtattatgtattaatattaaagtgcatattagttccatcttgataaaatagtttgttctagtttattacatgaaagtgatatttcaggcctagacctcctacaaacttaggtaatcaaactgtcttccaaacacaataaaaacatgttgggattaaggaacttatcaaatcataacaaaatgtatttctcttgattaagaaaaatatgacctggagttctgctcatgaggtatttttattcaagaacattagatgactatatatgtaaccaatatagaagactaagctacacatttcagtgatgttcttgcgttagagtcaggtgttacttcactaccacgattttataaggaatttcttaaatcaagacaaaaacccctcaatgggattcaatgattcaaaaatcatcacaaaatttgcagaacttaagaaaagaaaaatgaagaaaactcttacaacgacatggtaagatcagcttcaaatctgaatgtgatttggtatgacagtcaagtctttcataagatcatatccaacttcatcaagtcgcctaatatcgtcaactgcaattcctccatgcataactaccctcatactgtttctcttgggatcaacatacaaaatacggaaccattgatataaaacccttccttcaacattaagtacataagctctgtaagatgtgtaaataaattcaccagtacgagtaacacccttcaacttccatctctctttgatgaattctcgatgtgaaggaaaatgtttatatatccattgtttgtgattatcagcatcctccaaaatccataagctaactccagaagcaatggaacttaccaaagctaatcttccctcataagatgaccaacatgtagctatgctacttttcttcggatgtttaatcaaactgaacttttcagatcttaaatcaaaactcattatggcaagctcttgtcttaaaccatcaccaaaagaaccttcatagtagatgactccatcaatgcattttgcataacctgtcactttgtaatgactaaggaaacctttagataatattctccatgattcttgagctcccaatgtaagaattccaatcttgtttcgttctttaagtatgcatagtactttatatttaccgttgattggatcatatcccaaaaatcccgttagtggtctgccttccttgctatcaagtttaggtaacgtgaagaagcttttcgtgatagggtttctgataaacatgacatttgtagaagtttccaagtaaatcaagccgtgaacggattcacaacgttgaagcttaccattattggggattgtatattgaaaattctccacgttaggacaagtcttcttctggtgtactggagaagcaaaaaaaaacagcttgtcgtgtttttggaagattagcagaacacaaggacgcgatgacaaggaccgtgtcacgaccgagctggtgaaatctggagtggtgatgattgaagaccagagcttagaaacggacctaaatctcacaatcgattttgctggcaggcttgagactatctccacgattagatctagaggaatatgctctctttgagatctattattatcatctgaaaactgtgttattctctggatttttcgcatctttgatggctccataggtttatttcttataaccctagcttgttcttcagtttgctccgatacttttttagatgcacttatcggtgttgaaagtatacttttacattttccttatttccatattttgttttttcaaaagcttatatttttcttgtttacatatattggttttttttttctttttctttctacgtgtattgacataaaaaaaattataaaatccaaacatgttaaatgataagatggctaatcacgtggatagtttcagaagcttatagcttcgactatattagatgaaaactcattcatcgtggttggaccagatcaacccattgacttgctagctgatccaaaaagactccaatttatcttcgaatctcgtttaaaccacatttgtagtatccaattagtacgtgtagtgttgaattcacgtataaaattgattgtacatttaaatgtgttttaaaactaggttcgaggtaacatttatatctttatttgttacttcctagacaaattaaaacgaaatagatcctgacccgcatatacgggcggggttttgatatgtaaagtataaaatctatatatatttgtattttaaatttattgttttattttctgtaataaaatcatataaaagtatttattaaataataatagcatattaaatttcagatatagttatttgcgggtgaattagatgatgaccctatgtggctatgtgcaggtgataacatacaaatatttgtgtttgcagaaaggtttagttaagaattgttttttttgtttgtttgtgaactatataatagtatagaaattataatattgagttgacaaagctaaattggtaaaatagcttttgtttattaaaataattcttggtgcacatatttattttctgtttgattagttattaaaaaagctaacgttttattccatcatttgtaattgttttattaaaaaaaatagtttggtgcataacaaataatttgaacagttgtagattttaggtgtgtaataattataacataatagtaattttttaaaaacaatattagattttaaaatgtgtaaattttaatttttagtaatacaacattattgtttataaattaatatttggtaattcagaaaaactgtacaccaaaagtttaattaagtgaagacgaatacattttatgtggccaaattacatgttacgtagagtcgtagtcattggcggaggcagaatttttgtttacgggagtcatttatatgtaactctatatatttatttatattgaacaatatatccaaagtataaattgttgttttatattttttcaaaaatattaaattttgtcatctaaaataaaccttaatatacttttttcgatcagaatgtatagtataatttagagattaattattgttgtgtttatcttgattcatgattttttaaaaatagatgttaaaaacaatattaaaaagaatataggaaaaaattataacaggatatctcaaaataaggagaaaaatgtatatgaaagattttacagatttaatccaacaaaaatggaaaaaacaaactaaggttatatggaaaatgaatatgtatggggtcaaatacagaaatccatcatatggcatgggggtcattctagaaacttaacattaaatatgtacctatcaatacataaacttaccttataatgaaaattttataaattttatgggggtcaactgacccccctccttctacactacctccgccactcgtagaccccaattagcaagcctctttaacatattttctttattcgtttgtttttatgtatttaatatattactgaatcttatcttatttgtttggacagatattgtttttacactcgagatattgtttcctgataagagttctactttatttagtttgtatatagatttcaactaattataaatgtaatgatgttcccaaaagatgaagataaagaaaggaaacaaattgatacgatcattagaaaccaatagatgtttttgaaaatgtaagcatgttataaacaaatatcaatgtattcatttcaggtgaagcatcatttgcgggtaatttaagaatatggtattaaggatatcaatcatctccttgattgattccaatcatatcttccatgtttgtaatattgtatatactcatattgattataagtgtgctcagcaagtctctcttgtgtatatatattgtaaatcgttgaatggaataaatcaatcacttctataaacctttatatggtatttctataaacctttatatatggaggaggcaatctcatttggtcattggatctattcagaaatctatatgtaaaaacatataggttagtggatcagaatatttacattttggttattggatatgcatatttaactactgatccaaaaatttaattgaagttacttcataatagagcaccttgttttggcctattatgttaaaatgaaagtagtagataatagtttggatggacaaaactttctgctattgtttgataatcattaatcacatgttaataacaaaacctagttttgccgtagtttgttaaaatgcaagtagtaaataagagattcaaagtacaaaactttagctgtttcaaacataaggtttagatttaaccatatatctttagaaaccgtaaacttttgaaaaacaaagtttagctttttttaatataaggttttagaatctggaaaaaggaaaacagtaaaataacacttatttcgagttgttattaagaacatagaatataatcaaatcaatgcaacagtaatttcttctcctcaaaacaatttgagtaacaccaacacgcttgaattaggagctataaaatgagtaagaaaggtatagatgtcgtttgctagcttaatgagtcttgaagagggtattagacatcctatatttataggaaaagagttcggctacggttacaacctattagatctaaagaatatgcttgcgaatcaatcttttgaatatatattttaggtaaattcttcatttgtgagctaatgaatatcctgtttatgtagaatttggattcttttggtaactgattgataacaaatttagaaatcaccttaactattgggatacgattgttttaataatatcttcttaattttggttttatggtattattttccagattgccaggatcaaaccaatgatcgttgtgaacttaagtaataataaattgttatgttttcaaccgtccagatcgatccataggatccgcgtgccgatccaaaaattaaacccaggatccgcgtgtatttccgaaccagtcgcccaagatccatgggtattttacgttggaagttatgattttacccttgaacgcttattttcatttactcatagattataattttgccaatggcattctatgtaatattttacactttatagggttatttaatatccagtgattcccaattaatagttaggatgttgaaacttttggatggtggcaaataaagctagaaatgctactcttaataagctgatatttatattcctttttccatcagaatctatctcttccaacaaaaacttagtccgtgaagtgaatttattcggactggatagatttaagatgttgaaaacatagtttattatatgaacataaggattatgagcaagaaggttggcataaagaccacgcttaatgttcggaacatttacatagtatatacactgtacacatagaccatagttttcagactcgtcgatgttatcttattctcgatcacgatcgccatagtttaggtatgtgacatacatgtaaacaacatgtgaataacaaatgctgatttggtttgattcgagccttttttacttcaattaatctggtgatggttgcttgatgattcagttgaagatgcaacctctgaaggagtttctgtactaagtcaaagtacctcacaaagtagtttaagaaaacagagcatcgtggagcaaacaaatggaaattcgtaaagtcagtttatggcggttggcttggagtctagaagcttggagaagattctagaagactgaagagtttctttttcataggaggaagattctcaaccaagctatcgagcggtcatctgaaatcctggcggatgtgaagttcattaaagagaagcgttattctactacgtctttttggatgttttgtgaatcttcttctgtttgcatctatgaattttgttttgaactatagcaagctagttattttttcatctcaattttattgaaattagatgtttctgataattttcaggcttcttttttctaatgagaattgagagtgcaaaattgtaggcaaagtcccaaaaattgttgaatgggacgaaacaatccgtgtgatgataggtgctatgctatagtttgattaatgttatagcgggacaataaaagaaaaaatagaaagacaatcatcttcataatttactgtaagaatttatttttttggttgattacaagattgatatccccattttagagttgattcattgattgaccaggaggctaaatggtggaatataaaccgaaaaaattcaagatctaattgagtaggaaaatatactcttaattctgactagctcgtagctgagacaaagagtctagaatagtgactcagttccatcagcacatgtggtgttcccaacgaattccgtattcacgaatttagactttctattatggagagttcgaaatcaagatggaacaagggaacatagtggtttctacccttggttagcttggtataactcgaaagcgaggaacgataacaatactaaatatgtagaaaccagatccttgacaaaatattttgtgattgcgagatgaactcaaagcgtggatgcgagtccaagattaggtgtagcagagtacattggtgaaggcatgggagtcgttccagagcttatcatcccttctatgttttgaactcccttgttctttgttttcaagttgatggttcatggaaaaccaaaacaaaaatgtgcagccagtttggttttaatttgatggcttcaaccagattcatctaattggtttgaaaggatttcaaatatatttcatgtctttacactaagaactcctgacactacactacttttggtagcgcggtatgcggaatgatttatttcgaaactgattgcagcggatttagtaagatgattaaccctttttcgctataagatttaatctacactgcaataaacaaagacccgattatcttgccggttcgacaaaacatcgagcaattctgtcctcgtttgcaaactcgttgcggattggttgcaccactaagcaatcttattccatgatggttagtaatctagtatgttagctgtaactgtatgaatgagttttaaaaacactgtaatacacatcttgaaaatactttactataatcaaacaacatgaaatcaaagtcatttcactaatatcataaagaatatatgttttcattaattctttttaactttcttcattattgtacaaaaattttatattacacctacatccatttatcaaataatatacttttcaacatgacatccatctaaattcaagctaagatcatctttcgaatttttcgatcagatcattgccgttaagcaaatataaaacaaatcaggagcaaaccttattgttcttccttaggtatgcatgtgcacctcttctgttcttctgttaactcctatattatccacaccaaaataaaccaactcataactctttttactatatactgttgactaatcatttttaattcatctattgggttcctctaaaaggttttgtgtgtatatatattaacttagataatttacctggatctgcctttgaagaactttcacgtattctactgcttcttctaacatgtctgcagtgttggtttgctgcaacaaagacaaaaaagttaaccgatatactcaaagcctagattccaaatctccatatataccaaaaccaaaagttttcctcagtttgttcataatctatagagaggaaaccaagttcatacttatttgatcgaggtgacaacaattcaagtccatatcaagatccattccacagtttgtgaattacttagttacagagctgagaaccgtgtctctgaagttgcatcacaaccattaacagtcatatttaatttgacctctaacttctacacttgatttaagcatagataatctttgacctatttctagtcaatataattgtgtaaccgaggtcatcagattatacctaagctgaaaattatattaccttgtccatgttaggtacaagctcttgtagcttccttatccgatcactaatccgcgtccttcgtacctacacaatgaaaggtaaagataaatatacactgaccagaacagaacaatcctctgttcaatgaagcatacagtgcatcattaaacatccgtaaattgaaagtaaagatataagttgtatcactaaacttcaatgtataaagttaagagaaccttgatcactacacttccaaaacattgaaaataaagattgaatgttgtttaccctctcggcaatgctgcggggatgagttgcgcaaccacgtttagcccgaaccctaaaagcaacagagtcctccataaggttctccatgttcatatccgacatgcttgatactccggtaggaacttgaccgctgctttgctctcctttctacttacagaaaaaaattccaaaaagcgcaaatcagcactaataccttaatcaacacataggtaacacatatgttcccaaaattttgatcaagtgtagttacttaatactaagtagaccaatgtaccaaaaggtgtggagaatcaatacatttgtacacattaaccaccgaagtatgtatcatcatgtggacttatggtcttctaaacactttacccataggagcattctttaatgttcacattgacacattaaagccacagagccaacaacaaaaactgccatttttttttttttgagttaaaatagaaactgcaacttgcttagtttggttcagaaaaacacaagttgtcaattttaagacaagactggtcttttcaatctcgagaacttggtcagcaaattaactaaaacaagtaataagtcagttaagttcatcctatttttggcaagtataagaaaaccctaatttaagaactaattttggtttaccatttgagaagtaaactcaggagaagagaagagtgcttccatttctctagaccgcttacttcccggagaaacatcgatattccccgataagtaatcgtaattcgcctgaatcccaaagctttggataaatccatcagaaccactaagaaaatccgccggagtactattctgtcggtgaaacccaccttgttgatacaacccttgctcaacaggaatcgggaactcgaacgagccgcgacttgtcggtaaatcgttcgagttcccggtaagcaaatcggtgagaccaagattaggtttcaaagactcttcttcatcttcctcaagtaaagcttcaagccaagtcgctggagctgaacggatccgagatagtccacttctacttagccctcctcctcctcctctgcctcctccgtcgtcaccaccgccgctactaccgacggatgttggttgcatcccctttggcttttctctggtttcaatagacactacgaaagctttttttctctttctttacatttttttttttgtttcttgctctgttttatttttttctttaattaatacatcagcagaccagattgttgttgttcttgggttatttttttatttatttgtttcaataaaaaaattgcggctagtaataataaagaaccctaaccgtctgattaagatacttttctaacacttgactaaaagataaagatagtacagaacctaaaaaggttagagatgcgtcagcgcgtaacagagaaacattgctttaacgtctcttttgttatctttttttttatgtaatagattatggtttacaccactctcgatggaggcgcgtagtttccaccttctcggtccaattccgatatgtgaaaaattagcgacttcgtatgtctgcaaaatgcaacttttatttagttgagctgctttgtagaattacaacattttaaaagcttttgaagaattacaatattttaaaaaagcttttgaaattttttgtctttattttatattagagttattctctgttgtaacaatgtctgtgttgattgcctaacaaaaaatataagaacacgaagttttttttctttttcatgtaagtacatcgactccggattagttctcctaacttaataaaatggtcgctggtgaaaaaaagtaaagaataaaaaaccatcctattaaaaaaaatattacaatcttaaaaaaaaattacttcattttttaaattttttttgttactttcgtttttaatttatggttaaaattttatttattaattttaattctcatatattatttttaagatttaaatgtttataaaataaataaaataatttgaaagcacttttacaactcgtgtggtgttcgggttgcccggccataaaaaattcccacagagtttttcaatctcatcaaaaccggtgatcgaaaaattgaacaccaaaaactgaaaatctatactatataaaagttgaggctatttgcttctaaagccgtccacataggatttagaacgaccaatcgaaagctgccacatcaataattaacatatttagcatttaattatttaacattttttaaaacaactaatcggaagctgtcacatcaataattaacatatttaacatctaattaattaacatttttaaaaataataattactttccattttaaaatttaaaataaaaaacgaaaataacaaatattaaatttaaacttataaaaaaggaagcaatataattataattaaataatattaaacctaaacccttacagaattttgggagatttgcaaaactactctttttttactacccttttgcaacaatatctttttatgttgtccttttttaaaaataccatttcccttgaacagaatgaccaaattatcctcatctaataggaacatgtaattagaaactgaaattttcccaccaaatttttgcaccaaaaatttatttttctcgccaaaaaaattttctggcaaacttttttcccaccaaaaagaaaaatcccgccaaaaaaatgattatgcaaatccttgtaaaattgttttgggaaaaaatatattttcaagagattttaaaagggttttaaaatatttacaagggattttaaaagggttttaaaaaatttacaagagattttaaaagtattttaagagatttataagagattttaaaagattttaaaatatttacaagagtttttaaagggtcttcttgtaaattctttaaatatcttttaaaaacacttgtacatctttaaaaatctcttgtaaatcttttgaaatccttttaaaataccttgtaaatcttttaaaacacttttaaaccatttaaaaatctttaaaaaacctttgtaaatcttttaaagccctttaaaatcccttgtaaatattttaaaacccttttaaaataccttgtaaatcttttaaaactcttttaaaatcccttgtaaatattttaaaacctttttaaaacaatttttaaccctttaaaaatctttaaaaaagctttgtaaatcttttaaagcactttaaaatcccttgtaaatcttttaaaaaactcttttaaaatccttgtaaatattttaaaacccttttaaaatcccttgtaaatcttttaaaactcttttaaaatttcttgtaaatctttttaaacccttttaaaatcccttgtaaatctatttcccgccaaaaaatattttttttgcgagaaaactagttttgacaaaaaactttttggcggtaatttttttcgaatttttttggcgggaaatttattttggatattttaggcgaaaaatattaatattttattttgttaacctaaaacaattttcaaataggggtaaaatggtcataatggctaaagagggtaaaaatgaaaatggctaaaaaaagggtaaagttaaaaaggggcataatgaaaagggcattagaaagaatttttctagaattttatacaactaatccaacattttttaatataacttaaagaaacgtaacaatgacgtggtttgatagtggtgtttttaatcgtatcaatttgaatcaaattctcgaagatataaattgaggtctttcagtctggaaagcgtgaaggtgaaaaggatctaaactgcatcaaaagagaaaagtgatagagttaagtaccagtttagaaggtaaaacattttcttagaataacagaaaacaaaacagagtacatcttgacgagcttaaaaaatgcttatactaacaagaaaagtaagagattttcgaagaagaaatatggagcatatgaaaagtttagaaggtatggcacatattgtttagacaaaattataagaggatggaaagagaaactgtaagaaaaaataaaacaaataaaacgagtgattgcagaaaaatagagagagtggtagctttttgtaaaaaattgtgaagatagtaattcatatacatattgaaaagaatgtgagaaaaatatgagttgttaaaagaaagtgtagataagcttatgaatatactttaatataatatcttatttttagaagagctatacaaactaatgcagcgaagataaacgaaaaacaatagtaaatttgcgggtaccaaaatgagaaagtcgtcaaaattatttttcatacaacaatttatttcatacgttaaaagacgtcgttatcctaaatatctaaaattaaagagagagtcatgaaccaaaaaaatgttcttttgataaatgttgtaaaatctaaaagttgtattaaagttatttttagttatgcatttaaattgtaactaattgtcagggtaatttttaaatttaaagagtttataatattaaaaacaagtagacatataaaaacatatctttcaaaattttcaataaaaaaacttagttacacataaaattattaaaagttttacaaatagactcactcggagcgtaggttcataacctagtaatagctataatggatgagatccgttgaacacatttatgaaagatatttactcatccttgataataaccgggttactttgtgtcatcattttttgctaataaaattataaaatataaaatttacttttatgattgtgcaaaagtaaagatttaccatcacattatatatgcaaaatataaaattaaattgtaagattatgtttgaccaaaaaacaattattagatcatataattgcttaaagttaatattattattccttaaattcattgcctatatattgttttacaaatgtgaacttacattgttgatccataataaatgttgaccaacaaaaataataatcaatttttcagaaactttatctaaaaaaacagattttaaatttaatcaaaaaaataaataaatttggtgaatggtataataagttcaacctcaactattcaccaaatttatttatttttctattcaaaaccaaatgtttaatttctaatcacctagtactacacaatttaacccaaaaacacacataatggcacatgaagtcggctacagtcaaatgtgttatatataaaaaagtctttaaaaaactatgaaagtagcgtgtaaggaatgacgccgtcttcttcggccgtaacaaccgatgacgtcatgctaacatgtgcatcttgcttctctacacggtggagtcgcatcatctttttgatcctctgttcacctcttctctgcctttcaatacctctcctctgtgccgttgagattttcagccgcctcctcagccggatcgtgaaacctccaccttcctccgccgtgtcgaaagtcctcgtcgacgatgaagataatttacggctccggcaatgtgaagaaggatttggaatgaaagaagaagatgaaaatgaagaaagtggtttgcttcatagatacttagataatcagttgagtttggctagaactatttttgatgatgacggcgatcgtgatcatgattctattagggttccttttttgtcgtaaatctttctttttataagggaattttaaaatgcaaatgtagataaataaatatactttcgattagtatcaatttacatttatttattttttgtttcttgaattcaacaattttcaaccgaaaacttggtgacaatttattatcatcatattcatccttgtcattgaaattagtcgcaattgatcttataaatttatcgacttatgtccctcctatctaatgtcggatatttgaatatacgacaaagttatcattatttatcaattaccagcccctctagtgacccacaatagctagcttaagtatttggatgttccttgcccaaaatatatatatatatatatatatatatatttggatgttcttgcatcttataattttttttaaacgcggtagaaaaaaacacattttagggatttcaaacacaacttattagtaactatccaattttccgaattttgaaacacaattagtttgttttgtgtagtaaaaatgtttaaaattttctatgagttgtcatagcatttacatgaatgttgtgactttaggacgagactatgcaaatggaaacttcaaacttaattcttgaagatactacttgaaagctaaggcttggtttcctttaaaagccattcaacactcaaaagtcaaaaacattcctcagtgaaatttggaagcaaactgaaaaataaaaaataagagagcaaaatacaatataaaacaaaagaatttagcaaacagaaccacacaaacatataagtcggtaaaagagagaaaaacaaaacacaatcaacaatcatatgatcaagttctaaactaagaaacactcagacgaaagatgcggcttttgttactcacaagctaaaggcttaaccttgaacctgtagataagcattttcttggtcgaagtcgggttatcaacagttagcaaaatcctgccaacttctccaactttgaagctatgagacaccaccagttcatttttcgcagtcatcttcctcggtttctgaatgatcactgtatacccttctttgttctccggcacaaactccgctccatacgaaacctcccatcccactactcttatctcccacacgattgtacatttctgaagaaaaaagtgttttgaggcacaaatgtaagaagacttcaaaacatagctgaatcttaagtacttagtattgaaaccacaatcttcaacatatgaaacaacatttattagttaattgtaagcgtaaacgccaatgttataataaactagttatcttccaaacacaaacacagaaatgggcgtttgaaaaagttgtataaaatgtctttatacaaaatggtctcacctcgtaaacaataatctcgacggtttgtttagtagttggtttaacagtaatctcggtagcgatatcatcgtgtgtgaaatccgagttacactcgcaattatccacacttagtccaccatactgaaccgggacatgttcgggtgatatgtacctatataaccaaagacaagagagacacttaacacttccaatagttaatctaaacaattccaaaaaaaggattttggtaattacttgagaagggtttctgcagatcttgaaggacctgcgaaaactagtttgctctttgacctttgtgacataaaaggactaataattctatagaacgcaaggtaccaccatggaacattgatgaatatctgatcaaacattcaacattcaacaacatcagatctgagcaatcataaagtcattggtcagtgtaataaagattcatacctgtttagagacaaactcagggtaattgtcttgaagaagatgaagagcttgcttagtagctaacctaagctcagtcttaccaggtcctggagaattcttaagatcatttacttgacatatcgtggaaacaccaccagctacaaaatcaagattcctgatactcttttcaagaaactgaatcctccatctcaagaaccgttctctcttctcttcatctgaaaacgttttctgataaagatctttgttctgaaactcaccgtagacattgtaacagacaggatgattctccttgtcttgtccttgcatgaacacaactttgtctaaatcgtcaccgaggttttcgtctagaagctcttcgatgttgaagtcgattctccattggagtgtcttgtttagcattgagtaagcttcttgaggtttaaagtctcttgctcttagaaactttaacaaaacgacgtcggttctgtcgtctttgagaagtggcacaccccatatagaggttttgcttgaatcttgtgatacttgaagaaggtgacgaagctcttgaagtgcgtttaactctgtttctgaaagatcggagattttgtttgtttcttctttgaatgaaccgagactacgaggaatctgaatcttttgtttctcttctacttctgcttcttctctgttcatcatttcggctaaagatctagatgcaacagtggaagtagtagtagatggtggtggtggtggtgtctgaggctctggttgctttggctcagggactgacgctgcagcttctaacaccgcttcatctggtagttctggctctgtccaatcttctacttccatgtactttctcctctgctccaacattagtttctgtgatggctctgtctctgaataatcctccgccgcatggttaggctcttctgtctcggaagttacaagcaatgacgtgtctgcctccgatgtttctgtctccggcgtcggtgtcactccacgtggctgctctgaatcctccgccgcatggttgagaacctctgacttcacagtctctgtctccggcgtcacttcatgtgtctgctctgaatcctccgccacgtggttgagaaactctgatttcacagtctctttctccggcgtcacttcatgtgtctgctctgaatcctccgccgtgtggttgagaacctctagcttcgcagtctctgtctccggcgtcacttcatgtgtctgctctgaatcctccgccgcgtggttgagaccttctgactccaaagtcatcgtctccggcgtcaccttctctgaaacaacctccgccgtatgatttgactcctctagctccggcatcaaaggtagcttcagatttgtctccgaagtcaccggtgcctcttcttccgatgttacatgctttggctcatcttcttcaccggaaggcattgaaacgtcggaggttaaaggtggcggcggagtagtagttgcagaatcttgagacatttttttattgttcttgaaaaaagaagaagaaagggacagagagagattaacgggttattcaggtagagaggaatggtcaaagaagaggaatccaatgttgggctctaaatttacaactcaaaaagctgtcctaataaagtaaaagatgtccttttcctttttaaagttgtaaccagtagtactttattaaattattatgctactaagttgtaagttgtaactaccaaagtaatgatctatgttcgtgcatatatttttgggtttagctaatggtctttcagaacatttccaggttgaattgttagtacgtttatttgtaaacaaaagaaatgtgaagattttggtgagtacaagaatgcttctcgaatattgttttagcactcaatttagcaagttagagaagaccaagggttataaaatgtaaaagacgcttttttttttaacagacgcattattattattgttataaaagagacatataatttaggttgtaaaatggaaatttctaatcatacatgtgtttttatttaatgtgaccatcttattataagttgaattttacaagttgctaactcatgtgatcacgatatcatcatgtctcaaatctaaatttattaatatatttaaagataaatataagaaaagctgtataactctatcagaaaaaaatatatgcataagttaaaaaaaattatataaaaaaggtgagaattccttttcctataacggaaatttcaatatattaaactattaatcttaattctattgattatttttgttaatatattaaaatattttctaaattctttatccgtattcgactgaaaaaaaaaaaattattaatagagcttgacatattgtataattgtgatttgcaaaatagtggcaaatttcaattaattgataatatttttcaattttggaacttaaatatgggtagtacccttttatttgcataaaaacccaaaataaatataatcgtaaaacaaataataacgtaaataacaatatgtaattatatatatatatatatatatatatatatatatatatattaatatcaaagattaatgggggatttaagtgtaatcgtcgtgtttgagtatgacgtttaagacaaattaataatatcaaaagtttagcttacttacataataacaggatttgaccaaaggtacaccggatgatatatatatatcttttttgttataaacttatgatattgttgtattttaatttaattggtataaacttatgtttgattgtggatacactgggggtcgatcttttataatcaaaattttaaattatagttgttttgtctagtgtttaagattgtataaattgtattttgattgttaattttaagaatttacccatggtatacagtctcaaactaatttcgacccaaaatctgtcctaccatataacccatcctgtaaaactaaatatcattttgttatttttcttttttataatacttttatttaaaagacgtataattcaatatatactgcaagattaataatttgttctttttgtataaaccgatgaatttgttgtatataatactttttgttgttttttagttataaaattatgattgattgtgtacagtttgtaataaggtgtaagtttttgatattcttagtctatttttttttttgtcttttatatgattttttatattatttgatttttatacaaacaatactgtttttcatgcatcattttattataacttaaacgtataagcaaactaattaggtcgttaagcttcgtcagagaaactgtggtggtcggtatcattagtcggatagctaagagtcaagttagtcggataatcggtatgtgttacccgcccttagtcttttattatttttagaatatttttagaatatttttctaatttttttttggtctgaagcttatatccatcattagtacgagtcagagaaagcttaggcagatcgagatcgggttggtcaagggtagcgatttctcgttcatccagaccaatgtgaattagggttatgtgtttcatgtggttacatgtagttcatggaactcatctaaacaagattgattgttgtttattttctttcgtttgtagatctagagtttttgattgatttggttgcctaaatgttagcttctagatgagatattagctaagtgtagacttatgcataaatatatatgatatggattgaattgatgcttaatgattgaattgttgtatgattacttagctttgtggatgggggtgatgttatagaagtttttttggagcttctacacaaatacatatacgacttaactttctgaatctcgttgcatatctagttcttatacttaatcatataatgacatatgttgactacaacaacactaatcaagcgttgtaatgatttctaaagcttgtgtgtggggtaaagttcttaaagttgttttttataaaaattctacacaaaaactcacgactttagctttcagaatccagttacatgtgatctataaatccaaggcgctaaatatatcaaagttttaaggggcatcacaatcatataaaaatctagtggttgatgttttaatcatatatatgaaagaaggttaactctctcccacaacttgacacatcagcacatgagagcttgccacctagacttcataaaataactaatacataattagtaattaattcaacataacaactaaaatatgagagtataattagtcagaacttgaaccatcattctttctatatctttttaattcaatatattctttttaattttgagatccacttagtggctaaagtgatcataaaatccaaacatgctacacatattccttacctaaaaattagacgtttattatgaaataaactaaatgaatatgcagattaaatatatctaagtttttcgaaatttatgataagaaaacaagtaatttgaaagatgtttgaggagctatccttataactaatacgtaagatataagattatgacaagaacttaactaaactttccaaaaacatcaagttgaatatgattagattgaatatgcagagacatggttaataaagacatgttatatttttagtgtaagaaataaaattttaccgtctcacaatctaaacatataacaaaaaaaacaaggatatatatatataaaaaaactgagaatctagaacaacaataaaaacaactcaaacacattcgtttttcagatgaactaatatagttggacttttcaaaaacaattacaaattatatttatgtttcaaaaccgatggattcaactttactttatataaacagacattatataaaataatttgtaaataataatatataaccccgcacgtagtgcagatactcatctaattagttataaaaggtcacgagtttgatattcaaactgaattttcttacaattttatattttaattttaaaaggacgataaatttttttagactttaggcatcatatatgtttggaccggttgtcaaactgtctaattttttaattattttatattttaattttaaaaggacgataaatttttgttggactttaggcatcatatatgtttggaccgatcgtgtatagattcgtccattgtatacattaggttatcttgtaaaatgtttaaaatcatttgtgtacgtacattatattgttgtaaaaagttaaaagcatccaaaaactttacgaatgatgatgcaaaaaaaaaagacgatagaaataaataaaaaaatagtcgaaatattccacatttgtttttaatctattcatcataagcactataaaaatgatgggggtcttttatgttttattcatacagattaatataattttattggtctgattgataaccaaaagctgtacaagtttttttagttgttagttttatccgaatagcaaaactgttaaaaaaagttgtacaaaaaagctgagagtaaaactttttataacacttttgataaaaaaattataattggtaattgtcaaaactgtacaaaattgtattgctattaaaatggttactatccaaacccattattaattttaaaaatatataatgttttttatcagcgtaatgattacttcaaatttaaagcgtaactatatatatttaaaaacttccgttaattatttttacactcgaccagaccatgatctttgttttaaataacagtaaggtgactgaaatcttctgaatgttttcaatttaaattattcaattataacaaggtggaagaacttccaaaaaatttattcatatagattaaggaaattattttattaactagaatatattaatacttaaaaatttgtctcgttaacaatcataagtacacaaacaattaggagtactaccaactttggatacaacacattctccatctccattgcgctcggtaatgcatgatagacgacattcaatagggtaacatggagaaagatcaatgattatactacaacgcttatctcccttagccttctcaacaactgaaaaaactgaaaaggtaaaatcccatatgttatgacctgaaactatatatttgtacatgcttagatgtttgaaagtggaaaacatgaaattacctgacaaagcaagcataagtatgagtaaataagaacatgatatcttagccatgatcaatgtatatcacaacaaaagaaagctactaatgttttgtaaattagagatgataaatgaaaagctattttctttgctttattgttatgtagtgtgtgtttatatatatatataggtatacatctaagaagaaataaaaataaaaagaaagtgaatgaatgttaaaatttttgggtttgactacattgattactacgatttgcaccttctcaccttgttaaaattatagcaattaacttaattcatagatttttttcttgtttgttttccttttcctagtgctacattaatgcgtaatacgtttttctctatctatttgactatttccatacttaaaaaagtttagtcaaagttcaagaaaataattatcacataaacatttaagtctggactgttctgaaataactatgacaacatcaaaaataataaaagagacgcatttttaggtggtaaatagaaacttgaagagaaatatcctaaaataacatcaaaataagcacacataaaaaaaattcaaaaataatattagttgttgatatcagtgaaggatctagtaaagtattttatctggagcaaaagtaaataaatatatatatatatagaataatatataattaatataataaagtatgaaaaatactttttcattctttattcattttacaattgaaaatccataaagaacttagactttaaaaatagtatttctattggtcatcaaatatacttaggtacatatattatttttaaattatacctcacaaataatacacaaatttagaatctaaatacattgcatagggcactttgttgccaaatgaattaggagaactatttacacaaggatccctaaaatgtttattactaaacagaatagaccaaatatacttagttatcttataatttaagattgtaagatattttagtatagacattagccattagatacaacaatcataccaaaaaaaaatcattaaatacaacaaactaaagcggaaggagatatatgaacaactaaattaatgcataaccaaatttgacaacaataaattgcaattagaacttttaaaaggaagtatttgtttgctaccaaaatctataaaaaaaaagttttgtagcacacaaaaaaaaagtttagatgtatgaattaaatttaaataatatttgtcacaaagctgaactgttttcttttctttatatggtttctttaactttttatcttcagtaagtttcaaataatcaaatagtattaaaaatcttttactgtacgacaaaaaaaaaaacatcttttacttttagttctttagtcagtaattgtctgtaggggacacatttccccaacatatcacttggtttgtcactggaaccaaaattaaatgatgttggccccaaaatgattgaaccgggtttaattgaaatcagacttggtttaattagaatcaatcacaatagagaaaactggaattcttgtaggtacagtgtattacagatgcatcacagctaatagttataaatacaaacgtggtgtgttgttctgactcttatctacaaacacttaatctggacccaaccaaccataaacaaacccacactggtccattggtccacatagtctcttaattcggtttctttagcaattcttcataccacaatccatgaacagaacgtgacactgttgccacaagaacaagaatgtctgaaacctctatgaccttgtccgagagagaagctgctccgatctttcttagcattgtttccaccaactgctttctcttcgtgttgtttccggccaaaaccgcggctctaatggctaggtatatggtctgtgatacatgtgtgaacactgcgtctcctgcttgtaagcttttcacaagcatgtttgcgattacttgtttctttgtctctgcatcgttagaatcaagaagctcggagagtgtttccatgatttctgaaagacctgcatcaggttttgcgtctagcatctcgtaaagacggtttatgcaagtccgtgtaatagcctccatgtcaatcgaggatgagttttcgcttactagtgtttgctggaggatcaaaacacttgaagaagaaagaaacagaacggttaatatgagaattatataatcaccattttgagtgagacagggttcaagaggtaagttttgtcactactgacctgatggagacaagagtgattttctggatttgggattgaacatctctcagcctagataggttaagttgaaatgtttcagggacagtttctaaagtaagaccaccgatttcgctcaccatttttaacaggccaatgcgaacaagaagatccacagtttctcccttgcactctgacagttcgattcctgcaacagaaaataaccagcatgcaactatgatcacctaaattaacaaatgacaaaggtgcattcaccatgatggctaccattcactaacttatcgtatgaaatatttttgggaacatgttcggtttctacaggtgaattttaccagttggtttgtgttcgctaaactaagttcttacaaaaataatcccaaaaagatagctaaaattgatagatggacaccaaacctggaaatggagatgaaggggtattgacttttgaaacagaggagacattgccaccagttcgcatggtggtcgaagggaggcctgatgatccagagtggttatttatgacagcagaaagagcatctttgtgttctttccactccctctctgcttctcctcgaacacttaaaagccaacgttttgtcaatggtagcgaggaagacgcttggtctggggaaccatgccgactggaaaatgacttcttcagatattccagaccagcaggtcccttaagaagtggctccaagagtttcaaacgagatttgctgatttccttctttagaatctgcaagtaaaaggacgtatgacgttaaaaggcactaccagtaccagatttagtccctaggtttggatttcatttgttcagagggtgaaaaataaattagttgtggtagttaacaaagtgtatcacatgagaggagaagtttattacagtaatgcttgtggagatagtggacaaattatgtttgtaagttggtagctactagagaaaccctgtcctcttctctattcagtaaaattatagaaatataaccatctacaagtttcttctatttcatagttcattttagaaagctcaaaacgatcaaaattattatgtccacaaagtacgaaaaggaaaaaatgtgcatacctgaatctgctgcaaaacaaagcgtagccccttaaccattaagactgcatatgacgaattcgaatggccatcagttggaactatctctccaagttctgtcattagtttatggtgagtaaccctgatttcctcttcattagctggagcagagagtttcagcaaaatgccaagggaaaactcaagaatatttccaagataacccatgtcgacattaccagaagccagtaactgaatcatgccaagaaaagaaagagacattaagtacataacgtatctgttgtaccaataattaaagacaagactgtagtaacaagcacctgtgacagcacatccgtatcgatagtttgaacaatctcttgtctccagtctttgggagatatctcacagagttcatccctgacttctttcatgagtttaataacccagctgaagtctggctgcgactgtttcatggattccatgacaccatcccagaaagccttttccattgtctccttaaccctcacctggatatcacagaagtgaagaaatatgagtaaagtcgaaaatattatagttccaacttaatgaatcagaatagtgaagtcaaaatgcatcagtcacagccttaactagcttatatttatgtacctgaaggttgcttgtatccccagtgttagggtcgaggctatcagcaaaactactgctattgtcatggacaatttcatttacaattacttcgttctcactagccaacgctgcatcaaagctattagctaccacgtttggagtagaaatggcctcgctccctgctagataaaactcattagattgaagacttgccagattatctgtgagcttaaaaggttatccagattgaaaagattaccagagttcaaagagggtgacaaattcgatgagcccggtgaaggtgaagatgaagatggaagatgcgaatctgcaggtgcttttgattctcgtgctccatcagtttcagagaataaagcccgattagttggagaagatgcctttacctgaaaataaagataagtcattctccctatcaagcccctgatattccatggtctgctattaagatatttgtgcagcataataagctaactttaggctcgtgtacacagaatcaataaagataaacgaaaaagagaggaaattgggtataccgtcttctgattcaagccactgtctattattttgggagaggaagtatgttttgatacctcagacagctcagactcttgagttctggctaaatctttttctagaagcttagcatcattaattttccagactacaaaaccctcaaggtaagagcaccaagctttatcaaatgcttctagctgagatctgaatttttttggacgttgagctacgaaagatacattgcccgggagggtagattctggtccttccaatataactttcaccagcagttcaaactcccgaataagacaagttgcagattccacaagcgcaatctcatgttcacctcttcctctaaaaattgcaccgggatgttgcttgatcatgtaggcacaaagaaaaattctagctggatatctcgcaatctttttaagtttttgatatcccatcttggaattgggtgaattttgctcgcctttactcatgggactgggtgatttccctcttcgaacaggcggaaagatgtgcttaagaagatgattaatgttctccacattggatgccttagatagagtgagtcggatctccaagcgatcaagcaatgctttgaccgtttgaattacagaaactgagttcatttgaatggcaaactgctcaaatggtactgactcaatggatttttcattgatccccaactcatgatatgctctagccaagacaaaagtagatttcttgtatttagcaaatctcctccagcatctgagatttaaaaagacaatcagaccatcgacgtaagacagttaaacatcatacaaaatgttctagggcaatacacctaccttactaacatcctaacaagatgcacttggttctttcgcattgtttctgatcttgaagatgaacaactatccatacctctccttcgcctcatatattgcgctttcagcttctttgcctaacaaaaatgccacgacaataatcatacttatagccaatttcaatatggtctttaaggaaaaaggcttgaatgttttggcataccctttgaagccgctcttctaaacggtccttcattttccttctctcagcttccttttgactccgcacagaactagcagcaccaaacacccgagtcaatctcgcattcgctcttctcctttccgcttccaaaatccccatccgcttactctctgcagctgctctcttctgataaatcgcagcacgcacactctccttatacctcgtctcctgaatagctttcttcatcaaactctgcgcagcacgctgcctcttcgccgctcttcgttgagccatagctttaaacaaaagcatcctattcttctcagccttcaaaaccctttcttcaaccttactctctaactcatcacgctctttctcaactcgttgctcaagtccattcttcgcagcttgtctagcttcatccatcttagccaaacgagccagctccttctccaaaatacttaacctatcaacaactttgattaaatcctcttcacaaattcctccttattacacaaaactaatctctttcttttcttcttacctcttttgttcagcagcattaagctttgattcaagtctctgactaagctcctctatacttcctgatctcggacttctcatcttaggtcgtgccttactcgatagtgattcataatattgctgcaaaaattcatctttttttcaaattcggttctgttttaacccaaagtttcaaactttaagattttacctgacgacggagatcagcttctctgagtttggaatcgatctctgcggcggagacaggactcttcggttcgagaagacgacgacggagcctccgtggaagagtctttggtgatgttgtcgttaccgtatcttcttcattcaccggaaaactcagggagattcctcctaatctttctggttccgtcattgatttcacgaccacacaaatgtagatcacagaaagtgatttgttcaaacaaaaaatgtaactttaattggaaaaaacaaagcttttctctagtcggtgagattttaacagagagaagatttgatttttgttcgttaggtttgttttcgaaattgttcgcttttgatgaagaagacgacgatacgcgtttttctcaattggacccgtaatttctggaaatttctgaaagcatccattttttgaagtagaagaaactatcttatctatattgtttgtgtttatcggggctataaaccgacgtcggttaatatatgggcttactattgggccagaggccaaccatatattgtagaccttataagcgacgccaattttgtttttgtgtcagttctaatagaaaatgtaggtctaggcaattaaactgaatcgaagctactgaattggaaccgaagcaaaaagaatcgaacaaaatcaaaaatttaaaaataattggatgtatactatattattatataacaaaaaaaaattataattggtaccgaactgaaatatttttggtaaccaaaaatacccaaaatattaattatttattgatcaaaaaatcaaaaattttaaaataaaaatagaaaaagtaaaatactcaaaaataacaaaaaaatatccgaaaataatcaaaaataatcaaaatatccaaggaaaaataaccaaattgatactaaattttaaaaacaaaagaaccggatccaaaccaaaatgaagatttcaaaatacttgaatgatactaaattttaaaaccgaacacctaggactaagaaaatgattagtttgtgttttccttgtttcttattataacgtgaattcacatcgaggccgagtaagtatgaggatttgacctctctttagttcgatgagtttaagaagagagacattggttggctagtatgacgtatgttgctcatgttacaataaccactattactatttactaataaaggccagattcatggttaaagacttaaagaaacagttatttgtttaacttaggttttgttttgttcaatgtgtgaagactgttacattgtatctgcaatcgaaatgactcgtaacaaaacaacatttttattttatttttttggtcacaagcaagttaaatcattcattacccaaaacattatttattctacaaaagagacaacagaaagtaaaagagaaacccaacaatacgaacaacatcatcatatggttctttattaggcatcacaatgcaagaagtcccatatggttccaagaacatcttgaagcgtttccaatactcgacccactctcaatgttctgctcctgtagaccacaagtgtaatcaccataagcttcactttcagtaaaaatatcaaaggtacaagagcaaaaaattacctgttttctccttttacgcctcctcctagttatatatattgtcaagaatcaatcgaggttgtgaaaagaagattcttattgattacggcaagaggcaatgcctttatatacacgataagtttagacctagttaatttatacaatataaatgggctaaggccacacagcccaacacccctcctcaagctggtatatggagattgcagataccaagcttggcaagaaagtctgcaaactcttttcgtcctaaggctttagtgagaatgtccgctagctgagaagtggttgagacgtgcttagtagcgatagtgccattgacgagctcatcgcgaatgaaatggacgtctcgacgcacatgtttagtgcgagcatgatagacaggattagcagcaagacttatggctgataaactatctgaatggagtgtggtaggagcagtacacggaataccgagagcgggaagtaattcacggatccatatgatttcactcactgtttctgccatagccctgtattcagctttggcagaagagcgggaaataacattttgtttctgtgtcttccaagataaaggagagccacccaactgaataaaccaaccggtgagagatcgatctgaatgaggacatgctccaaagtctgaatcgcaccaggcagagagaaccaaaggtgtattagcacgtaggagaataccttgaccaggactagactttagatatctgacgacgcgaagagcagcttcccaatgagccggtttaggattatgcatgaactgtgagagaatatgaataacatatgataattcaggcctcgtagtcgcaagataaataatgcgcccaactagacgacggtatcgaagtgggtcgtctattgtttcaccagtggcaaaagcaagcttatgattttgttccaatggaaaagaagccggtttaacaccaaggagacccgtttctgtgataatgtcaagtgcgtactttcgttggcataagtagataccttcaggactccgagcaacctcaattcccaagaagtaccgcaaaattccaagatccttcatatagaaacaagagcttaagtaatgtttaaactctgtaatcacagcaatagtagtacccgtgatgatcaaatcgtccacgtatactaaaacatgaagtcgaactccgtttttgtgaaagataaacaaagagtaatctgaaatatcttgaataaaaccgtagttcttcaatgccgatgtgagctttgcgaaccaacaacgaggagcttgtttgagaccatacaaagatttgcgtaaacgacatacttttgtcttgtcaccagtacgaaatctcggaggaaattgcatgtatacctcttcgtcaagatcaccatggagaaacgcgttgtgaacatccatttgatgaacctcccagtcaagtgaaacaacttgctgaagaaaagcgcggactgtgaccattttcgcaaccggagcaaaagtttctgtgtaatcaagaccttcggtttgattgttaccaagaacaaccaaacgtgctttgtgtcgttcaagtgtgccgtcagatttgtattttagacgaaacacccatttacaaccaagagctttcttccctggaggcaagtcttcgactgtccaagtaccaagattttcaagcgaaccaatttcatctgaaaccgcacccttccaatgatcatcaagcatagcttcgttatagtttcgaggctcatttccagatgtaatagcgagaatatatgcttgataattatctgagaaacgtgaactagagatgtagttgtccaaaggatacggagtcgcggaagggaatggttgatgaagaagagtcgtgacgtagtcagcaagtttaacaggaggtctctttggacgatgacctttaccgagaagctctagttgaactgctggagggtgtacaggagatgacgatgaagcaggagattctgtagcagtgggagaaaactcatcttcatcatcaggaaaaaaatccatagaggttgaatcctcaagatcagtggtaatatcctcaatggtgtctatcgcagctgaggttgtagttgaagatagaggagtgaccggagaagacggagtaaccggagaagacggactaaccggagaagacggagtaaccggagaagacggagtgaccggagaagatggagtagccggagaagacggagtgaccggaggagtcatagagatttcttctaattcagatgaatcaacgagaaccggatcaagtgatggtgacgaatccataacagagatagggaaatgaaactctgtttcacggaaaactacatcacgtgaaactgaaaccacaccagtttctatattatagaccctccatcctttctttgcaaatggataaccaagaaaaatggatttatggctacgactggcaaatttatctcctccatgcttcagattatgaacataacaaatacatccaaaaatgcgaatatgctgcagtggtggaggacgattatatatgagctcaaatggtgtctttcccttaagtaatggagttggagttctgttaatgagatatgctgcagtaagagcacaataactccaaaactcaataggtaaaccagactgaaatcggagagcacgagcaacattaaggatatggcggtgtttgcgttcaacgcgaccattttgttgaggagtacctacacaagaagtttcatgtatgattcctttttgtgcaaagaaatccgagagacaaataaactcagaaccattatcacttcggataatcttgatgttggtagtgtattgtcgttctactagagcgatgaagtttttgagatgctttggagcttcttgtttcgatggtaagaggtataaccatactgctcgagaataatcatcaactagagtaagaaaataacgagagccgcatattgaagtggttctatacagaccccagagatcacaatgcactaattcaaaagcaaaactcgtcttattactgctcaaaggaaaaggatctctagtgtgtttagcttgaatacagatttcgcaagtctttgaatcaaaagtactactagtaacatcagaaaaaggtaacaaatgcaaagccttcgaggatggatgtcctaaacgttggtgccataactgtgaagacggcaaagccttactagtcaccgcagctgctgtttccactcctcggaaaaaatataagccattcagctctctacctgctccaatcagcatcagagtggtgcggtcctggacaatgcaaactttgtcagtgatctgaaaaatgcagcgacgtgttctagtcagttgtgaaacggagatgagatggcagtgaagaccatcaacaaacagaacatcttgaagatctaaagaagagcctaactgaacactgccttgttttgtagcggttgtaaaacgtccatcaggaagtttaatcaaaacaggaggcatatcacaaacattacggagaaatgcaagagaaccagtcatatgatttgtggctccagaatcaattatccaagattcaagaaaatacttaccagactgatgatcatttaaggtagatttccgttcctcaagaatcgtttgtaaaattttccattgtgaatcattcagcccactaagtcctatgcgatcatctgatgtcaatggagaagtgagcgatgaattcgtaacaacattggcagccattccagaagaagcgacatgattaatagaagatccacgaccatgactctgttttcctttgaacgaacttaaaccaccacgtgaagaagatgcagtgtttttaagacgcaatttttcttcgagccaaggaggatacccgattaatttgaaacattgttcggcgagatgaccaacacggccacaattactacagactctgttttctgaagaatctcgaggtcgtgaagtagtttggaccgcgaagctaacaccgtcaaccctctcgttatgtaagcgactcaaggatttggattcttcgtcttgtgtcaaagcattgtaagcttcctcgagagaaggtagtggcactcgagagagaagagccgacttgacagctccgtacacagattcatcaagtcccataagaaactgatgcaatttgtcttcttcacgttcttttctgacgtcgtccatggttttagcttgttggtaatccgccaagctacaccacagttgagagagacagccgtagtaagtttcaatggccactcctttttgacgacaggttgctaactctgttttgagtcgctgaacatgttgtccattcttgacaccaaagcgtttctgaatgtgtgtccagagctcatgagaatcgtcgagatgagacatagatgtggaaacagtttcatcgatggtgagcttcatccatgaaaccacaagagcattgttggcagtccaatcttcgaaatcgggatctgtctcaactggttgtggaatagatccatcagcaaacccaaatttctttctagcttttaacgccaaacgaagatttgtggcccattcgtcgtagttgggtccacgaagcaacggtttggagatgagagttccgggattatcaccggatgtgagatcatatggcgagattgtacgccttgtttcagtcctagctggtgtggtggagctagcgagagccaattcagtactcatgatgaacggagagtttgatgcaagtattaagtagagaagttagaaggaataagaaagcgatctcttatagcggaaggagagatcacagaatcgatcacaaaaaccttttagtagttaggtattgtgctctgataccatgtcaagaatcaatcgaggttgtgaaaagaagattcttattgattacggcaagaggcaatgcctttatatacacgataagtttagacctagttaatctatacaatataaatgggctaaggccacacagcccaacatatattgctcataaacaaacttttcaattgaggcaagtctcaacatgttttgatcaaatcgacgcttttctaaaccactttgttttctctttttgcatcgtgaaccttccttgatttggaccaaacttggaatataagagataacatattgtttacagtttccgtctacaagattcagtttttctaagtatccatcctctccgacgatgctaataaatgttttgagacaattagagtcggggtcaaggtttctaccgaaacccatgaagactttcttctcttcgtctacgaagaaactatgtgatatctttatcttaggtctcgtatcaattctaaataacttgctccacgacaccgtttcggcatcaatcttagtcgtaatccatatctccaactcagataacgctgaaataaagctgcaagcttctcttctttaacacaagataaagtcacatctacagcgctgcacggtagagggagaagcggcccgaatctctctcttgtaaaatcaaaacagataatgtgatctttgtgaccctgtgacctcctttctttagcacaccagtaagtgtttcccttaatagaaacgccactggaagaacaatgtacaccccagtgtggagtgacatcaagagttgtctataaacccgagtcaaaatcatagatttcataccaaaaagattgtgtttcgggtgtattgtagaaataatctagaaacctcaggaacttaaaggtacgacaagattccttatcttcgtatccaagagcataactaaacctatcaaatccattcggaggttgagaatatcggaggttgatccaccttgtatgcccccaatacggattccaaaccaaaaccctagtaacgtcgtctttcaagatgcataacaacaaaccctcaaagtggaaaatattagatatactcacttgattgtgaatgaaaagttgacctttaacctctatagatggatcaaagtcgacgacaccgctcattaaacaaagtttgtgaggcatcatcatgatcatcatagtctctccatctcttgttggtgttgtcactttaccaatgtgcatcttcgtaaaaccctcacttttggataaattgttccaagttttgcaagttaatctcaccgctttcatagatttcaaaggaaccctagaaatgatctcctcgatcaaatcccttggaagattgtagatcatcgtcgtcattgtttcaactttcacaacgaatgatttcttgcagcttagggaaaggaaaaaggtatacacgacgacaaattataaccctaaataaatttgggccactagtgggctttcagaatctaattgggcttaagcagacccaatttgtatctggcgcgaggttttagtttctgcggaggaggagatgatcgacgattcgtctcttacggcggagatggaggaggaagaatctccggcgacgacgattgtaccgagagagccaccgaagattcaacgcttagaagaatcagtagtcaaccgtatcgcagctggtgaagtaatccagcgtccagtttcagctgtgaaagagctcgttgagaacagcctcgacgccgattcaagttccataagcgtcgttgtcaaagacggtggtttgaaactcattcaagtctccgacgacggtcacggtattagagtacggttcttctacacactctctttttcaatttcacaaatttgggaaatttctgattctggatttgtttttgtgttcttgttgattcggatttgtagcgtgaagacttgccgatactatgcgagagacatacaacatcgaagctgactaagtttgaggatttgttctctctgagttcaatgggatttagaggagaggcattagctagtatgacctatgttgctcatgttacagtgactactattactaaaggccagattcatggttataggtttgtaacattggtttgattaagttatgttttgttctgttcaatgtgtgaagaacagtgttgttgtattgaatctgcaattttttgtttgttcagagtgtcttatagagatggtgtcatggagcatgaaccaaaggcgtgtgctgctgtcaaaggaacacagataatggtaatctttcaaatctggttaagcaaagagcgggggaaacgattttcttcggtaactttccatgtttatgtatgatttaggtggagaatttgttctacaatatgattgctagaaggaagacacttcaaaattctgctgatgattacgggaaaatcgtggatttgctgagccggatggctattcattacaataatgtcagcttttcttgtcgaaaggttggtatacttattaactaaactagtcgtatttagcaatcttttgtgttttggaattgtgaagtgaattttggatgatactgtctcgccagcatggagctgttaaggctgatgttcactcagtcgtgtcaccttcaaggcttgattcaattaggtctgtatatggagtatcagttgcaaagaacttgatgaaagtagaagtttcctcctgtgactcctctggttgtacttttgatatggagggtttcatatccaattctaactatgttgctaagaagactatattggtgcttttcattaatggtgaggatttttttccttagtagaaatgaaaagttagtaatatctgatttatcactagataagcctatgtgacatttaatttattgattacaacagatagattggtggaatgctctgccttaaaaagagccattgaaattgtttatgctgcaacattgccaaaagcatcaaaaccttttgtctacatgtcaatcaatttgccacgggaacatgttgatatcaatattcacccaacaaagaaagaggtaattgctttcctccttttattttacctttaaggcctagtagctgctctatattcatgtatgtgggttcaacagtcaacactttatatgagaaaattgtgcatttgttgcttaacttgcttgaataataaattccttatttatacaacaaaataatagatgctttggtctatcgtgcaggttagccttctaaaccaggaaatcattattgagatgatacagtcagaggttgaagtaaaactgagaaacgcaaatgatactaggacgtttcaagagcaggtatgctcgcaaaagaacctgaagcaacatttttctctggaggttaagaacatttatttactaatcatgttttctttcgatatttgcatgctacagaaagtggaatacattcaatctacgttaacatctcagaaaagtgattctccagtttctcagaagccttctggtattgtaccatttttctgggttgaatgcctttcatagtctaaaacttttcctgttgcaaactcttctgtacttttcgcttcatagaaaagcttgtgctcttctcatttactaggacaaaagacacagaaagttcctgtgaacaaaatggtgagaacagattcatcagatccagctggaaggttacatgcctttttgcaacccaagccacaaagtctccctgacaaggtttctagtttgagtgtagtaaggtaagaccccacctgatacaagacgtgtagttacatataaacaacattggatcccatgtcattactgtattcaaaactctcatcttatttaccagtagatgttcactcctttaatttccgtgaaaattgtttcctgcaggtgtttctttggcatgattctttattggttagatgtgttgcgcaactgcagtatattcacttgatcttattacggaattgcaggtcttctgtaaggcaaagaagaaacccaaaggaaactgctgatctttctagtgtccaggaacttattgctggagttgacagctgctgccatccaggtagtttactctgcatggttattcttccgaacaaaaccttaaatcaatcctcataactgcttttctcaacattattctctgttaggtatgctggagactgtaaggaattgcacatatgttggaatggcagatgatgtttttgctttagttcagtataacacccatctatatctagcaaatgtggtgaatctcaggtattattcttaatatttaatgtttgatgggttttagctgtacgtaacaaaacatctcattccgcataccatcttattgggttttgcagcaaagagctaatgtatcagcaaactcttcgtcgttttgctcattttaacgcaatacagcttagcgatccagcccctttgtcagagttgatattgttggctctgaaagaggaggatctagatccaggaaatgatacaaaagatgatctgaaagaaagaattgctgaagtaagttctgctttctgcatcgttttctgctactggttttgtactattccttccttctatcagctcttatcctcaacagtaacaaattcttgaggctgtaatgttgcatatggatttggttaacttgtttcatcttaatatgtagatgaatacagaactcctcaaggaaaaagcagaaatgttagaggagtatttcagcgtgcacattgactccagtgcaaatttgtcaaggcttcctgtgatactcgaccagtatacacctgacatggatcgtgttcctgaatttttactatgcttgggaaatgatgtgagttacgcgattactatttgtacaattatatccactattcgtgcctactgaagtgctactaatcatagtaatagtgggttctaatgtcaccctaacgtactgtttaggttgagtgggaagatgagaagagttgctttcaaggagtttctgcagctattgggaacttttacgccatgcatcctcctcttttgccaaacccatcgggtgacggtattcagttctatagtaagagaggtgagagctctcaggaaaagtcagatttaggtatgtaacctcctctagtggacaatgttttcgcttttggttctctgcatttgaaatggatgagagcatttaattttacattcaactgttgcagagggtaacgtcgatatggaggacaatcttgaccaagatcttctgtcagatgctgaaaacgcatgggcacaacgtgaatggtcaatccaacacgtgttgtttccgtcaatgagattgttcttgaagccaccagcttccatggcttcaaatgggacttttgtaaaggttaccatttctttaattaccataaggagcttcacatgctacattaagtaaacaaacttttttctggagaatcaaatttcacaaagacattaattacattctttttactcttttgcaggtagcatcccttgaaaagctgtacaagatattcgaacgatgctaactgaaaccgctgattgtagaagaacttttgatatgagtagcttccatttgctctaactatgtttctagactttgaatgaaagtggaaccagtttacggttaaaccaaactgtggcacacacgactgaccaaaaccataacaatcaaactcaaccttttcctgtgacttatcctcgttaattagattagtttttctctggcatgaggcgttggaatgaccgttcaccaaaatctttgtcattagcttgggaagtctctcgcattagattgtccctgtcaagtgtggaccgaacaggagcaggttgaaaagagaaagatagcgacgtagatatggctcgcctgagtgtttgccgtccttgagagaaaccggttctctcgttcccaacgcttccgctcctgtagccctgtctagaactcctggctcgaggtaaggctatatggcttctctttatcaggttcaggcttaccaattgtctttgcacctcctccggtaattgcagtgtgaatcggtctatattctgacatggttgaaccaatgaatgtccagtcgaatgagatcgagggaggaatagctcaggcacatgccagctcgacaataaccctgtagatcttgatcgaggtgttgtataatttgcattattattacatgtaacactactacctgtcaagcttctctcatcgggggattcttgaacacctctctgtgcatttcccgtttcaacatccatactcggatgtggaaagctgtcaccggacttcagagacaaatttgcacggcagacgggacatgtggaccgagaagagagccattcgtcaatgcaattagcatggaaagtatggctacaaggaggcatccaacgtagcggctcttcgtcttcaaactcgcatagacaaattgcacattcaactccgccgttgcctatcttgaacgctttaacctctgaatataggaaagccggaaaggactcgatgacgtccttgtcaatcccacgcctcactctactgtgtaacacttcatgacctcctgtctcattctcttcaatacaacatccatagtttaagcaataaacgaccaaaagtaagaggaacaacgaaagcaaaacgatcccaattatcgatgactctttactttttccattgcgacctgctgattccgacccttgctggcaagttacgtaaggcaaacattggaaaaggaagagtggcaataaaacacatgctaggatccgatggctgaaatctcttgtgaagatagtcatgatattaacggttcttctgctatataatggtcgatcacttgagctccatgtctccgtttagcgcaagcgagatagagaagaagacgaagtcgttcaacataaaatacaaatctgatttgtagaacaataagatctgcccgcacgacaacaaatattgtattcttaatatgttagatatattttggtccgaatgattagtttggccttttccaacaacgttttgacttttaaaaagttttaaaagtacaagtacaagtacaattctcacacatgtcctctatattaacttgttgactacgcaactagactttatccagacagttttgacctattcctcctacttgtagacaactgaaaaaactgtcgaaaaagtctcggaaacattgaattagggtgtaatatcattttgaggaaaacaaaaaaggatgatcatgcaaagtcaaaaactcaaaggtgagaaatcaaaggctaccatttctctaaattaccagaaggagcttcacatgttatattaagtaaaaaacttttgtcgggagaatcaaattttacaaagacattagttacattctttatactttttttgcaggtagcatccccgagaaactgtacaagatattcgaatgatgctaattgaaaccgctgattgaagatggaacttttgatatgagtaggctcattaatctaactatgtttacacactttgaatgaaataactggaactagttaatggttaaaccaaaccgtggcacgcgtgactgaccaacaccattgtgacttatcttcttcaatataagggaaacaaaagtatatagattagaccttctcctctggcataaggcgttcaaatgaccgttcaccaaaatatttgtccttagcttgggcttgatcattcatgtcatgtattgaccgaacagaagcagtttggaaagagaaagagaaagacatagataaggcccttcggtgcgtttgccgtccctgagagaaaccacctctctcgctcccaacgctcccgctcctgtagccctgcctcgaactcacggcttgaggtaagactatgtggcttctccttatcagattcaagctaactaattgtctttgtacctcctctggtaattgcaatgtgaaccggtctagattttcacctagttgttgaaccaatgaatgtccggtcgaatgagatctagggacgaatatctcagccatacgccagctcgacaataaccctgtagatctcgatctagttgttacactattacctgtcaagcttctctcattggggagtttttgaacacctcccgtttcaacatccatgttcagatatggataactctcaccgggtttgagagacagatttgcacgacaaaccggacatgtggaccaagaagagagccacacatcgatgcaattagcatggaaagtgtggctacaaggaggcatccaacgtagcgtttcttgatcctcaaactcgctcagacaaattgcacattctacaccgcctttgcctatcttgagccctttaacttctgaataaaggaaagttggaaaagactcgatgacttccttctcgagcccacgccttgctctactgtgtaatacatcttgacctgccgccccaatctcttccctatagaatatgcagtgcaagcaacaagagaccatgcctaatgatataaatattgcaagcacaacgattgcaattattgagtcagctgagagattggtttgtctaatgctgtttgttggtaccgactcttgctgacatgtaacgtaaggcaaaagatggaaaaggaagagcggcaatataacacctgatacgacccgaggaaggtgatatctcgtgaagatattcataatgttaacgtcctcaataagattctgattttgattatagcgagagaaagagaagaagaagttgttacactttagagattctgattcgtagatcaataagatctgctcgtcacgacagtaaatattgtattactactatgttaagttggaattgtttcggtccgaatgattagtttggtcttttcctcttaacgttttgactttgaataagtactactacaactacaccgataccctatctattaacttgttgagtacgcaacaagactatgttaacagttttgacctcgccctacgtatagacaattgaaaaaccatcatttgttgtttatgttctctcaaagagaatatgacggaccaataaggtttgtgtattaacttgttgactacgcaacaagactttattttttagacaactgaaattgttttgacctaatccttaatttttagacaactgaaattgttgaaagcctaaaacaaagataattttattcacaaagggaagcatgaaacggaaaatcaaaagtcaaaggttaagagacacgattaaggaactacatcagcaccacatataggacacgtggagcgataagagagaagattagaccttctctggcatgaggtgttggaacgactgttcacataaatctttgtccttagcttgggaagtctctagcactagatcgtctctgccaactgtggaacgaacagaagcagcttgtaaagagaaacttagagacatagatatggcccgccgaagtgtttgtcgtccatgagagaaaccgcttctgtagccctgtctcgaactcatggctcgaggtaaggtcatgttgcttgtccttatcagattcaagctaaccaattgtctttgcatctcctctggtaactgaagtgtgaatcgatctagattcgtacctagttgaagcaatgaatgttcatctctttgttcatttcccgtttcaagatccgtgatcggatatggataactctcaccgggtttgagagacagatttgcacgacaagccggacatgtggactgagaagagagccacacatcaatgcaattagcatggaaagtgtggctacaaggaggcatccaacgtagtgtttctttatccacaaactcgcttagacaaattgcacattctactccgcctttgcctatcttgagccctttaacctccgaatagaggaaaattggaaaggactcaacgagttccttctcgagcccacgcctcgctctactgtgaaacacttcttggcttgccgcctcaacctctgctctatagaatgttttgtgcaagaaacaagcgaccatgcttaatgagataaatattgcaagcacaatgattgcgattaccgtttccgttgggaaattggtttttctattgcggtctacggattctgactcttgctggcatgttacataaggtaacaaatggacaaggaagagcggcaacaaaaccttcgtttcgatcctatagatgagatctctcgcgaatatagtcatgatgtgaaccgtccttttgctaaccacggtggatcacttgagcttcatgtgttgagcgagagaagagaatacgaacaagccgtttttataatactaaacacattttggtttgtactcgtcacgacaatacatattgtattactactatgtttagttagattagttttggtcggaatgattgatttggcttcttcctctaacgttttgacttttgaagaagtctttacgtcactatagacgtagaacaagtactacattactcatgccctctctattaacttgttgatctacgcaacaagacttttccaacagttttgacctaatccttattggtcagtcacatccctctgatgttcacgtcctctcaatggaatgtgacggaccaataaggtttatgtatttggtgctagattattcgcaccataacaaatgtttacatcatatgagtaactaattaaagccttcaaagtatggtatataactatatatccgaacgtttcattaacttgtaacttacatatatacatatttgttgtacacagcatgataggtggtccctctccaaagccaaatagatgtgtttagtgtgtaatacatgaacaagtaaccaaagagataaactatgtttttgtcattttctagtctaattcatcatcatcatcatgacattgaataattcaatatgcctcaattcctttgtagattatttccttccatggagtagtatcatcattacggttggtaaaatatcaacactataaagataatttatttacaaagggagaactatgtaacgcaaaatgcatagtaaaaggctaattaagagactcgtattaaggaactactttagcacgacagataggacatgtggagctatgagaaagccagatgtctacacagtcagcatgaaacacatgtacacaaggtggtaccaaacgcagcgtttcatcgtctttgaattcattcaaacacacaacacattctagctcgcctattcctggctcaattcctctagcttccgtgtaaacgaatgaaggaaacgacttgatggcttcagcgtcaagtcctcgcggtggcctcctcggactcattcgagcttcctcaatgtccccggctgctgcggcacggtttctgcatcgccgaatgtagtaattaatgatataaaacgctatgaacccgatgctcgcaaacgcaaacacaattgttccttcgtttcttttgaagtatgacatgtttcgtactttaacatcttcttgagttttgtaatgggaagagatagagaaagaagaagaagaaagagagacgtggggttcacgtcttcttcgtagtttctaggtgatttctacgcgccaccgtgtttcttcgtgtttcacataataaactagtgcaatgactctagcactttcccatttgctaatattttttagtttcgtaattatagactaaacttaatttgacggaatctagatgagattggttagttttgagatatagattattagaaccgatcaaaaaaggtcgaaatatgtaaacatgatattcatattatgtgtaggtgaatactgaaaacaatattatcgtttttaattatttttctgatgtattaataattatttgacagtgatcttttgtccttctgttttcaacttttgtctcgacaatgttcaagccttcaaggtaatttattatctcattagctctattttatatgaatgatatctaaaaaattattttgaaaagaattcatgtacaaacaatacaacattgtgtataaaatgaaaggaaacaaaattacgtagacataaaattcgaaactttaatacaatcttaaatgttagatagataattatatcataaagaaactttatatatcatatatatatgctataaaaaaaggtttagttgaccgccaaagatacaaatatttttttttagttattaaaaatattttatataattcgatgtttatatacaaaatttgaagatctcgtatacaaattttgaatgtacaatctttttaatacaatttagatatcctagtttgtatcgttttaaatacataactagtttctattcttaaagttaccttaataggaaactcccaaagaaaatagaaaaataggttaatgttaaaatttctctagtttacaagaattattattctcagtatatttgaaggaattaataaagaagaattcataagtttttatttacctttaatatttcatagtgcaaatataaatacggataattttgcacaaaaaaaattatattgaaccacaatatatcacatatgtaaacaacattttacgtgaattgactttgttgagctctaattaatatcggttaacaaaaaaaaaaagattgacacaattagcacacaaaatttcttccaaaaatagcacctcatttgaaaatatctacaaatagcactcaaaacattttcttccaaaaatagcacctcatttgaaaatatctacaaatagcactcaaaacattttcttcctaaaatagcacctaattaaaaaaattatcagtcaaagttttccgtgaaaaaaaaatctttcaaatttttccgtgaatttttttttgtcaaattttcccgccaaaaaaaattccgtaaaaactttcccgccaaaaacaatttttgtcaaaacattccgtcaaattttttccacataagaaaatttaggaaggattctacgaaaactggaaaaaatttcacgaaattcaagaaagattttacaaaattcaagaaggatttcacaaaaaaaaatctttcgtgaaacccttccttagttttgtagaagtcttcctaaatttccttgaaagtttccacaaaattcagaaaagattttacaaaattcatgaaaaattatcatgaaattaaggaagggttacaaaaaaaaaaaagtttaattctgaatttcttgaaacccttcatgaatttcttaaatccttcatgaattttataaaatctttcgtgaatttcttttttttttttcgggaaaatttgtttataaaagtttttggtggaaataattttgatggaaatttttggggggaaatattgtctgaaatttatttattttttgaattttcttatttataaattttaataattaaaaataaaatatttatttgagtgatatttttgtccaaaaaacttgaaatgatgctatttgtgaaaattttatctttttaagaaaataagtaagtcacttctgaactgaccacatttacatatccttattccacaaaagctcgatcataaaaacaagtatactcactgaatcttaatatatatatatatatatatatatatataccttgttttgttgattcctttaaattagttggttataaagggttattcaaagagaacttcatgatcagttagtttgagtggcgatttctagggttgttttgttttacattgttcttcgtttatacttaatcttaatgcatatggttgacatcaagaattgattggttattccaaggaagtagaatcgccaaccgtgtagtttacttgcttgaacctagacttggatgagttagatctcttaataagcatatactattagactgtgggcttccaactcaaaaccaattgacaatgaatggagagacccatatactatatataccacttaacatcctactcaacttccgatgtgggacaatatccttaataggactcttcgaaaatctagccatcaatcttgataagctcgggcatggattggtgggccaagtattgggatgggccgatgtgaattgggttgagtatgtgcggatcgggctccaataccatattagactgtggatttccaacttaaaaccaattagcaatgagtggagagactcatattttatatataccactaatcatactcatcttctgatgtgagacaatatccctaatacatacccattagttttagtgtatatgtgaatttacttgcttataacgcatgactagatgtgtcgtccagcgatttgttgagtaatggtgtatctagaccttacataattgattctgcaaatggtagctcttttattcatttgtgtttctagtttgtgaacatagaataaattattacatatcttagatttctttgaatgaaatgatcatcaatacccctgcaaaatccatgaattcccaacaatcattttattgactttttcttgcgtttctttctcttgtttacatttttaattttctattttcattcgtgacaaacccccaaaccaactttatatatttttcctagctttattctcttttgacgatttagtagcgctctctctctcattgaccaagctttggatttgagatgttactcatatatttctattttcttaaatatctttaaatctttggttttctaatatatagaacctttttcatagacatataatttcaaagttataaagttatctttttgtttctataatcatacatttcaaattataaagatatatttctaattataaagatatatttctttcttccaaaatatttttatatctttgattttctactatctagtggttaaaagttttagatatcatttcaaattataaagatatatttctaataatatatgtatattttcattttcataagttttttaaaatctttgacttcttatatggttaaacttttttttatagacatctatgtatataaaaacatataaactatcttctaaatactatctagtaatatataaagacacatatacatttactcacatagacatccaaaaacaaaattacttgaatctcaattgaattgtcatttaaaaaaaatggccaaaatatcatcacttttggcacttcttttcatcattctatcttccataatgatcaaccacctccatgtggcgagttccacaaaatggtgtgtagcaaagatgaacgcaacgaatgcgcaactacaaggaaatattaattttggatgtagtgaaggagttgattgtgggccaattcaaccaggcggatcctgttatatccctaatagtcttgtaaatcatgcatcatttgtgatgaatgcttattatcagagtcatggtcgtaccaaaaaggcatgtagcttcaaaaatactggcacatttgctgttaccgatctcagttttggtaaatgtgtgtatgtgtcttaaaaatatatatatttggtttcaatatctgatatgcacaataaatgatatgtgattacattcacatttgtttttacggatccaagttttgataaatgtgtgtagtgtcttaaaaatatatatttggttttaataactaatatgcataataaatgataggtgattacaatcattcattagtgaatacaatcatccattgatgaatacaattcgtaattaatttgattgtatacataagacatgaaaaacgagacatatccaaattgcacttcaaaatcccaaaaaataaatatatttataaagaccactcagtctgaacaaatttctttcaccactcaaaccacgaggctcaaatatataccatcataagttcataacttaaccactcatgaaaatctaccatcacgtctctattatatttagtctccattgaaataaaaactttctaaactgtattttatgcatttcctttagacggttgataatacatgagaccaccccaatccttgataattccagaacaataagctcatcaaaggtttaatagatatcaacttgcagtactggtcgttttaagcaattctaacaaccattaaaatcagaaatagataaactcacaaagagatcacaacatatgtaaaattgtttatttttaaccttcgacattagaactcgtgacttttgagttttattttgttaaataaaatctttaatacattaatagctagagagttacgcaaacaagtggtaaaaatctggaaccttctatatacagtaaaaatatatacaagttaccatttcggatatatgacggtgtttcacaaaccggccagatgtaatacaataaaccttattggtccgtcacatcccattgagaggacataaacatccgagaaatgcgagtggaccaataaggactaggtcataagtgtcggaaaagtcgttttgcgtaatcaacaagttaatagagagggcatgagtaaatgtagtacgtgttctacgtctacagtgaacagacttcttcaaagtcaaaaacaaatctaactaaacatttactgtcgtgacgagagacatgaaacggcttgttcttattctcttctatcgctttaaacaaatgcctaaactcaatgacttgctatgcacgcatttacataactagagtatcaggattataaaccaaagtattagagttaagaaagaaagcagcacaaagtcttcatggcatgaccttagtatctctccccgaacctgagaaacagagcaccggttccacgattgtgacgtacagtatattcagctcgcaccataccgagtttcacacccaaaccatacgatgaaccatgtcccattttcctgtaaagccctgttggattccctttcacatcctttgaacttcccaaatcgtttccatgctcagcaaatgcatacacatgtgtgttcttgacaggaattctaatctcagcaccaagctatatacaattagcaacataccaaaaaaaagctatatacaattagcattatcagattttataaactgaaagaccaaaacaaaagcatgtttttcgtaattatatttaacctcgagaatgtttttagctgcaccaagttctcccatgctgtatcctcgaacggagttaggtccaccaagagcaaaaacatcatagcttggaagatcgcctatgcagccaccgtaacgaccatggaggactagaactggtggttgtggtttatcggatccttcttctacttgcttcagctgaatgaaacttgttaatgatagttggtggcggttgaagagcggaaaattatttcctatacctaagccttgatccacctgcgatttgtgttagtacactattaaagctctaatttagttaaaaacaccaacatcaagggatttgatacaaaacctgaaagatattcttctctccaacaacagccccattcactagcttggtgttgtctcgggttatgttggcttgtagagtggcaatgtggtcaataccggtaccacttagagttgttggaggtccattaatactgattccaccgtcaggcgataacaagagcccattttcagagattcgcctgttttcatctcgggttattatctcttcaaacataactccatatgtgagttctctctgacgggttaagttctggacgtgaaaaaaaaggtgcttgtgagagatgattacaagttgactatctatatatataggagacttggttacctcagttatagtagctttaagacaatctcgacccacaaacattggaggcactagatcctcatagcctggtcctccagtgaacactgggctaagttttctgctattgaagaagctcgttttgaaggtacggtttctaggttttttaacagcttccagaaaccgtacatactcaatcttagacaaaagatcatcctaagagaaaaccaagcgtattaaaggatcaaaatatcaaactacaaaataaactagataggtatcagaagcatatgtaaaaacaagtgtaccagcttaggattaaagatgttcctaatggtcacagaacccatgagagactgattagatccctcgctatttggacgtcccaaattacagttccctgttacctcgaaaaaatcctaataatgcaagataatcaaacgaaggacatagtaaattcaatagaaaactcttataacataaaaaagttgccaagtttagtagaagacaatacataccaaagaaggatcaagaccccacttttctactctctgatctgtctcattaagcttgatctcaaaaacaataccattatctttctcatctgcatgtggtatgactaaggacttaatcttcctcacagcttccttcacagcttccatcacaataacctgaacaacaaagaagaaatccattaatacacactagaataacttaaggttcatttctcagaggaatttcatcaaacacttggcagacatcaaattctattttacaattctactcaaatagaaactctgttaaaagccaaatcctaagctaaactcaaagcaacgaaagcaaaattctgaaatctactactacaacgtgaacgaatcaacaaggcaacaccaaaaaatccactgactcagatacaaatttcagtctggaatcgtaatcaaacacatgtttaaaaccaaaatccaaagaaaaatagctctctgtagtgattttggtagttgattttgatcttatcgcttgttctttgcgattcaagttttgaaatcagtacaaagaaagaacacgagagaaacaagcgatttatgtacaatttctcgaagatcaaactcgataatgcttcactctcaagaggaattaacaaaatttcaggttacagaagaagagattcaaagctacgtacctacacgagtcttctagaggttgacgaagaagacgaagaagaagaagaatctagatctgtctctctctctactcgatttcttcaaacttgtagctctcacacttctttctctctatattgtttgttactaccggtaagctctgtttggaagaaaacatgcaatcgcaaccgccaaaacttctttgcgttttgattctgcatttgggattcttctcatttatgggccttaagcccaactcaatgactgacccaaataactaacactaagcccaatcgtaatccaacattttcgctttatttatgcattttatagacacaagtgaccagtaattgagtttagggtcaaaagattcataaagttttcacagtcataaaacaaaccaaaaagttggtaagaaactgaattcacaatctgctccaatctcaagtttacaaattggtcttccaactttttaaaactaccatttgtttttcaatccttaatgacttctaaaatcaatgataccacaaaaactcataaaagtctttgttgtattatctttagcctctcccagcttgaattgctgccatcaaattagccatgaagaaagcatatccaacagcggtatgttgcggagtgtagttgtctccaagtccaaacttttcaaagttgagttctttgttcacaaacttacccggcaacgaccttttcgacatagcttcttgccatatctccaagaactcctccatcaatttttttgccattcccattgatgatataggaagatactccacctaaatagtacacacacataattataggtttcaaatgaaagtagtgcataatagcataatggcataagttgatagcactaaaaattcgtataatgaaaacttgttgcatggaaaaccgtagattatgcaaattttcttaattgacaaattttctgcctaatcacattagaaaccgtcattatgtgtgttaccaatcatagctaataacctttagttactgagttacattacaaactccaaattatgaattaactagagtgttagataatcattaacattgattattaatatatctcaacgtactcaaaagatataaaatttgttacctccatgactacgcctctaatggtctcagcatgagtaggaacaactttaccaactctcaaacgaaaatccccaagttgatactcaagcccttcaaagtaaaacgagagtttgcatttgtaagactgaaggctctccatgatcatttgaattgaagaatctgcttccacgacgatcctttgcgacctgatgacgaaatagtacttatctggctcctccggaagcgaaattcctacaaattcacgcgggaactcagcttgattcgcctgatcttgcaacatgggtttgtaatagttgagagtggctttccatgttccctctttgacgccattgagactctctatgctttgtgttacttcgtttaggatttggctgctaaatgttgatccctgatttggttgccaatgcaaaagcctggaaaagtattcccccaaagaaatttgaaaaaaggttaacgtattataaaagaaattacaataatggttatttagtttatgtaatcatcaaacctaccatttgacgggcatggctaatggaggtacaacaaatttcacttgacaacaaaattaaaaaaaaatgatctctattaatttacaataatacacaaacaataatatcttatataatatagttgtattcagatatataatttaccaaaaaacaaaatgataaaactttacaataaagcaaaaaattatttaatcaaaaaatactttttgatagaatttcaatcagtgttcataaggaaaatacatttaaatgctcaaatggagttcatttttttaatcatttctttcatttgaaatagaacgtggtctatatggaaaggaaaatttatttttaaaagtaatttacagaccaaaaataatacatatgcatcaactttggaatcataatacaaatttcattttttaataaataattataacatagagaataattagatattttagtgcatgtgcacaattacataagtgtactcacccttatcaagataaaagggaagaaaatataaattcttataagaaaaaaataaagtaacttttgactttaaataaaaaggaaacaaatctaagaaattaatgttataattaaattatttaccaaaattaattgaaaaataagaaacatttttttacaaaaactaaagaaattcattagatctgctatgagtatccgtttgggatcacacgttctgtgatagtagtagatcgacaacagattaactaaacgaatcaaatatgaaatatatcacttcttgaatacaatctaaatataaaattcatacatctcggataaacaactcaattctgcttctaagtatatttagtttataaaacgatgctttttatctttatcttatctaaatcattttaaaaagatgagttgaaggcatagtaaagacttttaggcttaataatcatcgagccataaaaacaaaatacaagattagattgcgagaaacacttaccgatgaaagagatttctggtgatgatcttcttgggaatacgtagtataacgaaaaattaagactcgtacactgcattatatagagaaaagcataggagtttgtttgttttactaagataaaacgacctcgtttaaactacctcatttaaaacgacttcgtgtaaaattatgtgtttcttaaaatgaccttgtttttaaaaaggttttcttaggaaatgagtggtgaaaacatgaatgaatctaaccgaacttatccaaattcgaataatactaatagtttaaaatcttataaatagaattattggaactgaaccttaaatcaaatttaaattttatgaaactgaacaaaattaactgaacgaatcaaaattcctaatgtatatatctcatctaatcatctaaataaaaataaaggtttgattcatgtttcttctcatctttcgttcattttttatgcatagtcatgaaacattaaggtttcattccacccaatgatataatttttttttatcctagtacactcaaaaaatgaaaaatttatatagaaataaattggaaattgatacaattatataattgaatgatacgcttttgcttaatactagtcaagatgaaaaaataaaaataaaccaataaaaaaaattgagctgaaaatagaggaaaaataattacttagttgataattatttgtttgatataatgacattaaattgtaattttaggtaatcactttttgttgatatttaaaatacgtttttaaacaaaaacaaaaccgaaataaaaaaccaactcgaacaaaaaccgaattgtgtcaaaccgaacagagaaaaaaaaaagttttccacaagtaaaaccgacaaaataaaccaaaccggatcccaaaaaccataaccaaaaaattgcattaggagccaaatatttccgccacttaaaacatgccacgtaggcacgaatcgatcgatgcaataacttttgtaacggctacaaacttctgatttcatttttgaaattcttctcttccgtctcttttactaattcccctttcttcttcttcctattgaaaccctaaattctcttcttgaaatccaaatcttgtttcaagagtaaaccatgcggagcgagagaattgattcagatgaagcagaaacaaaatcgagaacaaatctctcgcaagaagtcgaagaatatatcaaagatacaattgatcattctttaggtcttccgatctccatggaatctcttcagaagaagctttatacggctgaagaatctcaacgccgtcttcgcgaacagtatcagggtctgatttcgcgattaaaggagaaagatcatgtaatcgatcgtgttagggttagtaatttctttctgggtatctttcgttttctgggatttgattgatttgaatctgaatctttttttttttttttttttttataagtctgaagcgagtatgaatgcgcaagcgttgaagaagtttgttgaagagaatcagaaattggctagtgagtgtgggaatttgttgagtcagtgtaagaaattggagaaagagtgtttgctttatcatcaagatcgtgatgcgttgatggagtttgggaatgaatctgatgagagagctagagaagcagaagctagggttcgtgaattggaggatgaaattggaagaatgtctgaggaaatgcagagatttaagcgtcaaatcggagatggtgaagtaagagtttcttcatattaaccctaaattttctttaattgggttaagttgggtttagaattgcattgccctcgagtaaattagtttgctttttgcacttgctggtttatagtttggttagcttgttcttgatgaaatggttactcaagtgctattgtcttctctctactctttaattagcacatggggtaccatcatttggttttctttgttaagttgacaacttgatttatctaagttctcatgaagtttgacttctcattgagtctctttgcagaaaagtcatagaatggtagatatgatgcacttgagagagagactatgctagtccacattaagtttctcttagtactatgaaatataaaatgtccttccatatcgcttttctcgctgaaggtgataacttgaggtggatatcaaatgggtttgtcatatatcctctattgttagttgttttcaatagcctgaggtggataaaggtagttgataagtttttggttgtctatgtgcttcagagattgcttgttccatccaatgtttaatggtactaatacgaggtgcatatttatcaaacaaatagaaattagaaagatctgttagagtcaacattagtaagaaaatgtatctattagctgctacttataatcatttcaatatagtttctttgtggtctgacagaactctgtattatcatttcataagtatccatgttgtgttcctttgcagaaagtcttacaattgttgatattatccagtagatgcacttaatagagagactctaatggtagtccacattatgtttctggtttttataattgtcagtccatatcgttttgctttctgagggtaataaaactttggattcttctgatatatcaaatgggtttttcatattattcatatatacagtattgttaggcgtttttgatagcttgaggtggataaaggctgttgataagtgtttgattgtctatgatgcttgagagattgcttgttccatccatgatttatctttctgtatccttgagatgtagcatattttatcaaacaaatgaagattagaaagatctgttagtgtcaacattagtcagaagatgtatctattagttgctacttttcatcatttcagctggaaacatagtatctttgtgttctgacagaagtctgtattttcatttctctctaaaggttgaaaactgtactacaccgttagaagaagatttgcttgattcagttttgggatcactcataagcaaagatgaaactataatggggcgtctcttcttggaggcaaacatccacgaccaatcgtgccaagccttgctgagcaagtgggatcacttaaagccttcaacgcaaaaggttctttctttagtttcaaaggcaaagaaattcgaaaaggaaaaagaatgcatcatcatgaatctcgctaaagctgagcaagaggtaataatcataaacgataacactctattgttcttaaatgattccacttgactcacaaactttttacaggtggaacttgtgagcacgctaaaccgaaagctggataaagaaaatcgtaagttgctaaggcaacaacaaagccctctttgctccgcagacaagaaccgaaacagcgcatctgcaaaggtaaaagtaccacaaaaagaaagaagtaaacactgcgaaggaaaaagcagctatgtggactctctctttgattctaacttaggagtgttgttctgtttgcagtcaaacaagagaaagagtccgaagacgatgagtagcccggtcgagaagaggcttgagtttagcagtccagaaattagcaggaagcctctatcacctgtatggaataactcaccagattctaagatgaacaacaattgatgataaacaaaatcaaacaactatctgtatcattcatatgtgaaaccggattatattgttgcttctctgaagctactaacaacatgtatcagtattgctatgaacaaatttgaccagaaaatcatgttttcaaactggtaaataactagcttattatatacaacagcagtgtaaaactgacatagcttactaaacactggtgtttaacatttcttacaaaaacgcaaccgttttcggtaacctacaacgacgtcgttgcgtctacaagaacagtgaaatttatacaaacgttgtcgttttcaagtacattttctaaacgacgtcattgcttctacaacaaacagtgagaatcatgaaacacgtcgttttaaaactaagaacgacgtcgttagtctattccaacacaataaatgtgaaattgcgttgcttttcgatttcttcttcttatccaaaactctctcagtcatggctcttcttcgtcttcctggcatttccctccaaattctaggtcacaaatcaaaccagaagaaccctaatcccaatgttgccttcaccaatcactctctctctttatctactccttcactatgtcgtctccatcgtcacgcgacgtttccagactcaattccagcaaaatccagaaacctcacttcgtacttctccaccacaacacaagagccagtcctcgaatcttcttcttcttcttcttcagctcctgaggtagtagaagaagagatttctaaaaccagattgattgctcagaatgttccatggacatctacacctgaagatattagatcgttgttcgagaagtacgggagtgttatcgacattgaggtttttggtttttctcgtttccttcttttgaaatcgatgaattgaatcttttgtgttttggtttaacgaattgtgtttgatttttgatttgtagatgtctatgcataagaaggaaagaaatagaggtttggtgttcattgaaatggcttctcctgaagaagctgcaacagctcttaaatctcttgaatcgtgtgtaagtacaacgcttcctacatgtctatattggaatactatcattgagatttggttgcgttatgtttcatattatctggctttacgattagtagaagttatacattgtgcttattgggctcttttatgttgcagttatctcaatttgattgattattgtatgtaagaacattgcaattcgcttcctccatctctaagttagcacagaatcattgagatatttctctcatttacattactttatgagtagtggaagtgtacattatgttattagactctttcaggttgcagtatcccgtgtaaacaatagatttttctggcctaaaacttgatggagcaaaattttctcttacttagtctgattgactttgttgtttttcggtcgatgctctcatttggttgtgtttgtctcattctatttgcctttatgttagaagatgttgtagtggtagtacaccaatcgtatcatacgttagtagaagttgtagttctattaggtttggttttcattgaaatggcttcccctgaagaagcttctacagctttcatatctcttgaatcctatgtaagaatattgcattcatcgcttcttttatgtctaaattggcatataattgttgagattttgctgtgcttgtctcatttttatctgtcttttagattagcagctgctgtacattgtgttaatagaccttttcatgttgcagcatcccaatttgattgatttgtgttttttttgtacctggtctttctttgattttcatctgccatttaattgtgtattgttgtttaggaatatgagggtcgtcgtttgaaggtagactatgcaaagaccaaaaagaagaagacatatgcgccgcgtgagacgccttcaccagtgcctacattcaatttgtttgttgcaaacttggcatttgaagcaagggccaagcatcttaaggagttctttgatgcagacactggtaatgttgtctccactgaagttatattccatgaaaatccaaggaggtcgagtggttacgggtttgtctctttcaaaaccaagaaacaggccgaggcagcgcttattgagttccaaggaaaggtaaatccaagctattctaaatgataatgatctaatcataatttaaagcattctaggcttatcagttatgttaattttgagcaaagttgaagctcattattaccgtctgatatagttattgaatggaataaaaaatacaagagagtgtttatgttttggtttatttgggtatgttgctgataccatttgagcttagggaccatagatggacccgtaaaccgatttttctagtctttagactcttaatgcatcaatgagacaaaaatataaatgggtttctctgagccattatgtgggtagatactagacactttaagagtatatggaccataatcccagaattgtagaacagaaagatttatgacatgtttctaataccagctctagaatatgagctgattaagttggtggaattgactgtgtgaaatgaacatacgcaggattttttgggaaggccaatccgattagctaaaagcaaacagtttgtgaagttgcaagcaaaagaagggttgcagccaccagaggaggaagcagaggaggaaccatctcagtctgagacaatgacccaagagcacgaaactccggctgcataaaacttagaaggtagtaaaagcttaatcctggctctgttgtatcatcaactttaaactctgaattaatcgaatccgtatatatacttagtcttcgttgcaggatcattgttggagatattggaattgacgaagaa

SEQ ID NO: 556 - DNA, 83369 bp, Arabidopsis thaliana
aagcttctgaaactatccacgtgattagccatcttatcatttaacatgtttggattttataattttttttatgtcaatacacgtagaaagaaaaagaaaaaaaaaaccaatatatgtaaacaagaaaaatataagcttttgaaaaaacaaaatatggaaataaggaaaatgtaaaagtatactttcaacaccgataagtgcatctaaaaaagtatcggagcaaactgaagaacaagctagggttataagaaataaacctatggagccatcaaagatgcgaaaaatccagagaataacacagttttcagatgataataatagatctcaaagagagcatattcctctagatctaatcgtggagatagtctcaagcctgccagcaaaatcgattgtgagatttaggtccgtttctaagctctggtcttcaatcatcaccactccagatttcaccagctcggtcgtgacacggtccttgtcatcgcgtccttgtgttctgctaatcttccaaaaacacgacaagctgtttttttttgcttctccagtacaccagaagaagacttgtcctaacgtggagaattttcaatatacaatccccaataatggtaagcttcaacgttgtgaatccgttcacggcttgatttacttggaaacttctacaaatgtcatgtttatcagaaaccctatcacgaaaagcttcttcacgttacctaaacttgatagcaaggaaggcagaccactaacgggatttttgggatatgatccaatcaacggtaaatataaagtactatgcatacttaaagaacgaaacaagattggaattcttacattgggagctcaagaatcatggagaatattatctaaaggtttccttagtcattacaaagtgacaggttatgcaaaatgcattgatggagtcatctactatgaaggttcttttggtgatggtttaagacaagagcttgccataatgagttttgatttaagatctgaaaagttcagtttgattaaacatccgaagaaaagtagcatagctacatgttggtcatcttatgagggaagattagctttggtaagttccattgcttctggagttagcttatggattttggaggatgctgataatcacaaacaatggatatataaacattttccttcacatcgagaattcatcaaagagagatggaagttgaagggtgttactcgtactggtgaatttatttacacatcttacagagcttatgtacttaatgttgaaggaagggttttatatcaatggttccgtattttgtatgttgatcccaagagaaacagtatgagggtagttatgcatggaggaattgcagttgacgatattaggcgacttgatgaagttggatatgatcttatgaaagacttgactgtcataccaaatcacattcagatttgaagctgatcttaccatgtcgttgtaagagttttcttcatttttcttttcttaagttctgcaaattttgtgatgatttttgaatcattgaatcccattgaggggtttttgtcttgatttaagaaattccttataaaatcgtggtagtgaagtaacacctgactctaacgcaagaacatcactgaaatgtgtagcttagtcttctatattggttacatatatagtcatctaatgttcttgaataaaaatacctcatgagcagaactccaggtcatatttttcttaatcaagagaaatacattttgttatgatttgataagttccttaatcccaacatgtttttattgtgtttggaagacagtttgattacctaagtttgtaggaggtctaggcctgaaatatcactttcatgtaataaactagaacaaactattttatcaagatggaactaatatgcactttaatattaatacataatacttttaaaaatggtgaaaaataatgagcttatctaccaaaaaacagaaccagttgtttatgatggccaaaagtgtcataattacagtccctagttgctctcatgtgtctttcagatttccagctcttgaaactttgtcaatgtaccaagtgagatgatgatgatgttatgttttgtgaattgtcaacaggtcctgaattggagcgcttgttgaaggagctgatttggactcagaatcaactggatgaaaaaacagtctatgtgtatccacgcatgaatgatttttccactggccagctcatataccgaccagaatgattcttcttccctttcagcaactaacggctctgcaaaagggaacatatatagtgatatataactgatctgtcgcaagaacatgatgaccatttcttcctagtgagtattttgagtgaggggggagtttttagccttgctcttatgatttagggattttcttattcatgacaatattggacccctaggtagtactaataacaagagagggtttttgttttcaaatgttggtttactggttaggcttttattctccaccatggtatggttcctataaagctacataagaattcattttgaagtttgtttggtgtgtgaccgaagaaccaaaaaaaaaaaaacagttgctcattctttgtctacttatctcactattcggcaatgcatatacgtcctaatctttgttttgcttatcttagttattctatctctctcccttacctaaaaagctggcttcaaaggacttgacggatcgtttataaaacagactagtcataaacatagatttatattcgagatggcttcaaatacgaatcttaaactgtttatagtatatatagtatctaatagctgcgggtgttgtgaaagggaacttagtgttgaccatggtcatggagtttaaccaagaagtttgttgaaccaaggattcacacaatagatttgtttagagagggaaaacaaatctagtaatttctcttcattaggtattctatccaagactcgattataagaggggttctaatctcttatgaaatacattagggttttgctcaagaacagaaaaagaattagagttttaaaaaggtatagctgcatccatgatggattgcctacgtaccctgtgaagggatcaagccattcgtagttttcaataggtataaagttctatgtttcttgtgaatatcccaagatctccccctttttgtgaagtccctaaggcactttatataggatccttaaaccgcctccctagcgatattcttcggaagattcttatttatccttaggtcggttctagaggataatcgtcctaaggatattctccttattcttcggaggttttggggagatttcctgatttcgacattatcttcaaagattctcctttatcatttctgaaagtcccataaaagatcccattttaccggaaatgatccttggagaatgaatggtttttacaagtctttgcctcgcgtgttcttcacggctcggtggtcgtttgagaggtggcttcggggcaaacggtatgtaccggctcggggcgcgcttgatgactgtccattaagctcagttggctgtctcccgagccgatatagatgtttcccgcagcgttctcacgattggttcgggctgtgttcatatgattaacacccgagccattttacaaactctcttcgggacggtcgatcgaataaggtcccgaggtgctttgttctaggctaggggccaatcatatgtttaaccatgaggtgattgttattcttagactgtttggctcggtcttgcttgtgggggaatccgaccccaacaaagttgtaccttgacggaagagagcacgaatgggatcggtgcgggtgtctggaaagtgcctgaagaaggttcatgtgatgatcaaactctggaatgctactgggagtactgactgtaccaaaacctcctccaacagtgccacagggaacaagcaagccccatatcaatgtgtgatgaagttgaaggagcagggtcgtaaggtggacttccacagttagaaggaggcttgtgtgatggaggagctccatatccttcgtcatagtactgatttccggatctgaataaagaagcatggcatcatttggaagtaagagatcacatgagaataccatccctagaaccgagagagaaaagtttatgttaataaatttttattgtataattgatattgaaaaacattaataaacagtgttcacataaggtgtaaattcaccccaaaagcactctaaaaagtaaaaaccaaaagagaaaaaaacatagaaatggttacttaataatataccgagtttcatctatttacttaataatatacggttatttgatttaccggttaactaaaaaatatctggtttaatcgtatttattgttggcaaacacaacattgggcgcgaagtggtttttgatgcccttcaacaacatttgggggtttcatttcaatcgcatttctagggtttctttctctacgattcaatagattcggacgaattgggggattctgaccagagagaagctatggaggaaaacgaagaggaagaagaattgcggccaacggcgctatacacggtcggtggttcagacgaatttacctttgtttctcccgatgggctctccggtcaatacacgggccctgatcacgacggcgtagttcttcagactgaaaatccggcgccgactaactgtcttgcttactacttcgaggttcatatcatgaatgctggtgaaaaaggagagatcgcgattggtttctccaaggaacacatctatagcgaagggtatcgttttctttccctttcaattcgcatttaccacttattgcgtgatttgatactcaatacaatcattgattctgtttgatttggtacctgagactgagagaacaaattgggaaataggtttagatacaatggtagatcagtagttcaaatcactgtttcaatggtttggattcgttacttggaaataggttatgtgatttgctgctcaatttgattgtgttggctgttagatctggtatcttacaagttaatgggagatttgctttgttagatgttttcacctttcagtaattaagcattccaattcactgtttcatgtttctctgtaatgttagatatactgtcagaagctgtgcctacattggtaacagtggactcatatgctctcaaaatggagatggtgatcgaactgttgctaaagccagtgacacctatacaacaggtgatttagttggttgcggtatagactcggtttcacaagaattctttttcacgtaagtaataactgtttccctatctgaacatgtttcattacaattggaaaagtagatatcaagatacacaattcatttcttcatgtcacaatgtttttgacatgtccctgcgtatgttttacttgctgacatctatgactacttctttgattataggaaaaatggaactatcgtagggacaatccccaggcaatttaggcgtcctgtatacccgacaattgttttgcatagccaaaacgaagctgtcactgtcaatttcggcggacagattgcgttttcttttgactttgaggtaaggtcgtacttttcttttcttgcatagtcggagaataactattgagtaagcagaataatatgcatctctcacatatgtccatatttgcatgtatgtggcatatttttctgatacaatattctattatctgatccacctttatttcagcattttgaagaatcattgagggttaaaaaagaaagggaaattgaaaagatttccatgtctcgcagcattagtcatgggtaaagtgtcttttcctgcctgttcttaattgtaattcttgtttctgtttgtgctaaagcttcctttttccaggcttgtaaaaacctaccttcttcgttatggatatgaagatagctttagagcttttaacctggctgcaagtcgtcatactgttattgcacaagaaaatagttttgatgagtatgaattgcatcaaaggaaaaagctcagagaggtacttttcactgctatggttatcttgctgtaattttttttttattttttttctgtgaggtacaaaatcaaccaaaagcaagctacattgctacatcttttctgtttcatatcgaactgatccatgcattctgtttgttaaagcttataatgactgctgagattgatgatgctattgctgcactcaaggatagatatccccaacttattgaggtgggctgagtaactagttaatatatcgagtgattcacattgttaacattccttgaactattttaacaagctgcttgtatcatatgcagggtggatcagaagcttattttcttcttatctgtcaaaagattgtcgaattagtacgggtatgttctttattccttgtatatttgttacacatatccatggtgtgtttctctaactaactacaatgcagaaaggagcaatagcagaggctaagtcatttggaaatcaagattttaaagactttagggattcaagcctactaaaaaaccttttcgatgtatgtagtgattctctaactgttagattaggtttctcatatttgagtcactaatagttttgtttttctctatttcaggattgctctgctttgttcgagtgtgaaactatagaagaatcaggtgctgcatatcttctaggagaaacacagaagaacatagtagcagctgcagtcagtgaagcgattctatctacaaatccggccaccagagaccagcaatctgcttcacttgagcgagtgcttagacagtttgaagccacctgctcactctatgctcgtgaataaaatcttgactttttctgtttttctttttatcttttctcttgatagagtcattgtgtaagctcaaatgttctaaaactagcgatcatactttaacttgattcacaactatatacgagattatattggagcttgaaaatttttatttacaagtatttatctacaaatcggcaaatattgagctgctcatactaattttgataatttaatcggctacaaattttaatgacatgttgttgttagctgtaagttaaaatatgaaatcgaaagtcttttgtttattgctttcaacttaagcctttgtgattacaagctatgtctatttatacatctagattgatttaacctagtgtcttcttgatttgcatagctgtcacttggctgttatgtggcgtcgttgtcttcacatgattcaagagcctcatagcgattcctcgtcgttacttccgtactgcgtggagataaggaccgctctgcaacttttctgcttttgtcctttgttgttgcaggttgtcgttgcactatgttgggcttggctcttggattgggcacttgtttcggattgggctttaatggttttgagcccaattccaaaactgtgtcgtttggagctgttctgttgatactccccctcaaacttggaggaggtgggaaatcgacaccaagtttgaatcggagagattcgaaaggagccttaacgagagactttgtaaatatgtcagcgagctgtagataacccgggatatgatggacgatgagctcaccaaaagctacctgctctcggacataatgatagtgagttgcaaaatgctttgtccgagcatgaaacgatggattcgctgtaaggtaaacggcagagaggttgtcgcagaagagttcggggagctgtaactgcggaacacccagatcacgaagtaaattgactagccatgtgatttccgaggctgtatcggacatagagcgatattcagcttcggttgagcttttggcgactgagacttgctttcgagaagaccaggagattagattgttgacaagaaatgtacagaagccaccggtggagcgacgtgtaccatgacaaccggcgtgatcactgtcactgtaagctcgcagttgacaatctgtgtccttgttgaatgaaattcccatggttgttgttcctctgatgtaccggagaatccttttgaggagaagaaaatccgacactgtaggggcgtgcatcttttggcacacgtaattaacagagaattggaggtccggtctagtaagtgtgaggtagtgcagcttaccagccaaacttctgaaatatgatggattgtcgaagggctcggtttgattaggtgctctctcaggttgaagtggcaatggtgttgcaacaggagaacagttggatattgcagttgtagctagaagatcttctgcatatttctgttgagagagaaaaagaccttttggatgaaattgcgcctgaataccaagaaaataactgagtctgcccaaatctttcatcttgaactgcttattgagctcattaagaagactggagagaagttttgagctatttcctgtgatgaccatatcatcaacgtatagaagaagcatgatcacatccttgttctttacgtagacaaagagagaagggtcagacatactgcaggtaaaaccaaaattgagtaggaatttgctgaatatgtcaaaccaagcccttggagcttgtttaagccatagagagctttatgtaataagcaaacatgatcaggatgagcattgtcaatgaatcttgctggttttctcatgtagaccgtttcagtgagatctccatgaagaaagacgtttttgacatccatttgtttgagttcccattgcatgatagtagctagatgaagcacagctcggacggttgcagatcgaactaccggactatatgtctcgaggtagtctattccttcttcttgtttgaagccttgagaaactagtcgagctttgtacttatctaatgagccatctgcattgagtttgatcctgaaaacccatttggagcctagcacatgcatctttggtgtaagaggaacaagtgaccaagtgtgtgtttcagagcaatttcccatttcctctaccatagctgcaattactgttttagacataggatatgaagctttgtgtgtgagaagagcataccgttgatttggtttgataattcctttctttaatctcgtggtcataggatgagtggattctgtagctgaatgaagaatactgaaggttggttgttcatgcctagaggatgatgagagagcgctgttgccaataggatcaagatcggagcttgccgtacactcagaacactcctcatttcccgtagacagagtttcaatttcttcagcattatcttgagaaggaatgattcgcaatggtgtaacacagaccggttcacttggtatgtcttgattgttgttatgaggtgttgtctccccctctgtaattataatagcaggactgcactctaatgaaaggttatgttgttgattttctgtgatgacagggacgtttgtaccagtattagagccatcagtttgttccttttccaatggaactgaagagcttgagaagccttttaaccaagcgtcaaacatcggagttggggaagaatgctgcaggccagtgtaagtatcaatgaaaggaaaagagccttcatcaaacacgacatggcgacttagatacactcgtctagttggaggatagaagcagcggtaacccttatacttatccgtgtaaccgagaaagatacacttgagagacctcggatcaaatttattgcgagcataagcacaaagtgtagggaagcaggcacatccaaacgttctcaaagctgaataatctggtgctttgccaaacaaaacttgataaggtgtggtagagctgtcaagagctgttgtgggaaggagattactcaagagtgcttagagagtttggagccacctgctcactctatgctcgtgaatgaaatcttgacttttttttttcttttttttttttcctttttctcttttctcttgatagagcctttgtgtaagctccaacgttctaaaactagcgatcatactttaacttgattcacaactatatacgagactttattggagcttgagaatttttatttgcaagtatgtatctacaaatcggcaaatattgagctgttcatactaacttttgtaatttaattggctacaaattttaatgacatgttgttgttagcttctcgctaaacaaaattgttgacgtggtaagttggacggacaggattttattttagaccatggattagtccgagcgtatatattgacgattgatatatataaattacttcactcaatttaaaattcagtttaagcttgttgagtatatatatagagatattaatttctttaataattaattttttctaatattttcctctttgaattattatttttgttaatttgggttaaatttggttaattttagttattttgaaagaaaaaaaaaacacaacgaatatgataatattttggttagttacggttttcatttatttaagttttaatctttacccattgcacattgcaccttaaataaataaaatctctacccattgaacatgctctaaaatgagttatcgaccgtcatgttatcgatacacagaagggctatgttgtaggagatttttcagattgtggtttgacttgtatgtatttgacatggaggtttgtcttgcaaaaaaaataaattaaattgaggttttttttgcacaaaagccttatgttttaaaagagagttatcgagtgccatgtcatcgctacatgggaggactgtattgcgggtgacttttgagattgtgagattgacttgcataattcggacttggatgaaaacttgcaaacgaaattgacttgaagggttgttttgcagaaaaccctgataccctaatgttaactaagatacaaatctgttatcgtatgagaaatgcttttaccatttatttattaagattaggtatgtagattcaaaatcaagtttatcatgattaaacaaagagttaaattgtatttgctaatggaatgtgtaagatttgaattctgttttaaataaaagtactaaaataaatatataaaagtgagcaaaatactatttataattcaaaatttatcgataagatatagtgtgtagaattaaaatgcattttattgttatgaaataaatagttaaattgtatagaaaaatggaatgtgtaagattaaaatttggtttgaaaaaagtattaaattaaatgttaacgaaaacatatattactatttagaattcaaatataatcgggagatttgcaaaactacctttttttactaccctcttgcaacaatacccttttgtgttgtccatttttaaaaatagccctttcattaaacagaatgaccaaattaccctcaactagtaggaacatgtaattgacaactgaaattttcctgccaaatttttggcgccaaaaaaaaaatttccgcaaaacttttttcccgccaaaaaaaataaatttcccgccaaaactttttttcgtaacaaattttttctcagcaataaaaaatacttttaaaaatccttgtaaatttgttttggtgggaaatagatttacaagatattttaaaaggattttaaaatatttacaatggattttaaaagggttttgaaagatttacaaaggttttttaaagatttttaaagggtttaaaagtgttttaaaatatttacaagggattttaaaatagtttttaaatatttacaagggattttaaagggctttaaaagatttacaaagatttttaaagggtttaaaagtattttaaaagatttataagagattttaaaagatttaaaagagattttaaaagggtttaaaagggttttaaaagatgtacaagggtttttaaaagatttttaaagaatttacaagaagaccttataaaaactcttgtcaatttttttaaaaccttttaaaatcacttgtaaatattttaaaaccattttaaaagtctttaaaaaacctttataaatcttttaaagccctttaaaatcccttgtaaatcttttaaaacccttgtaaatcttttcaaacccttttaaaatcccttgtaaatctcttaaaacccttttaaaatcccttgtaaatctatttcccgccaaaaaatgtttttgcaaaaaatatatttttgaaaaaaaaaactttgcgggaaatcttttttcgaaattttttggtggaaaatttttttggcgggaatttttttttagaatattttggataaaaatattaatatttcattttgttaacctaaaacaatatctaaataagggtaaaatggtcattaaaaatttgaagagggtagaaatgaaaatggctaaagaaaaagggtagagttgaaaatggttatcatgaaagggcattagaaagaatttttctatataatcgatataatattatatttatttcttatacccgtttttaggcggacattatctagtgtattataaaatataaatcatttaccattactaacaattaattttttatatcgacaatacaattttccaaattatgtattaaaaataattcgttccattcatggggtggttttcttattaatgtttggttgaaggagaaaaacaagcagtaattaaaatatatagaaattaatattgctgtaatttgttgatttactagatgtatgttattccaaacactaatttttgaaagataatattttaataattgttattagtcatattgaacgtttacaaaagatgtagaagaaaccaacgtgtagcttgggttcaaaacctagttctattaatactaaagtttgctaatcatgtttaaagtaaaattagatgaattttattaatccaatctctatgaatttaatatctttttatataatttcgtatgttccattgtttattatttcatattatcactcttctaattgaaatatgttattcttatcatcatttgaaaattgtttttattctctggactttcccatatataaccgctccattgttttacctttttagaaccctaatttgttctttccaggtcatttactatgtggtttttagatgtggacaataatatataagttatgaaattatctgaatctatactttttggatatgtgaaactcggataaacatcaaaatatccgtatcagaatccgtaaaatgttagtagaaaatatttgaaggtataaagagttgggcaacatgtgttagcggcaatgattttgaatgtgatgagaagtaatatctaggaacaagtggttagatacacaattatgtgaatagatgatataatagatacaacaaaaatgattgatgagaaggagatagaaaaagggaactttgttccattgaccaatgtgtttgcgatcactttttcaaattttgaagtaactgactacattgtacaatttatgtgtaatcatgcctatagtttctacatcgattcatcatacaatcatgagttttcatatatctagatcctaattactatcaaatataggtttgtgagaggttgtatgtgacttggaataaaacacaacatcctccatcatatctcttttgaggatttaagataattttgaagatttctttagttgaaaacacataaatctaaataacatgatttaaatggaatttgggaagattttcaaacaaatcataataactactctaaattcacttaagatcaacaaaatcataaaaactcaaatcatttaaaacaaagggttggatacactttgaaacttgcaacttatattttgattggtttttttttttatagtcgattgttcttaacaaaaaccctctatacttgatacatatattaataaaataaaaaaactatagactaacttttttgctgtgaaagtgtgttaattatatcttcaacatgagagaatgcatcattggtggtgtgagataaaaccattgtgtctttctaacccacatctaacaaatattttatctaattgggcattaaaataataataagtgaaggctcaataacacctaaaaatgcagcgaatattctagcttccatgcgtcataagcaagcaaaaaaaatggagactatatataagttcttctgtataattagagttacaaatttgtggagactatatataacttcttttgcctcccatgcgtcataagcaagcaaaaaaaaaaaatggagcaaactttcatcacgtggaaaacttgtctttcttttttttaatacatatttgaaggtttaaaagagttaggcaggatgtgttagcgacaatgttttcgaatgtaatgaaaaataatctttaagaacaagtggttatgtacaaatttatgcgaatagatgataaagtagatacaacaaaaatgattgagtagcaagagatggagaaagagaactttgctatattaaaaaatgtgtttgagatcattttatcaatttttgaagtaattggctacatcgaataatttatgtacttatatatagtttctatatcaattcatatacttgatacatatattataaaaaaataaaatccttaaaactacaatttttgtttagaaaatgtgttgtgtatatcttcaacatgagagaatgcatcagagtggtgtgatcaaactcttctaacccaaatctaacaaatattttagggttttgtgccaacaaccctcaaaaatattgttcttgcaacataacctttcatataaaatacatgtaggtcaatactctgatatcaaaagtcacccgcaatataaccacgtgcatagattttatataatccttgggcgtgtatagattttgcaaaccgtataagtatgtatataagttattaaactacgtcgtttgagcatttttcggaaaataatatattactagagtggattggaaccaataaggccccgatccagatttgaaaccagaaattggaattttcaaacttagggtttgattttggggatttataagtggggatcttttgtttatgtcacaacgtcgtcgtatctggtcaataacagagactctttcacaaccgacgtcgtatctggtcaataacggagaccctttatctctgtattttgagataactcagtcgtgaagcagtcataactaagctgtgtgactattataactcggtcaaaccctgaaagtgctttccttaagccatcagttggtacaatcaagtaattaacatatcataatcacattccaactagtggaatcatgaaactatctaatattctatatactttatccaacatcatacccaacaacatcattcctagaagtttggtcaacatagtttgtcaatcgacacttaccgaaaacccaatttattttttgttttcatattatagatcttgaaactaatagaaccaacaatttggtggctagtttgaaatctcataataacatctggtttcttataactcggtcaaaccacaaaatcttctagcataaatcagtcgtaacgtattggtattgtgaggcccaagcccaagagggtcccaaccaacccaagtaacacacaaaaccctaagcgtgtgtatgtacatatgtatatatctccctcttcacgcagcttcttctcacatcgtcttcatcaccatcacttctttatctctcatctcaatctcagccattatcatcatcgttgtgacaccggagttgacgtcacgttggggtcatgattgtttaacgtggttggtttcgtcgccgttcatcaccggattgttaggtaaggaaaacctctcatggctatgaactacactactgaaattattccacttagcaattggatttgtggattataacttcaactattggatttttgtgtgaacatgtgaaataaggaaacagttcaagtggtagaattggtgatccgtttctcatcacgtccgaaggagtttgggctagttcttaacgtttctgaattgatcttgtttccaagttttcagaacaatttttggatccaaaatcggaggtaagatcgatcggcaaatcacgtttaaagttgataattagtcacagttttcagagccatatttttccaagtatctgaaactttgcagtttctggtagaggttttaaggatctatttcccgtcggatctgaaggaatcaaattgtgaatttggtgtcgttggaaagatctcgaggagagcaagaattagcaagtttcgttctcacgatccaaggtaagcttcattcgcaaaatgacttacaagtgaaaaatcacaattttcctgaactcaaaaaaatattaagtgtcaggaacattgcagtttcatcttaagggttttacgaggcgtttctggtcactcaggagcattgatagacccaacgacggtggtttctgacagaggaagtgtcagggaagccactggaaccttcagatcaattggaaaaggtaatccatagccatggaagcgcttgcttgttggccaagaatgagtcgttctgcttaaacccagaaacccttatttgttgtttgaatctgtttcttcagctgcaatttccagaacgcagtcacagtttccaaattgcaattccagctttctagtcgttgtttccaatcaattgaggtgagggtggtatccacgaaggatggtatcattttcttttggtatgctccatgacttgtagcatataggcttggatttgattgattaggattagattatatgatgttatgattgagagtaaatgttaggtatgatgataatgaatgattgtaatgtttggtaatgctatgatatataagtaaatgttaaatatgatgatgtatgtacgagaatgatttaagtatagacagtgatggactgacgggttaacagctggtcaagaacggctgacgagcccggaatgggagtgtctgagccacgagggccagcctccacctattgttctagtcgtcacgaggatgactggacctaacgatgtgtatgtttatattaatatacataagatggttctcttgattatgttctttagaaaagaaagtatttttaagttgattgtttgtatctaaagttgtgtgttatgatgattgttgtataacttaagaaattgttctatgtttcgctcactgagtattctttactcaccccctttttctccttctttcccagatgaaaatgatgttgaatagctgctcaagtttgtctctcttcatggtgttctttgggatttgagtttacttttcaataaaacaaagacatggttttcctttaaatttcttcagttatttttacgagttttcaatgttgcttaagacaagtaacttttatgaatttaataaaaatacttcttgaataaggtgaatgtgaatgtgttaaggatagataatgagtatgaaataatgttttataggaaaagtggcacgccttctctgtagtttgggagaggagtgttacaattttggtatcagagcggaggttaaagtcaaaccggtgctgatccgggagactatgattgattatgttaagatgttttatggtagagtaaattttttaaaagtgatttcaaaatgggaatggattgttttttataaaaaaaaagaaaaagaaaaaaaaaaaaccagaagaagcaagacttgagcattacttatgttattaggaattattgtgattgttctgatattgatgtttgtttggtcaaaatggcacccttaaggaaaagaggacgtgttgcgaaccaaagggctaaccgtgttgatgatgcacccgctgacggggaagctcaaccactagtaggtgatattccagttggagattaggcagctatcaatgcatcactattaggacagattcaggggatcagaggaatgtttgaagagttaatgaaccgaattcctcaggcagcaccagcaccagcaccaacagctcaacaaccagaagaaaatgttctacctcagcaacaacagccaccacctccaccgccaccactaccagctcaaatggcaggacctgcgattattgagttatttgatatcagcaaggtttgggttcttgactattgagttatatttataagaaggtcaaccggtgtatgtatagtcctctagtgatgtttgggttctttgataacagcgacgtttgggtatgacaagtcagccaccacgttagactaactcagccgcaacatcgaattaatgcatgataagtcagccgttatattagaataactcagccatgacattatttgtgcgatgacaagtcagccaccacgttagaataactcagctaatcatcgaattaatctacgataactcagctataacacgaattgagcgatgataagtcagccattacatcgatttaacccataattaacagtgtgcattcaatatcatagattcatacaaacataattctaatcctaaagcgtcaatatttagtacaatcacatgctaaaaatcccaaaagacacgaacatatgttcgaaaaagccaatcacgtctctagaaaacgtgcaggcatcctttccggtgcttcatcgaagatctttgctgccaccctaacccgtagaacctggatatttgcatcagtaatgccatcaaaacaaacaccaagcaataaatattcaagaatctttaacgcgtaaacgccgcagtcccctctgatatgattttgcgggacctttttcttgtccctccgccggaatgaaaattggtcgtattgcggggtacggacttcggaaggaaacagttcgttaatcatctgtggaatcatcctcgtgaacggcctacaaacttccagcatctttccatcgatatcgtctgtatgctctccgacgatgcaatcatagcaatcgatgtgagacctaagcaagttcacgtgaagggtcacccaatgattacctccggtttggtggataatatacaagtgatccacatctgttatcaacttcttccgtgttgccacttctcttctcataccgttaatccactattgatacgcggtgtctttgaaaaaaaaactcttctgttagatcttgaactgattgtaatctgtaacctaataaatcgtgaaccacgggtctagaattatgacgcgttcgttgtggtatgggcagggatctcgctggagcctccgggcgaggactttcatatacgcagcaatatgctgtacaaaaataaaaccaacccagacaaaaaaaacaacaacattaactcaccattatctactttaactcaggcagaacaataccataacttagacataaccaactacaactcagtctgcacaccagaataaaccagctataatttatttaactcagcctaaacaacacgataactcagccataaaatagacaacctcagacagaatataacaataacttacttcatcacccaaccatccataatttgaatctggccataactttctttcggtcatgaaaactccgtagaaatcaacctcgtctattccattttccaacgattttttgctaacaaataataaaagaaagttaatatacacaaatagtgtaagcatgtcgtacttaacaacttattaaggtataaagggtcatacatgtcgagacttgacaaataatccttaagtttctgcatgcaatttggactcagaatcaactggatgaaaaaacagtctatgtgtatccacgcatgaatgatttttccactggccagctcatataccgaccagaatgattcttcttccctttcagcaactaacggctctgcaaaagggaacatatatagtgatatataactgatctgtcgcaagaacatgatgaccatttcttcctagtgagtattttgagtgaggggggagtttttagccttgctcttatgatttagggattttcttattcatgacaatattggacccctaggtagtactaataacaagagagggtttttgttttcaaatgttggtttactggttaggcttttattctccaccatggtatggttcctataaagctacataagaattcattttgaagtttgtttggtgtgtgaccgaagaaccaaaaaaaaaaaaaacagttgctcattctttgtctacttatctcactattcggcaatgcatatacgtcctaatctttgttttgcttatcttagttattctatctctctcccttacctaaaaagctggcttcaaaggacttgacggatcgtttataaaacagactagtcataaacatagatttatattcgagatggcttcaaatacgaatcttaaactgtttatagtatatatagtatctaatagctgcgggtgttgtgaaagggaacttagtgttgaccatggtcatggagtttaaccaagaagtttgttgaaccaaggattcacacaatagatttgtttagagagggaaaacaaatctagtaatttctcttcattaggtattctatccaagactcgattacaagaggggttctaatctcttatgaaatacattagggttttgctcaagaacagaaaaagaattagagttttaaaaaggtatagctgcatccatgatggattgcctacgtaccctgtgaagggatcaagccattcgtagttttcaataggtataaagttctatgtttcttgtgaatatcccaagatctccccctttttgtgaagtccctaaggcactttatataggatccttaaaccgcctccctagcgatattcttcggaagattcttatttatccttaggtcggttctagaggataatcgtcctaaggatattctccttattcttcggaggttttggggagatttcctgatttcgacattatcttcaaagattctcctttatcatttctgaaagtcccataaaagatcccattttaccggaaatgatccttggagaatgaatggtttttacaagtctttgcctcgcgtgttcttcacggctcggtggtcgtttgagaggtggcttcggggcaaacggtatgtaccggctcggggcgcgcttgatgactgtccattaagctcagttggctgtctcccgagccgatatagatgtttcccgcagcgttctcacgattggttcgggctgtgttcatatgattaacacccgagccattttacaaactctcttcgggacggtcgatcgaataaggtcccgaggtgctttgttctaggctaggggccaatcatatgtttaaccatgaggtgattgttattcttagactgtttggctcggtcttgcttgtgggggaatccgaccccaacaaagttgtaccttgacggaagagagcacgaatgggatcggtgcgggtgtctggaaagtgcctgaagaaggttcatgtgatgatcaaactctggaatgctactgggagtactgactgtaccaaaacctcctccaacagtgccacagggaacaagcaagccccatatcaatgtgtgatgaagttgaaggagcagggtcgtaaggtggacttccacagttagaaggaggcttgtgtgatggaggagctccatatccttcgtcatagtactgatttccggatctgaataaagaagcatggcatcatttggaagtaagagatcacatgagaataccatccctagaaccgagagagaaaagtttatgttaataaatttttattgtataattgatattgaaaaacattaataaacattaataaacagtgttcacataaggtgtaaattcaccccaaaagcactctaaaaagtaaaaaccaaaagagaaaaaaacatagaaatggttacttaataatataccgagtttcatctatttacttaataatatacggttatttgatttaccggttaactaaaaaatatctggtttaatcgtatttattgttggcaaacacaacattgggcgcgaagtggtttttgatgcccttcaacaacatttgggggtttcatttcaatcgcatttctagggtttctttctctacgattcaatagattcggacgaattgggggattctgaccagagagaagctatggaggaaaacgaagaggaagaagaattgcggccaacggcgctatacacggtcggtggttcagacgaatttacctttgtttctcccgatgggctctccggtcaatacacgggccctgatcacgacggcgtagttcttcagactgaaaatccggcgccgactaactgtcttgcttactacttcgaggttcatatcatgaatgctggtgaaaaaggagagatcgcgattggtttctccaaggaacacatctatagcgaagggtatcgttttctttccctttcaattcgcatttaccacttattgcgtgatttgatactcaatacaatcattgattctgtttgatttggtacctgagactgagagaacaaattgggaaataggtttagatacaatggtagatcagtagttcaaatcactgtttcaatggtttggattcgttacttggaaataggttatgtgatttgctgctcaatttgattgtgttggctgttagatctggtatcttacaagttaatgggagatttgctttgttagatgttttcacctttcagtaattaagcattccaattcactgtttcatgtttctctgtaatgttagatatactgtcagaagctgtgcctacattggtaacagtggactcatatgctctcaaaatggagatggtgatcgaactgttgctaaagccagtgacacctatacaacaggtgatttagttggttgcggtatagactcggtttcacaagaattctttttcacgtaagtaataactgtttccctatctgaacatgtttcattacaattggaaaagtagatatcaagatacacaattcatttcttcatgtcacaatgtttttgacatgtccctgcgtatgttttacttgctgacatctatgactacttctttgattataggaaaaatggaactatcgtagggacaatccccaggcaatttaggcgtcctgtatacccgacaattgttttgcatagccaaaacgaagctgtcactgtcaatttcggcggacagattgcgttttcttttgactttgaggtaaggtcgtacttttcttttcttgcatagtcggagaataactattgagtaagcagaataatatgcatctctcacatatgtccatatttgcatgtatgtggcatatttttctgatacaatattctattatctgatccacctttatttcagcattttgaagaatcattgagggttaaaaaagaaagggaaattgaaaagatttccatgtctcgcagcattagtcatgggtaaagtgtcttttcctgcctgttcttaattgtaattcttgtttctgtttgtgctaaagcttcctttttccaggcttgtaaaaacctaccttcttcgttatggatatgaagatagctttagagcttttaacctggctgcaagtcgtcatactgttattgcacaagaaaatagttttgatgagtatgaattgcatcaaaggaaaaagctcagagaggtacttttcactgctatggttatcttgctgtaattttttttttattttttttctgtgaggtacaaaatcaaccaaaagcaagctacattgctacatcttttctgtttcatatcgaactgatccatgcattctgtttgttaaagcttataatgactgctgagattgatgatgctattgctgcactcaaggatagatatccccaacttattgaggtgggctgagtaactagttaatatatcgagtgattcacattgttaacattccttgaactattttaacaagctgcttgtatcatatgcagggtggatcagaagcttattttcttcttatctgtcaaaagattgtcgaattagtacgggtatgttctttattccttgtatatttgttacacatatccatggtgtgtttctctaactaactacaatgcagaaaggagcaatagcagaggctaagtcatttggaaatcaagattttaaagactttagggattcaagcctactaaaaaaccttttcgatgtatgtagtgattctctaactgttagattaggtttctcatatttgagtcactaatagttttgtttttctctatttcaggattgctctgctttgttcgagtgtgaaactatagaagaatcaggtgctgcatatcttctaggagaaacacagaagaacatagtagcagctgcagtcagtgaagcgattctatctacaaatccggccaccagagaccagcaatctgcttcacttgagcgagtgcttagacagtttgaagccacctgctcactctatgctcgtgaataaaatcttgactttttctgtttttctttttatcttttctcttgatagagtcattgtgtaagctcaaatgttctaaaactagcgatcatactttaacttgattcacaactatatacgagattatattggagcttgaaaatttttatttacaagtatttatctacaaatcggcaaatattgagctgctcatactaattttgataatttaatcggctacaaattttaatgacatgttgttgttagctgtaagttaaaatatgaaatcgaaagtcttttgtttattgctttcaacttaagcctttgtgattacaagctatgtctatttatacatctagattgatttaacctagtgtcttcttgatttgcatagctgtcacttggctgttatgtggcgtcgttgtcttcacatgattcaagagcctcatagcgattcctcgtcgttacttccgtactgcgtggagataaggaccgctctgcaacttttctgcttttgtcctttgttgttgcaggttgtcgttgcactatgttgggcttggctcttggattgggcacttgtttcggattgggctttaatggttttgagcccaattccaaaactgtgtcgtttggagctgttctgttgatactccccctcaaacttggaggaggtgggaaatcgacaccaagtttgaatcggagagattcgaaaggagccttggcgagagactttgtaaatatgtcagcgagctgtagataacccgggatatgatggacgatgagctcaccaaaagctacctgctctcggacataatgatagtgagttgcaaaatgctttgtccgagcatgaaacgatggattcgctgtaaggtaaacggcagagaggttgtcgcagaagagttcggggagctgtaactgcggaacacccagatcacgaagtaaattgactagccatgtgatttccgaggctgtatcggacatagagcgatattcagcttcggttgagcttttggcgactgagacttgctttcgagaagaccaggagattagattgttgacaagaaatgtacagaagccaccggtggagcgacgtgtaccatgacaaccggcgtgatcactgtcactgtaagctcgcagttgacaatctgtgtccttgttgaatgaaattcccatggttgttgttcctctgatgtaccggagaatccttttgaggagaagaaaatccgacactgtaggggcgtgcatcttttggcacacgtaattaacagagaattggaggtccggtctagtaagtgtgaggtagtgcagcttaccagccaaacttctgaaatatgatggattgtcgaagggctcggtttgattaggtgctctctcaggttgaagtggcaatggtgttgcaacaggagaacagttggatattgtagttgtagctagaagatcttctgcatatttctgttgagagagaaaaagaccttttggatgaaattgcgcctgaataccaaaaaaataactgagtctgcccaaatctttcatcttgaactgcttattgagctcattaagaagactggagagaagttttgagctatttcctgtgatgaccatatcatcaacgtatagaagaagcatgatcacatccttgttctttacgtagacaaagagagaagggtcagacatactgcaggtaaaaccaaaattgagtaggaatttgctgaatatgtcaaaccaagcccttggagcttgtttaagccatagagagctttatgtaataagcaaacatgatcaggatgagcattgtcaatgaatcttgctggttttctcatgtagaccgtttcagtgagatctccatgaagaaagacgtttttgacatccatttgtttgagttcccattgcatgatagtagctagatgaagcacagctcggacggttgcagatcgaactaccggactatatgtctcgaggtagtctattccttcttcttgtttgaagccttgagcaactagtcgagctttgtacttatctaatgagccatctgcattgagtttgatcctgaaaacccatttggagcctagcacatgcatctttggtgtaagaggaacaagtgaccaagtgtgtgtttcagagcaatttcccatttcctctaccatagctgcaattactgttttagacataggatatgaagctttgtgtgtgagaagagcataccgttgatttggtttgataattcctttctttaatctcgtggtcataggatgagtggattctgtagctgaatgaagaatactgaaggttggttgttcatgcctagaggatgatgagagagcgctgttgccaataggatcaagatcggagcttgccgtacactcagaacactcctcatttcccgtagacagagtttcaatttcttcagcattatcttgagaaggaatgattcgcaatggtgtaacacagaccggttcacttggtatgtcttgattgttgttatgaggtgttgtctccccctctgtaattataatagcaggactgcactctaatgaaaggttatgttgttgattttctgtgatgacagggacgtttgtaccagtattagagccatcagtttgttccttttccaatggaactgaagagcttgagaagccttttaaccaagcgtcaaacatcggagttggggaagaatgctgcaggccagtgtaagtatcaatgaaaggaaaagagccttcatcaaacacgacatggcgacttagatacactcgtctagttggaggatagaagcagcggtaacccttatacttatccgtgtaaccgagaaagatacacttgagagacctcggatcaaatttattgcgagcataagcacaaagtgtagggaagcaggcacatccaaacgttctcaaagctgaataatctggtgctttgccaaacaaaacttgataaggtgtggtagagctgtcaagagctgttgtgggaaggagattactcaagagtgcttagagagtttggagccacctgctcactctatgctcgtgaatgaaatcttgacttttttttttcttttttttttcctttttctcttttctcttgatagagcctttgtgtaagctccaacgttctaaaactagcgatcatactttaacttgattcacaactatatacgagactttattggagcttgagaatttttatttgcaagtatgtatctacaaatcggcaaatattgagctgttcatactaacttttgtaatttaattggctacaaatttaaatgacatgttgttgttagcttctcgctaaacaaaattgttgacgtggtaagttggacggacaggattttattttagaccatggattagtccgagcgtatatattgacgattgatatatatataaattacttcactcaatttaaaattcagtttaagcttgttgagtatatatatagagatattaatttctttaataattaattttttctaatattttcctctttgaattattatttttgttaatttgggttaaatttggttaattttagttattttgaaagaaaaaaaaaacacaacgaatatgataatattttggttagttacggttttcatttatttaagttttaatctttacccattgcacattgcaccttaaataaataaaatctctacccattgaacatgctctaaaatgagttatcgaccgtcatgttatcgatacacagaagggctatgttgtaggagatttttcagattgtggtttgacctgtatgtatttgacatggaggtttgtcttgcaaaaaaaaaaaattaaattgaggttttttttgcacaaaagccttatgttttaaaagagagttatcgagtgccatgtcatcgctacatgggaggactgtattgcgggtgacttttgagattgtgagattgacttgcataattcggacttggatgaaaacttgcaaacgaaattgacttgaagggttgttttgcagaaaaccctgataccctaatgttaactaagatacaaatctgttatcgtatgagaaatgcttttaccatttatttattaagattaggtatgtagattcaaaatcaagtttatcatgattaaacaaagagttaaattgtatttgctaatggaatgtgtaagatttgaattctgttttaaataaaagtactaaaataaatatataaaagtgagcaaaatactatttataattcaaaatttatcgataagatatagtgtgtagaattaaaatgcattttattgttatgaaataaatagttaaattgtatagaaaaatggaatgtgtaagattaaaatttggtttgaaaaaagtattaaattaaatgttaacgaaaacatatattactatttagaattcaaatataatcgggagatttgcaaaactacctttttttactaccctcttgcaacaatacccttttgtgttgtccatttttaaaaatagccctttcattaaacagaatgaccaaattaccctcaactagtaggaacatgtaattgacaactgaaattttcctgccaaatttttggcgccaaaaaaaaatttccgcaaaacttttttcccgccaaaaaaaataaatttcccgccaaaactttttttcgtaacaaattttttctcagcaataaaaaatacttttaaaaatccttgtaaatttgttttggtgggaaatagatttacaagatattttaaaaggattttaaaatatttacaatggattttaaaagggttttgaaagatttacaaaggttttttaaagatttttaaagggtttaaaagtgttttaaaatatttacaagggattttaaaatagtttttaaatatttacaaggcattttaaagggctttaaaagatttacaaagatttttaaagggtttaaaagtattttaaaagatttataagagattttaaaagatttaaaagagattttaaaagggtttaaaagggttttaaaagatgtacaagggtttttaaaagatttttaaagaatttacaagaagaccttataaaaactcttgtcaatttttttaaaaccttttaaaatcacttgaaatattttaaaaccattttaaaagtctttaaaaaacctttataaatcttttaaagccctttaaaatcccttgtaaatcttttaaaacccttgtaaatcttttcaaacccttttaaaatcccttgtaaatctcttaaaacccttttaaaatcccttgtaaatctatttcccgccaaaatttttttttgcaaaaaatatattttttaaaaaaaaaactttgcgggaaatcttttttcgaaattttttggtggaaaatttttttggcgggaattttttttagaatattttggataaaaatattaatatttcattttgttaacctaaaacaatatctaaataagggtaaaatggtcattaaaaatttgaagagggtagaaatgaaaatggctaaagaaaaagggtagagttgaaaatggttatcatgaaagggcattagaaagaatttttctatataatcgatataatattatatttatttcttatacccgtttttaggcggacattatctagtgtattataaaatataaatcatttaccattactaacaattaattttttatatcgacaatacaattttccaaattatgtattaaaaataattcgttccattcatggggtggttttcttattaatgtttggttgaaggagaaaagcaagcagtaattaaaatatatagaaattaatattgctgtaatttgttgatttactagatgtatgttattccaaacactaatttttgaaagataatattttaataattgttattagtcatattgaacgtttacaaaagatgtagaagaaaccaacgtgtagcttgggttcaaaacctagttctattaatactaaagtttgctaatcatgtttaaagtaaaattagatgaattttattaatccaatctctatgaatttaatatctttttatataatttcgtatgttccattgtttattatttcatattatcactcttctaattgaaatatgttattcttatcatcatttgaaaattgtttttattctctggactttcccatatataaccgctccattgttttacctttttagaaccctaatttgttctttccaggtcatttactatgtggtttttagatgtggacaataatatataagttatgaaattatctgaatctatactttttggatatgtgaaactcggataaacatcaaaatatccgtatcagaatccgtaaaatgttagtagaaaatatttgaaggtataaagagttgggcaacatgtgttagcggcaatgattttgaatgtgatgagaagtaatatctaggaacaagtggttagatacacaattatgtgaatagatgatataatagatacaacaaaaatgattgatgagaaggagatagaaaaagggaactttgttccattgaccaatgtgtttgcgatcactttttcaaattttgaagtaattgactacattgtacaatttatgtgtaatcatgcctatagtttctacatcgattcatcatacaatcatgagttttcatatatctagatcctaattactatcaaatataggtttgtgagaggttgtatgtgacttggaataaaacacaacatcctccatcatatctcttttgaggatttaagataattttgaagatttctttagttgaaaacacataaatctaaataacatgatttaaatggaatttgggaagattttcaaacaaatcataataactactctaaattcacttaagatcaacaaaatcataaaaactcaaatcatttaaaacaaagggttggatacactttgaaacttgcaacttatattttgattggtttttttttttatagtcgattgttcttaacaaaaaccctctatacttgatacatatattaataaaataaaaaaactatagactaacttttttgctgtgaaagtgtgttaattatatcttcaacatgagagaatgcatcattggtggtgtgagataaaaccattgtgtctttctaacccacatctaacaaatattttatctaattgggcattaaaataataataagtgaaggctcaataacacctaaaaatgcagcgaatattctagcttccatgcgtcataagcaagcaaaaaaaatggagactatatataagttcttctgtataattagagttacaaatttgtggagactatatataacttcttttgcctcccatgcgtcataagcaagcaaaaaaaaaaaatggagcaaactttcatcacgtggaaaacttgtctttcttttttttaatacatatttgaaggtttaaaagagttagacaggatgtgttagcgacaatgttttcgaatgtaatgaaaaataatctttaagaacaagtggttatgtacaaatttatgcgaatagatgataaagtagatacaacaaaaatgattgagtagcaagagatggagaaagagaactttgctatattaaaaaatgtgtttgagatcattttatcaatttttgaagtaattggctacatcgaataatttatgtacttatatatagtttctatatcaattcatatacttgatacatatattataaaaaataaaatccttaaaactacaatttttgtttagaaaatgtgttgtgtatatcttcaacatgagagaatgcatcagagtggtgtgatcaaactcttctaacccaaatctaacaaatattttagggttttgtgccaacaaccctcaaaaatattgttcttgcaacataacctttcatataaaatacatgtaggtcaatactctgatatcaaaagtcacccgcaatataaccacgtgcataaattttatataatccttgggcgtgtatagattttgcaaaccgtataagtatgtatataagttattaaactacgtcgtttgagcatttttcggaaaataatatattactagagtggattggaaccaataaggccccgatccagatttgaaaccagaaattggaattttcaaacttagggtttgattttggggatttataagtggggatcttttgtttatgtcacaacgtcgtcgtatctggtcaataacagagactctttcacaaccgacgtcgtatctggtcaataacggagaccctttatctctgtattttgagataactcagtcgtgaagcagtcataactaagctgtgtgactattataactcggtcaaaccctgaaagtgctttccttaagccatcagttggtacaatcaagtaattaacatatcataatcacattccaactagtggaatcatgaaactatctcatattctatatactttatccaacatcatacccaacaacatcattcctagaagtttggtcaacatagtttgtcaatcgacacttaccgaaaacccaatttattttttgttttcatattatagatcttgaaactaatagaaccaacaatttggtggctagtttgaaatctcataataacatctggtttcttataactcggtcaaaccacaaaatcttctggcataactcagtcgtaacgtattggtattgtgaggcccaagcccaagagggtcccaaccaacccaagtaacacacaaaaccctaagcgtgtgtatgtacatatgtatatatctccctcttcacgcagcttcttctcacatcgtcttcatcaccatcacttctttatctctcatctcaatctcagccattatcatcatcgttgtgacaccggagttgacgtcacgttggggtcatgattgtttaacgtggttggtttcgtcgccgttcatcaccggattgttaggtaaggaaaacctctcatggctatgaactacactactgaaattattccacttagcaattggatttgtggattataacttcaactattggatttttgtgtgaacatgtgaaataaggaaacagttcaagtggtagaattggtgatccgtttctcatcacgtccgaaggagtttgggctagttcttaacgtttctgaattgatcttgtttccaagttttcagaacagttttcggatccaaaatcggaggtaagatcgatcggcaaatcacgtttaaagttgataattagtcacagttttcagagccatatttttccaagtatctgaaactttgcagtttctggtagaggttttaaggatctatttcccgtcggatctgaaggaatcaaattgtgaatttggtgtcgttggaaagatctcgaggagagcaagaattagcaagtttcgttctcacgatccaaggtaagcttcattcgcaaaatgacttacaagtgaaaaatcacagttttcctgaactcaaaaaaatattaagtgtcaggaacattgcagtttcatcttaagggttttacgaggcgtttctggtcactcaggagcattgatagacccaacgacggtggtttctgacagaggaagtgtcagggaagccactggaaccttcagatcaattggaaaaggtaatccatagccatggaagcgcttgcttgttggccaagaatgagtcgttctgcttaaacccagaaacccttatttgttgtttgaatctgtttcttcagctgcaatttccagaacgcagtcacagtttccaaattgcaattccagctttctagtagttgtttccaatcaattgaggtgagggtggtatccacgaaggatggtatcattttcttttggtatgctccatgacttgtagcatataggcttggatttgattgattaggattagattatatgatgttatgattgagagtaaatgttaggtatgatgataatgaatgattgtaatgtttggtaatgctatgatatataagtaaatgttaaatatgatgatgtatgtacgagaatgatttaagtatagacagtgatggactgacgggttaacagctggtcaagaacggctgacgagcccggaatgggagtgtctgagccacgagggccagcctccacctattgttctagtcgtcacgaggatgactggacctaacgatgtgtatgtttatattaatatacataagatggttctcttgattatgttctttagaaaagaaagtatttttaagttgattgtttgtatctaaagttgtgtgttatgatgattgttgtataacttaagaaattgttctatgtttcgctcactgagtattctttactcaccccctttttctccttctttcccagatgaaaatgatgttgaatagctgctcaagtttgtctctcttcatggtgttctttgagatttgagtttacttttcaataaaacaaagacatggttttcctttaaatttcttcagttatttttacgagttttcaatgttgcttaagacaagtaacttttatgaatttaataaaaatacttcttgaataaggtgaatgtgaatgtgttaaggatagataatgagtatgaaataatgttttataggaaaagtggcacgccttctctgtagtttgggagaggagtgttacaattttggtatcagagcggaggttaaagtcaaaccggtgctgatccgggagactatgattgattatgttaagatgttttatggtagagtaaattttttaaaagtgatttcaaaatgggaatggattgttttttataaaaaaaaagaaaaagaaaaaaaaaaatcagaagaagcaagacttgagcattacttatgttattaggaattattgtgattgttctgatattgatgtttgtttggtcaaaatggcacccttaaggaaaagaggacgtgttgcgaaccaaagggctaaccgtgttgatgatgcacccgctgacggggaagctcaaccactagtaggtgatattccagttggagattaggcagctatcaatgcatcactattaggacagattcaggggatcagaggaatgtttgaagagttaatgaaccgaattcctcaggcagcaccagcaccagcaccaacagctcaacaaccagaagaaaatgttctacctcagcaacaacagccaccacctccaccgccaccactaccagctcaaatggcaggacctgcgattattgagttatttgatatcagcaaggtttgggttcttgactattgagttatatttataagaaggtcaaccggtgtatgtatagtcctctagtgatgtttgggttctttgataacagcgacgtttgggtatgacaagtcagccaccacgttagactaactcagccgcaacatcgaattaatgcatgataagtcagccgttatattagaataactcagccatgacattatttgtgcgatgacaagtcagccaccacgttagaataactcagctaatcatcgaattaatctacgataactcagctataacacgaattgagcgatgataagtcagccattacatcgatttaacccataattaacagtgtgcattcaatatcatagattcatacaaacataattctaatcctaaagcgtcaatatttagtacaatcacatgctaaaaatcccaaaagacacgaacatatgttcgaaaaagccaatcacgtctctagaaaacgtgcaggcatcctttccggtgcttcatcgaagatctttgctgccaccctaacccgtcgaacctggatatttgcatcagtaatgccatcaaaacaaacaccaagcaataaatattcaagaatctttaacgcgtaaacgccgcagtcccctctgatatgattttgcgggacctttttcttgtccctccgccggaatgaaaattggtcgtattgcggggtacggacttcggaaggaaacagttcgttaatcatctgtggaatcatcctcgtgaacggcctacaaacttccagcatttttccatcgatatcgtctgtatgctctccgacgatgcaatcatagcaatcgatgtgagacctaagcaagttcacgtgaagggtcacccaatgattacctccggtttggtggataatatacaagtgatccacatctgttatcaacttcttccgtgttgccacttctcttctcataccgttaatccactattgatacgcggtgtctttgaaaaaaaaactcttctgttagatcttgaactgattgtaatctgtaacctaataaatcgtgaaccacgggtctagaattatgacgcgttcgttgtggtatgggcagggatctcgctggagcctccgggcgaggactttcatatacgcagcaatatgctgtacaaaaataaaaccaacccagacaaaaaaaacaacaacattaactcaccattatctactttaactcaggcagaacaataccataacttagacataaccaactacaactcagtctgcacaccagaataaaccagctataatttatttaactcagcctaaacaacacgataactcagccataaaatagacaacctcagatagaatataacaataacttacttcatcacccaaccatccataatttgaatctggccataactttctttcggtcatgaaaactccgtagaaatcaacctcgtctattccattttccaacgattttttgctaacaaataataaaagaaagttaatatacacaaatagtgtaagcatgtcgtacttaacaacttattaaggtataaagggtcatacatgtcgagacttgacaaataatccttaagtttctgcatgcaatttggactcagaatcaactggatgaaaaaacagtctatgtgtatccacgcatgaatgatttttccactggccagctcatataccgaccagaatgattcttcttccctttcagcaactaacggctctgcaaaagggaacatatatagtgatatataactgatctgtcgcaagaacatgatgaccatttcttcctagtgagtattttgagtgaggggggagtttttagccttgctcttatgatttagggattttcttattcatgacaatattggacccctaggtagtactaataacaagagagggtttttgttttcaaatgttggtttactggttaggcttttattctccaccatggtatggttcctataaagctacataagaattcattttgaagtttgtttggtgtgtgactgaagaaccaaaaaaaaaaaaaaacagttgctcattctttgtctacttatctcactattcggcaatgcatatacgtcctaatctttgttttgcttatcttagttattctatctctctcccttacctaaaaagctggcttcaaaggacttgacggatcgtttataaaacagactagtcataaacatagatttatattcgagatggcttcaaatacgaatcttaaactgtttatagtatatatagtatctaatagctgcgggtgttgtgaaagggaacttagtgttgaccatggtcatggagtttaaccaagaagtttgttgaaccaaggattcacacaatagatttgtttagagagggaaaacaaatctagtaatttctcttcattaggtattctatccaagactcgattacaagaggggttctaatctcttatgaaatacattagggttttgctcaagaacagaaaaagaattaaagttttaaaaaggtatagctgcatccatgatggattgcctacgtaccctgtgaagggatcaagccattcgtagttctcaataggtataaagttctatgtttcttgtgaatatcccaagatctccccctttttgtgaagtccctaaggcactttatataggatccttaaaccgcctccctaacgatattcttcggaagattcttatttatccttaggtcggttctagaggataatcgtcctaaggatattctccttattcttcggaggttttggggagatttcctgatttcgacattatcttcaaagattctcctttatcatttctgaaagtcccataaaagatcccattttaccggaaatgatccttggagaatgaatggtttttacaagtctttgcctcgcgtgttcttcacggctcggtggtcgtttgagaggtggcttcggggcaaacggtatgtaccggctcggggcgcgcttgatgactgtccattaagctcagttggctgtctcccgagccgatatagatgtttcccgcagcgttctcacgattggctcaggctgtgttcatatgattaacacccgagccattttacaaactctcttcgggacggtcgatcgaataaggtcccgaggtgctttgttctaggctaggggccaatcatatgtttacccatgaggtgattgttattcttagactgtttggctcggtcttgcttgtgggggaatccgaccccaacaaagttgtaccttgacggaagagagcacgaatgggatcggtgcgggtgtctggaaagtgcctgaagaaggttcatgtgatgatcaaactctggaatgctactgggagtactgactgtaccaaaacctcctccaacagtgccacagggaacaagcaagccccatatcaacagtttttctcctaacagcttttactctctccagcctcatggttttctcctcatcttcatcagactcaggcagcaggcgattatcttcagctacccactagtcagtaacatcaagtatagaatcatcatcagctactctctcaccgtcagctttttccttggcttcctcaggcttagtcttggggacagaagaagtatcaccgtcggctttttccttggcttccttaggtgattttggcttttttattgtcacctttggagtcacctttgtagcagcctttcttcctcttttggctggctctttcacaattagctcatttaaggttttctcctaaacattacctttcttctttggtgatgtcttcgctttggaaattctcctcgccgccgtcatagagcgtaaacggcgggaatcaggagacttctcaataaaatcaatatcagaattgtttccatcagtggccttagcaaattctccatcaagattcctactaaccccaacctcagcaaaatcagcatccttctctaccaccgaatctaaaacttctttcgactacataaacgtaaagaaaactcaggctttaaataacaaaaactcatgtctatgtataaatataactcagcagtaactaaataaaagctataactcagccgtataatatgcagataactcagccataactaaataaaagttataactcagccgtataatatgaagataactcagccgtataatatgcagataactcagccataactaaataaaagttataactcagccgtataatatgaagataactcaaccgtaactaaataaaaagtaataactcagccattagcttaccggaggaggactagtaacagattggttatttgtaggtttccttggaccttttggtgtctgttgagtttggggtttagggttgccttgctgctctttggttaaaaacatttctctaataaccactctagagtttaattatgagtcagctatgccagtttggccagttaggcctaccccaatgaccttcagatgctctttcatctatttgacctcgttttcaatagatgcaaaccttctttcaaactttgcatcaatcctcgcttctacttgatctccaatcacctccagacgggaagacatttctttgatgctattatcaacggtgtcaaaccttaagtttaagggagagattaagttggacaccacatccacgaacgattgttctccccgaacattatgctcgtccttgtcctcatcagattcgacaactacttccttcttcttattcttcttcttcttttgtgcatctcctccaccagaatgaacaccctgactgtgagagactttctgcttctttacgggagattcagacacatccgcatctttatcttttacgagtttcttcttcttcttctcattcgtcttcacatcccaataacctttaacaagcttagcctcgtgtatgtcttcgatcaagtgattgagtgctgggtcttctaattcgtctggccaagtatgaaacagctcgcttaactcagccttcggaaccatttaacgcacacgcagctacaacacaagagataataaaacccatcagtatgtttaactcagccatagtataacaaaatctcagtcaaaacataaaccaaactcagtcatatcataacagaaactcagccataacataaacaaactcagccatatcgtaacagaaactcagccaccaatgtaaggttaaaccataacgcaatcacaacatataacaaactcagacacatatgaattgataaatcataaatcagtcggcaaacagacgataactcagccatcaaatcaaatagatctaacaaatcggccaccatatgtcaatctatgacggcgttagaaaccatcgttaaaaaccatcattaagcaacggaaaacgatttcagtaacgggaatcacttgcgattgaacttagatgttggattcttgtcggaaaatttgaaataaagtttggaaacatacttaccggaacttagagaagttcagttcaaattcaaaataaagtttggaaacatacttaccggaacttgatgatccattttagaacctccatttaatttttaatagaaaatatcctcaattaagaaagtataataaaaaaaaaaacctcaattaatagtcggtccatatgaatctctaactaaattgttaatgaaaatcacctttaagtacaaacattaagaaaaaggactccttcattaataattacgcttaaatatatctcgtttaatcgatatattgtgttaatgcttattaaaaatgtgtaaaacttatattcttaaaaattgctaatgtcgatttaaaaattttaagatagtgtaaccgtcatccattatcgtgcttatattttatttaaaattcatttagttactaaaactatacatgaatttgtttatttttgttgttatacgtaatatatgatgagatatcttaattatattggttcatcatttcagttttgcaatctattgtgtcatgacgtgatatgacattctcttatatcttaaaaaatatacatatcattttttaataaatcaaaatacaataatatttgtttgataacagacgtttaggattctgacgatatagacaaatgagttttttggttaagagatctttatttgaggggtctagaatagatctgtaaatatttgtgcgtttgttttgttaatagtttagagattttaaataaactgattaatatttaaaggtttttgtcatttaaatttcttagttaatagtattatttattattaatataattcatggttttaaaatggatatggcgaggatttttttcattaaaatctactttccaacattattttgcttgtttttttaaaggcttaaaacgacgtagttttaataacctatatatagacatacggtttgcgaaatctatacacgtctaaaagttatattgtgagtgacttttgagatcgcaattttgactgcatttattgttgatattgcatacgaataaatatatattgtgaacattgcattatgggtttcttcatcttcttaggaaattaggtatattagcaatctgaaatctctcttcacgtgaactattttgtttatcagcactgacaacattatctttggccatcgtcagcaatttgtagagaaagcaagggctcattctcatcgtaattcatctattcttcatcgaggaaagctttgagacgaggtgtgggatggaggaattgagcgtgttcagacttggatttgatccgattgtaaccgctcgcgctgtttgtctagttttacgattacgattctgaataatcaagttgttagatctcacaatgttattgttattttcataccggtactatattgtaagtgtattttcataccaaacaaatttgtaagatattttcatatctaaaatgcatctttatttgaattttatacccaaatttaagaaaacgcgtaaaattcagagtcaaattaacagaagttagtcaacaccgtgaagattttgagtcagcgcacacactgtgataatgacgtgtttaaaacgacgtcgttttgcagtgttggaatgtaaaattttcaaatttttgcaaaatacggtttcgaacccgtgtcctctttgtctatagagagggtgttaaaccatctcatcccacaaacttcattgattatacaccaaacgttttaatatataaaggtaacgatttttctttaaaatgaagtgtctagccattttatctaacacaactttatcggttagatgccaaacattttagtatataaaggtaacagttttgtgattttaaattaaggtaaaaccctctgtttataccagcaatgtaatacccctgaagatgactagcaatcggactgaaggtcgcgaacgtagaagtgtgaccgtgactttcaaaatctttcgtaaagaaaaatttgatggaataatgggtaaactagcactacctaaagtgatcatagatcaaaggaggctaatcaaaagagttatagagcaatcacgagtgagttcagatttattggctatcgctaagagtcatgaagcttctgttagtgtaccagatgcatcagatgtaggagttaattctaagttcagaagtgttgttgagaacaccaggaagcttctgttagtgtaaaaatatatttttgaatatatgttgtatgactcgatttgggcattaggcctggctagccgaacacaaatgtattttgaagtattttaagattaataaaatgagttttcttaaaagccttgtatatctctgatattagtcttgtccggactaacacaacttgcgaatgtggtacgggttgaaaagccttaggccatgttcgagaggaacgatgttcgcagatggactgaccttggtactggaggtgttctgggaactcagtcggattgtctacgagcgtcttaggtaacgcttccggattcgttcttagttttagaacggttcggggtgttacagtcggtccatataaatctctaactaaattgttaatgaaaatcacctttaagtataaatattaagaaaaaaggctccttcattaataattacgcttaaatatatctcgtttaatagatatattgtgttaatgcttattaaaaatgtttaaaacttatattcttaaaaattgctaatgtcgatttaaaaattccaagatagtgtaatcgtcatccattatcgtgcttatattttatttcaaattcatttagttactaaaactatacatgttgatttttattgttatacgtaatatatgatgcgatatcttaattatattggtttatcatttcagttttgcaatttattgtaccatgtttttaatgctaatttaaagcaaacatgacattctcttatatcttaaaaaaaatatacatatcatcttttaataaatcaaaatacaataatatttatttgataacagacgtttaggattctgacgatactatagacgaatgagttttctggttaagagatggagggatgtaaaatagaactataaatatttgtgtgtttgttttgttaatagtttaaagattttaaataaactgattaatatttaagggtttttgtcactaaaatttcttagttaatagtattatttattattaatataattaatggttttaaaatggatatgtagaggtttttttttcattaaaatccttttccataattacaaaacctataaattgagattcggggaaaataatatctaaaccaattgaacagtctcggttaattaacggttcgattgaaaccggttttaataaagaagggggaagattgagatttttggtagccaaaacaaaagaatttagaaagaagccatttcgctccaaaatctccagaattttccttctcattcccggaaaatttctacaggtattttctggggaaaacgaaaattacgtcaaatcttccgtaaacattacgctattgcatcgcgcatccggattttgaactttgactaaagatcttaattctaatttcttgttcagttccttggatttgctcgatttcggaagagaacgaagaagatagtatggtaatatcttcattcaacttcagcgatcttgttcttagtatcctgattggatgaatttgttacttcaggaaactccgaagatcgtagtaacgagtgaagattgggaatcgaagctaagtgatgtggaaattttgatagaagacatgaacagactcgtgatgaatcttcttgtggctgaaggatatagagaagctgctgagaaattcaaagaggagtctataactatgcgtatcctctctgatgatgattcatgtttaaacttgtgaaagaaatttctttgattctttcttgttctgatgatggtgatgatgatgcttgtgaaagtctggaagaaatttctcagattcgttcttttatggtgatgatgatgcttgtgaaagtctgaaagtaatttctcagattctttctcttatgatgatgatgtgattcgtgtttaaattatatgatgatgcttgtgagagtgtgaatgaaatttctcagattatttctctgatgatgattcgtgtttaaactagtgaaaggaatttattagattcgttctcttctgattcggatgatgattcatgtttaaacttgtgatttgtgtaagaactttctcagattcgttctcttctgatgatgatgattcttgtttaaacttgtaaaagaacttttgttagattctttctcttctgatgatgatgctgctttaaaagtgtggaagacatttctcagattcgttctcttctgatggtgatgattcaagtttaaacttgtgaaataactttctgctttcagttcttttttcctttaaccagaaacagcagaggaagatcttgctagcatgaatgagcgattggaggtgataaaagctatcgaatcccgaaatctcgaggatgcaattgagaagttgaatgcactaaaccctgaggtatatggagtttcctaagtgcttaagagaagaaatagttggatatctcattacttgttttttggtttttggtgtttgtagattatcaaaacaagttttcacctccaccagcaaatgttgatcgagttgatccgtgagaagaagaccgaggaggctgttgcgtttgcacaggaaaaactcgcgccactagctgaggagaatgtgagtctttagcagattcatcttataataggagattggaactggtcataaacaaattctgcaatcttatgcaggaggccttacaaagagaactggaaaaaacagtgtgtatactcgttactgaaggtctccctaactgcccgtccagggagcttttccacaactcgcagtggattaggactgctagccacgtaaacgaagcaatccatacaagccagactggagaaaaaggtatatggctatactttttactgacacagaaagtgaaaaataatgagcttatctaccaaaaaacagaaccagttgtttatgatggccaaaagtgtcataattacagtccctagttgctctcatgtgtctttcagatttccagctcttgaaactttgtcaatgtaccaagtgagatgatgatgatgttatgttttgtgaattgtcaacaggtcctgaattggagcgcttgttgaaggagctgatttggactcagaatcaactggatgaaaaaacagtctatgtgtatccacgcatgaatgatttttccactggccagctcatataccgaccagaatgattcttcttccctttcaacaactaacggctctgcaaaagggaacatatatagtgatatataactgatctgtcgcaagaacatgatgaccatttcttcctagtgagtattttgagtgaggggggagtttttagccttgctcttatgatttagggattttcttattcatgacaatattggacccctaggtagtactaataacaagagagggtttttgttttcaaatgttggtttactggttaggcttttattctccaccatggtatggttcctataaagctacataagaattcattttgaagtttgtttggtgtgtgaccgaagaaccaaaaaaaaaaaaacagttgctcattctttgtctacttatctcactattcggcaatgcatatacgtcctaatctttgttttgcttatcttagttattctatctctctcccttacctaaaaagctggcttcaaaggacttgacggatcgtttataaaacagactagtcataaacatagatttatattcgagatggcttcaaatacgaatcttaaactgtttatagtatatatagtatctaatagctgcgggtgttgtgaaagggaacttagtgttgaccatggtcatggagtttaaccaagaagtttgttgaaccaaggattcacacaatagatttgtttagagagggaaaacaaatctagtaatttctcttcattaggtattctatccaagactcgattacaagaggggttctaatctcttatgaaatacattagggttttgctcaagaacagaaaaagaattaaagttttaaaaaggtatagctgcatccatgatggattgcctacgtaccctgtgaagggatcaagccattcgtagttctcaataggtataaagttctatgtttcttgtgaatatcccaagatctccccctttttgtgaagtccctaaggcactttatataggatccttaaaccgcctccctagcgatattcttcggaagattcttatttatccttaggtcggttctagaggataatcgtcctaaggatattctccttattcttcggaggttttggggagatttcctgatttcgacattatcttcaaagattctcctttatcatttctgaaagtcccataaaagatcccattttaccggaaatgatccttggagaatgaatggtttttacaagtctttgcctcgcgtgttcttcacggctcggtggtcgtttgagaggtggcttcggggcaaacggtatgtaccggctcggggcgcgcttgatgactgtccattaagctcagttggctgtctcccgagccgatatagatgtgtcccgcagcgttctcacgattggctcgggctgtgttcatatgattaacacccgagccattttacaaactctcttcgggacggtcgatcgaataaggtcccgaggtgctttgttctaggctaggggccaatcatatgtttaaccatgaggtgattgttattcttagactgtttggctcggtcttgcttgtgggggaatccgaccccaacgaagttgtaccttgacggaagagagcacgaatgggatcggtgcgggtgtctggaaagtgcctgaagaaggttcatgtgatgatcaaactctggaatgctactgggagtactgactgtaccaaaacctcctccaacagtgccacagggaacaagcaagccccatatcaatgtgtgatgaagttgaaggagcagggtcgtaaggtggacttccacagttagaaggaggcttgtgtgatggaggagctccatatccttcgtcatagtactgatttccggatctgaataaagaagcatggcatcatttggaagtaagagatcacatgagaataccatccctagaaccgagagagaaaagtttatgttaataaatttttattgtataattgatattgaaaaacattaataaacagtgttcacataaggtgtaaattcaccccaaaagcactctaaaaagtaaaaaccaaaagagaaaaaaacatagaaatggttacttaataatataccgagtttcatctatttacttaataatatacggttatttgatttaccggttaactaaaaaatatctggtttaatcgtatttattgttggcaaacacaacattgggcgcgaagtggtttttgatgcccttcaacaacatttgggggtttcatttcaatcgcatttctagggtttctttctctacgattcaatagattcggacgaattgggggattctgaccagagagaagctatggaggaaaacgaagaggaagaagaattgcggccaacggcgctatacacggtcggtggttcagacgaatttacctttgtttctcccgatgggctctccggtcaatacacgggccctgatcacgacggcgtagttcttcagactgaaaatccggcgccgactaactgtcttgcttactacttcgaggttcatatcatgaatgctggtgaaaaaggagagatcgcgattggtttctccaaggaacacatctatagcgaagggtatcgttttctttccctttcaattcgcatttaccacttattgcgtgatttgatactcaatacaatcattgattctgtttgatttggtacctgagactgagagaacaaattgggaaataggtttagatacaatggtagatcagtagttcaaatcactgtttcaatggtttggattcgttacttggaaataggttatgtgatttgctgctcaatttgattgtgttggctgttagatctggtatcttacaagttaatgggagatttgctttgttagatgttttcacctttcagtaattaagcattccaattcactgtttcatgtttctctgtaatgttagatatactgtcagaagctgtgcctacattggtaacagtggactcatatgctctcaaaatggagatggtgatcgaactgttgctaaagccagtgacacctatacaacaggtgatttagttggttgcggtatagactcggtttcacaagaattctttttcacgtaagtaataactgtttccctatctgaacatgtttcattacaattggaaaagtagatatcaagatacacaattcatttcttcatgtcacaatgtttttgacatgtccctgcgtatgttttacttgctgacatctatgactacttctttgattataggaaaaatggaactatcgtagggacaatccccaggcaatttaggcgtcctgtatacccgacaattgttttgcatagccaaaacgaagctgtcactgtcaatttcggcggacagattgcgttttcttttgactttgaggtaaggtcgtacttttcttttcttgcatagtcggagaataactattgagtaagcagaataatatgcatctctcacatatgtccatatttgcatgtatgtggcatatttttctgatacaatattctattatctgatccacctttatttcagcattttgaagaatcattgagggttaaaaaagaaagggaaattgaaaagatttccatgtctcgcagcattagtcatgggtaaagtgtcttttcctgcctgttcttaattgtaattcttgtttctgtttgtgctaaagcttcctttttccaggcttgtaaaaacctaccttcttcgttatggatatgaagatagctttagagcttttaacctggctgcaagtcgtcatactgttattgcacaagaaaatagttttgatgagtatgaattgcatcaaaggaaaaagctcagagaggtacttttcactgctatggttatcttgctgtaattttttttttattttttttctgtgaggtacaaaatcaaccaaaagcaagctacattgctacatcttttctgtttcatatcgaactgatccatgcattctgtttgttaaagcttataatgactgctgagattgatgatgctattgctgcactcaaggatagatatccccaacttattgaggtgggctgagtaactagttaatatatcgagtgattcacattgttaacattccttgaactattttaacaagctgcttgtatcatatgcagggtggatcagaagcttattttcttcttatctgtcaaaagattgtcgaattagtacgggtatgttctttattccttgtatatttgttacacatatccatggtgtgtttctctaactaactacaatgcagaaaggagcaatagcagaggctaagtcatttggaaatcaagattttaaagactttagggattcaagcctactaaaaaaccttttcgatgtatgtagtgattctctaactgttagattaggtttctcatatttgagtcactaatagttttgtttttctctatttcaggattgctctgctttgttcgagtgtgaaactatagaagaatcaggtgctgcatatcttctaggagaaacacagaagaacatagtagcagctgcagtcagtgaagcgattctatctacaaatccggccaccagagaccagcaatctgcttcacttgagcgagtgcttagacagtttgaagccacctgctcactctatgctcgtgaataaaatcttgactttttctgtttttctttttatcttttctcttgatagagtcattgtgtaagctcaaatgttctaaaactagcgatcatactttaacttgattcacaactatatacgagattatattggagcttgaaaatttttatttacaagtatttatctacaaatcggcaaatattgagctgctcatactaattttgataatttaatcggctacaaattttaatgacatgttgttgttagctgtaagttaaaatatgaaatcgaaagtcttttgtttattgctttcaacttaagcctttgtgattacaagctatgtctatttatacatctagattgatttaacctagtgtcttcttgatttgcatagctgtcacttggctgttatgtggcgtcgttgtcttcacatgattcaagagcctcatagcgattcctcgtcgttacttccgtactgcgtggagataaggaccgctctgcaacttttctgcttttgtcctttgttgttgcaggttgtcgttgcactatgttgggcttggctcttggattgggcacttgtttcggattgggctttaatggttttgagcccaattccaaaactgtgtcgtttggagctgttctgttgatactccccctcaaacttggaggaggtgggaaatcgacaccaagtttgaatcggagagattcgaaaggagccttggcgagagactttgtaaatatgtcagcgagctgtagataacccgggatatgatggacgatgagctcaccaaaagctacctgctctcggacataatgatagtgagttgcaaaatgctttgtccgagcatgaaacgatggattcgctgtaaggtaaacggcagagaggttgtcgcagaagagttcggggagctataactgcggaacacccaaatcacgaagtaaattgactagccatgtgattttcgaggctgtatcggacatagagcgatattcagcttcggttgagcttttggcgactgagacttgctttcgagaagaccaggagattaaattgttggcaagaaatgtacagaagccaccggtggagcgacgtgtaccatgacaaccggcgtgatcactgacactgtaagctcggagttgacaatctgtgtccttgttgaatgaaattcccatggttgttgttcctctgatgtataggagaatccttttgaggagaagaaaatccgacattgtaggggcgtgcatcttttggcacacgtaattaacagagaattggaggtccggtctagtaagtgtgaggtagtgcagcttaccagccaaacttcttaaatatgatggattgtcgaagagctcggtttgattaggtgctctctcaggttgaagtggcaatggtgttgcaacaggagaacagttggacattgcagttgtagctagaagatcttctacataattctactgagagagaaaaagaccttttggatgaaattgcgcctgaataccaagaaaataactaagtctgcccaaatctttcatcttgaactgcttattgagctcattaagaagactggagataagttttgagctatttcctgtgatgacaatatcatcaacgtatagaagaagcatgatcacatccttgttctttacgtagacaaagagagaagggtcagacatactgtaggtaaaaccaaaattgagtaggaatttgctggatatgtcaaaccaagcccttggagcttgtttaagccatagagagctttatgtaataagcaaacatgatcaggatgagcattgtcaatgaatcctgctggttttctcatgtagaccgtttcagtgagatctccatgaagaaagacgtttttgacatccatttgtttgagttcccattgcatgatagtagctagatgaagcacaactcggacggttgcagatcgaactaccggactatatgtctcgaggtagtctattccttcttcttgtttgaagccttgagcaactagtcgagctttgtacttatctaatgagccatctgcattgagtttgatcctgaaaacccatttggagcctagcacatgcatctttggtgtaagaggaacaagtgaccaagtgtgtgtttcagagcaatttcccatttcctctaccatagcagcagtccattttggatcttttaatgctgcagttactgttttaggcataggatatgaaactttgtgtgtgagaagagcataccgttgatttggtttgataattcctttctttaatctcgtggtcataggatgagtggattctgtagctgaatgaagaatgttggaggttggttgttcatgcctagaggatgatgagagagcgttgttgccaataggatcaagatcggagcttgccgtacactcagaacactcctcatttcccgtagacagagtttcaatttcttcagcattatcttgagaaggaatgattcacaatggtgtaacacagaccggttcacttggtatgtcttgattgttgttatgaggtgttgtctccccctctgtaattataatagcaggactgcactctaatgaaaggttatgttgttgattttttgtgatgacagggacatttgtaccaatattagagccatcggtttcttccttttccaatggaactgaagagcttgagaagccttttaaccaagcgtcaaacatctgagttggggaagaatgctgcaggccagtgtaagtatcaatgaaaggaaaagagccttcatcaaacacgacatggcgacttagatacactcgtctagttggaggatagaagcagcggtaacccttatacttatccgtgtaaccgagaaagatacacttgagagacctcagatcaaatttattgcgagcataagcacgaagtctagggaagcaggcacatccaaacgttctcaaagctgaataatctggtgctttgccaaacataacttgataaggtgtggtagagctgtcaagagctgttgtgggaaggagattactcaagagtgcttagacagtttggagccacctgctcactctatgctcgtgaatgaaatcttgacttttttttctttttttttctttttctcttttctcttgatagagcctttgtgtaagctccaacgttctaaaactagcgatcgtactttaacttgattcacaactatatacgagactttattggagcttgagaatttttatttacaagtatttatctagaaatcggcaaatattgagctgttcatactaacttttataatttaattggctacaaattttaatgacatgttgttgttagcttctcgctaaacaaaattgttgacgtggtaagttggatggacagaattttattttagaccagggattagtccgagcgtatatattgacgattgatatatataaattacttcactcaatttaaaattcagtttaagcttgttgagtatatatatagagatattaatttatttaataattaaaattttctaatattttcctttttgaattattatttttgttaatttcggttaaatttggttaattttagttattttgaaagaaaaaaaaaaacacaacgaatatgataatattttggttagttacggttttcatttatttaagttttaatctttacccattgcacattgcaccttaaataaataaaatccctacccattgaacatgctctaaaatgagttatcgaccgtcatgttatcgatacacagaagggttatgttgtaggagatttttcagattgtggtttgacctgtatgtatttgacatgaacgtttgtcttgcaaaaaaaaaaaattaaattgagtttttttttgcacaaaagccttatattttaaaagagagttatcgagtgccatgtcatcgctacatgggaggactgtattgcgggtgacttttgagattgtgagattgacttgcataattcggacttggatgaaaacttgcaaacggaattgacttgaagggttgttttgcagaaaaccctgataccctaatgttaactaagatatagatctgttatcgtatgagaaatgcttttaccatttatttattaagattaggtatgtagaatcaaaatcaagtttatcatgattaaacaaagagttaaattgtatttgctaatggaatgtttaagatttgaattctgttttaaataaaagtactaaaataaatatataaaagtgagcaaaatactatttataattcaaaatttatcgataagatatagtgtgtagaattaaaatgcagtttattgttatgaaataaatagttaaattgtatagaaaaattgaatgtgtaagattaaaatttggtttgaaaaaagtactaaattaaatgttaacaaaaacatatattactatttagaattcaaatttaatcgggagatttgcaaaactaccttttttttactaccctcttgcaacaatacccttttgtgttgtccatttttaaaaatagccttttcgttgaacagaatgacaacagaaatttttctgtcaaatttttggcgccaaaaaaaaaatttccacaaaacttttctcccaccaaaaaaaaaaaaaatcccgccaaaactttttttcgtaacaaattttttctcagcaataaaaaatgcttttaaaaatccttgtaaattttttttcgtgggaaatagatttacaaaggattttaatagagttttaagatatttacaatggattttaaaagggttttgaaagatttacaaaggttttttaaagatttttaaagggtttaaaattgttttaaaatatttacaagggattttaaagggctttaaaagatttacaaatatttttaaagggtttaaagtattttaaaagatttacaaaagattttacaagatttaaaagagatttttaaagggtttaaaagggttttaaaagatgtacaagggtttttaaaagatttttaaagaatttacaagaagaccttataaaaactcttgtaaatgtttttaacaccttttaaaatcacttgtaaatgttttaaaacctttttaaaacaattttaaacccttgtaaaaatctataaaaagactttgtaaatcttttaaagccctttaaaatcccttgtaaatcttttaaaacccttgtgaatcttttcaaacccttttaaaatcccttgtaaatctcttaaaacctttttaaaatcccttgtaaatctatttcccgcaaaaaaaaaatttcttgcgggaaatatatttttgaaaaaaaaacttggcgagaaattcttttttcgaaattttttggcaggaatttttttttagaatattttgggcaaaaaatagtaatatttcattttgttaacctaaaacaatatctaaataagggtaaaatggtcattaaaatttaaagagggtagaaatgaaaatggctaaagaaaaagggtagagttgaaaatgggtatcatgaaaagggcattaaaaaaaaaaatctatataatcgatataatattatatttatttcttatacccgtttttaggcggacattatctagtgtattataaaatataaatcatttaccattactaacaattaatatttatatcgacaatacaattttccaaattatgtattaataataatttgttccattgatggggtggctttcttactaatgtttggttgaaagagaaaaacaagcagtaattaaaatatatagaaattaatattgctgtaaatttgttgatttactggatgtatgttattccaaacactaatttttgaaagataatattttaataattgttattagtcatattgaatgtttacaaaagatgtagaagaaaccaacgtgtagcttgggttcaaaacctagttctattaatactaaagtttgctaatcatgtttaaagtaaaaatagatgaattttattaatccaatctctatgaatttaatatctttttatataatttcgtatgttccattgtttattatgtcatattatcattcttctaattgaaatatgttattcttatcatcatttgaaaattgtttttattctctggactttcccatatataaccgctccattgttttaccttttaagaaccctagtttgttctttccaagtcatttactatgtggtttttagatgtggacaataatatataagttatgaaattatctgaatccaatattttttgaatatgtgaaactcggataaacatcaaaatatccgtatcagaatccgtaaaatgttagtagaaaatatttgaaggtataaagagttgggcaagatgtgttagcggcaatgattttgaatgtgatgagaagtaatatctaagaacaagtggttagatacacaattatgtgaatagatgatataatatatacaacaaaaatgattgatgagaaggagataaaaaaagggaacttagttccattgaccaaatgtgtttgcgatcactttttcaaattttgaagtaattgactacattgtacaatttatgtgtaatcattcctatagtttctacatcgattcatcatacaatcatgagttttcatatatctagatcctaattacaatcaaatatatgtttgtgagaggttgtatgtgactttgaataaaacacaacatcctccatcatatctcttttgaggatttaagataattttgaagatttctttagttgaaaacacataaatctaaataacatgatttaagtggaatttgggaagattttcaaacaaatcataataactactctaaattcacttaagatcatacttgatacatatattaattaaaaaaaaaactatagactaacttttttgttgtgaaagtgtgttatttatatctttaacataagagaatgcatcattggtggtgtgagataaaaccattgtgtctttctaacccacatctaacaaatattttatctaattgggataataaaaagtgaaggcttaataacacctaaaaatgcagcgaatattctagcttccatgcgtcataagcaagccaaaaaattggagactatatataagttcttctgtataattagagttacaaatttgtggagactatatataacttcttttgcctcccatgcgtcataagcaagcagaaaaaaaatggagcaaactttcataacgtggaaaacttgtctttctttttttaatacatatttaaaggtttaaaagagttaggcaagatgtgttagcgacaatgttttcgaatgtaatgagaaataatctttaagaacaagtggttatgtacaaatttatgtgaatagatgataaagtagatacaacaaaaatgattgagtagcaagagatggagaaagagaactttgctctattaaaaaatgtgtttgagatcattttatcaatttttgaagtaattggctacatcgaataatttatgtacttatatatagtttctatatcaattcatatacttgatacatatattataaaaactaaaatccttaaaactacaatttttgtttagaaaatgtgttgtgtatatcttcaacatgagagaatgcatcagagtggtgtgatcaaactcttctaacccaaatctaacaaatattttagggttttgtgccaacaaccctcaaaaaatttttttttgcaacataacctttcatattaaatacatgtaggtcaatactctgatatcaaaagtcacccgcaatataaccacgtgcatagattttatataatccttgggcgtgtatagattttgcaaacagtataagtatgtatataagtgattaaactacgtcgtttgagcatttttcggaaaataatatattactaaagtggattggaaccaataaggccccgatccagatttgaaaccagaaattggaattttcaaacttagggtttgattttggggatttataagtgggaatctttcgtttatgtcacaacgtcgtcatatctggtcaataacggagactctttcacaaccaacgtcgtatctggtcaataacggagaccctttatctatgtattttgagataactcagtcgtgaaggagtcataactaagctgtgtgactattataactcggccaaaccctgaaagtgctttccttaagccatcagttggtacaatcaagtaattaacatatcataatcacattccaactagtggaatcatgaaactatctcatattctatatactttatccaacatcatacccaacaacatcattcctagaagtttggtcaacatagtttgtcaatcgacacttaccgaaaactcaatttattttttgttttcatataatagatcttgaaactaatagaaccaacaattgggtggctagtttgaaatctcataataacatctggtttcttataactcggtcaaaccacaaaatcttctggcataactcagccgtaacgtattggtattgtgaggcccaagcccaagagggtcccaaccaacccaagtaacacacaaaaccctaagcgtgtgtatgtacatatgtatatatctccctcttcacgcagcttcttctcacatcgtcttcatcaccatcacttctttatctctcatctcaatcccagccatcatcatcatcgtcgtgacaccggaattgaagtcacgttggggtcatgattgtttaacgtggttggtttcgtcgccgttcatcaccggattgttaggtaaggaaaacctatcatggctatgaactatactactgaaattattccatttagcaattggatttgtggattataacttcaactattgaatttttgtgtgaacatgtgaaataatgaaacagttcaagtggtaggcataggatatgaaacacttcaataatttcccatttcctctaccatagctgcaattattgttttaggcataggatatgaaactttgtgtgtgagaagagcataccgttgatttggtttgataattcctttctttaatctcgtggtcatagtatgagtggattctgtagctgaatgaagaatgctggaggttggttgttcatgcctagaggatgatgagagagcgttgttgccaataggatcaagatcggagctttccgtacactcagaacactcctcatttcccgtagacagagtttcaatttcttcagtattattttgagaaggaatgattcgcaatggtgtaacacagaccggttcacttggtatgtcttgattgttgttatgaggtgttgtctccccctctgtaattataatagtaggactgcactctaatgaaaggttctgttcttgattttttgtgatgacagggacatttgtaccagtattagagccatcggtttcttccttttccaatggaactgaagagcttgagaagccttttaaccaagcatcaaacatcggagttggggaagaatgttgcaggccagtgtaagtatcaatgaaaggaaaagagccttcatcaaacacgacatggcgacttagatacactcgtctagttggaggatagaagcagcggtaacccttatacttattcgtgtaaccgagaaagatacacttgagagacctcagatcaaatttattgcgagcataagcacgaaatgtaaggaagcaggcacatccaaacgttctcaaagctgaataatctggtgctttgccaaacaaaacttgataaggtgtggcagagctgtcaagagctgttgtgggaaggagattactcaggaaattggcagtaaagaacgcttcaaccctaaatctctatggtgctttgctttgaaacattagtgtaagacccctttctgtaagttgacaatgctttctttctgccaaaccattttgttgtggtgtgtgaggacatgagatgtaatgttgtataccatattcttgaagatgttttaagaaccgattacttgtaaattctcctcctccatcactctgaaaagttccaatttttgtttgcaaaagattttcaacaagactctgaaacttgatgaagattgaacaaaaatctgatttttgcttcaatggatagaaccaacagaatcttgagaaattgtcaatgaagattacataatactgaaatccttgaatagatgaaagaggtgctggaccccagagatcacaatgaactctctctagaggtcttgaagcaataaaatctgaagaagtaaatggcaatctcgaactcttcccaagccgacatgattcacacaccttgctggtacttttattgatttggatcgtctttttgttagctaagagctgaagtacttgaggattcggatggcctaatcgcatatgccagacttcatcagttgccttgacttgtctggtggaatagaacgtctgaaactttgggttctccaacttataaagtccctcatttgtactgcttcccattgtcagaactttgtgagttaccttgtcctttacaagaacaccatcagcatcaaaggtgaaggagcaatgatagtctttagtcaattttgacaataacaacaaggacttagcaatatcagggcataccaatacatctgttaaaggaagattacctgatgcagagggaaggcttgctgagccaatgtgagtgataggtaagaagttgtcatcgctagccattaccgtgtcattaccaaaataaggttgcatctgttgaagacgagagctgttgttggtgatatgagttgtggcagcagaatcaggaacccaaccactgtcatctgtaacatcggtgatgtgtaaagctgagaaggcagtagcggcagcttcagagtgttggtaagagttatcaaagttcttgagtcggtaaacaacatcttcataggtcggaccatgaaacgcatctaaggaaccttcaagagaagtgattaatggttcatactcacgggtaagaccatgaaccatggcgaaaaccttcatcttttcggcaattggacttcccactgaggcgagttggtcacagatggtcttgagatagcgtagatactcctccatggttttgccttcttttgataaatcgtgaagacgacgttggagctcaaaaatccgagaggaagagatttgattgaagtgttttgcgagattctgtcatacctcatgagatgtttttgagcccacgacaacactgagaatgtcttcagacaatgaaccaagcagccacaccataactacttggtcggagcgaaaccaagcttgatattctggatttggaacagcttcagtgacgccagtgtcttggggaccagagacagtgctgattggaggagcaaaggcgccattgacaaaacccagaagaccttgtccggagaggaaggattcgaattgggatttccacagaatgtagttacggtctgtgagtttcaccgtaaaacagttggggatgtttaaagatggaagagtatagagatccatggattgatccatggctctgataccatgtaagttaaaatatgaaatcgaaagtcttttgtttattgcttccaacttaagcctttgtgattacaagctatgtctatttatacatctagattgatttaacctagtgtcttcttgatttgcatagctgtcacttggctgttatgtggcgtcgttgtcttcacatgattcaagagccttatagcgattcctcgtcgttacttccgtactgcgtggagataaggaccgctctgcaacttttctgcttttgtcctttgttgttgcaggttgccgttgcactatgttgggcttggctcttggattgggcacttgtttcagattgggctttaatggttttgagcccaattccaaaactgtgtcgtttggagctgttctgttgatattagcttctcgctaaactaaattgttgacgtggtaagttggatggacatgattttagtttagaccagggattagtccgggtgtatatattgacgattgatatatataaattacttcagtcaatttaaaattcagtttaaacttgttgagtatatatatagagatattaatttatttaataatttaatttttctaatattttcctctttgaattattattgtaacacccgccccaccatataggccaagacggcatgttattcatctgatcttgccaaaaagttttctttaaactttatacatgaacaaaatattgcacataactccttacgcctactaacctgaggaaaaagggaagaaaaaaagggtgagtaaagaatactcagtgaggggaatcaactctgcccactgaaacatagaacactttctaaagctatacaaccatcattataacatataaacttagacacaagcaaacaacctaacatgatttacttctaataatacattcataataaccatcttatcaataatagcacatatatacatatccttaggtccagtcatcctcgtgacgactagaacctcatgagtggaggctggccctcgtggctcatacactcccatgcatcccgggctcgtcagcctttcttgaccagcatgtaacccgtcggcccatcactgtccacattactagggagaccacggcctatagctcgattctccccagtcatacatacattatacatacatcatactcaacaatcatcaaatcatatcatcacataatcttatcctatgcaatcagatctaagcctgcatatcaggcgtcaagatgcataacaaaagaaaatgatactatgtttcgcaaataccatcctcaccttagcctagtgaagatgaaaactcctttcttttcacttagacgatctttactaaaaccacatgctcataagctctaacttagttctccttcaaccaggacttgaatccatgagtcatgaaagctcctgcaaagcttcagctccaaccgaactcgtttcccaaccaacaacacaaactcatcactatttacttcaaataaaactgtcctggaaacatactcagaagtaaggaactaaccgttagaaacgtgatcccaccgttgaagatgtagatagtagtatcatgaattactccacaaatttacagcatgatcggatttcattacaagctccaaacgtcgtcgtcaacaagccttctcgaactgtcatttaagatttcctggattcacagactttgcagttacttatcatgaaagaaacgtgcataacttctttaatataatcccgattccatctctgtcagcggctatgaattcttcacatcgtcttctttctatagacaccttattcgttatttgagtccctctggtctgtcgggaaatcatcctgcaagaaacattcttgaaattgtacttcctctttcctcttttctcttcttcttcttctttcttttctttctttcctccgactgatctcaacaccatctacaaaatagactcatcactggtttttcatcaccattgaatgatctcgtctccatcgccgctttatctccgacgcaaccaatctctttgttttcctctagtggatcatgatgcttgctttctctttgatgtggtgactctggtgcagcgaacacatatggtggttttgaccgtctcctctattcctttaaggaccaaaactacactatgaaatctcagtttacaaacatcggcgacaacctctaacaacaacgacgtcttggcaaccttgactatctagcctttctctcttttatctctcttttttctcatggaaagcggctagggtttatttttgtacgagcttgcttcgcgattcaacggagaagaggatacatacatatatacgtacatatgtgctcaaaaatctaaatgaaacccttatgtcgtttagtttaaagaaataggccttaatgggctagaagtcacatgatgcaaaatggcccaaacacaagatttgggagctgggtgttacaattatttttgttaatttcggttaaatttggttaattttagttatttttgaagaaaaacaaaaaaaaccacaacgaatatgataatatttcggttagttacggttttcatttatttaagttttaatttttactcattgcacattgcaccttaaataaatgactcataaaatctctacccattgaacatgctctaaaatgagttattgaccgtcatgttatcgatacacagaagggctatgttgcaggagatttttcagattgtggtttgacctgtatgtatttgacatggaggtttgtcttgcaaaaaaaaattaaattgagtttttttttgcacaaaagccttatattttaaaaaagagttatcgagtgtcatgtcatcgctacatgggaagactgtattacgggtgacttttgagattgtgagattgacttacataatttggacttggatgaaaacttgcaaacgaaattgacttgaagggttgttttgtagaaaaccctaataccctaatgttaactaagataccgatctgttatcgtataaaaaatgtttttagcatttatttattaagattaggtatgtagaatcaaaatcaagtttatcatgattaaacaaagagttaatttgtatttgctaatggaatgtgtaagatttgaattttgatttaaataaaaatactaaaataaatatagaaaagtgagcaaaatactatttataattcaaaaattatcgataagatatattgtgtagaattaaaatgcagtttattgttatgaaataaatagttaaattgtatagaaaaatggaatgtgtaagattaaaatttggtttgaaaaaaatactaaattaaatgttaagaaaaaaatatattactatttaaaattcaaatataatcgatataatattatatttatttcttacacccatttttaggcggacattatctagtgtattataaaatataaatcatttaccattactaacagttaatattttatatctacaatacaattttgcaaattatgtatttaaaataattcgttccattcatggggtggctttcttaattattaatgtttggttaaaagagaaaaacaaccagtaattaaaatatatagaaattaatattgttgtaaatttgttgatttactagatgtatgttattccatacactaatttttgaaagataatattttaataattgttattagtcgtattgaacgtttacaaaagatgtagaagaaaccaacctgtagcttgggttcaaaacctagttctattaatactaaggtttgctaatcatgtttaaagtaaaaatagatgaattttatcaatccaatctctatgaatttaatatttttttatataattttgtatgtttcattgtttattatttcatattatcattcttttaattgaaatatgttattcttatcatcatctgaaaattgtttttattcactggactttcccatatataactgctccattgttttacatttttagaaccctagtttgttctttccaggtcatttactatgtggtttttagatgtggacaataatatagaggttatgaaattatctgaatccatactttttgaatatgtgaaactcggataaacatcaaaatatccgtatcagaatcagtaaaatgttagtagaaaatatttgaaggtataaagagttgggcaagatgtgttagcggcaatgattttgaatgtgatgagaagtaatatctaagaacaagtggttagatacacaattatgtgaatagctgatatagtagatacaacaaaaaaatgattgatgagaaggagatagagaaagggaactttggtccattgaccaatgtgtttgcgatcactttttcaaattttgaagtaattgactacattgtacaatttatgtgtaatcatgcatatagtttctacatcgattcatcatacaatcatgagttttcatatatctagatcctaattacaatcaaatatatgtttgtgagaggttgtatgtgactttgaataaaacacaacatcctccattatatctcttttgaggatttcagataattttgaggatttttttagttgaaaacacatatatctaactaacatgatttaagtggaatttgggaagattttcaaacaaatcattacaactactctaaattcacttaagatcaacaaaatcataaaaactcaaatcatttaaaacaaatggttggatacactttgaaacttgcaacttatatttcgattggttgtttttttatagtcgattgttcttaaaaaaaaactatatacttgatacatatattaataaataaaaaaattaaaactatagactaaatgttttgctgtgaaagtgtgttatttatatcttcaacatgagagaatgcatcattggtggtgtgagataaaaccattgtgtctttctaacccacatctaacaaatattttatcgaattgggccttaaaataataataagtgaagactcaataacactaaaaatgcagcgaatattctagctctacaatgttcttcggtataattagagttaaaaatttgtggagactatatataactcattttgcctcccatgggtcataagcaagcaaaaaaaatggagcaaactttcatcatgtagaaaacttgtctttctttctttaatacatatttgaaggtctaaaagagttaggcaagatgtgttagcgacagtgttttcgaatgtgatgagaaataatctttaagaacaagtggttatgtacaaatttatgcgaatagatgataaagtagatacaacaaaatgattgagtagcaagagatggagaaagagaactttgctctattaaaaaatgtgtttgagatcattttatcaatttttgaagtaattggctacatcgaataatttatgtacttatatatagtttctatatcaattcatatacttgatatatatattataaaaaataaaatccttaaaactacaatttttgtttagaaaatgtgttgtgtatatcttcaacatgagagaatgcatcaaagtggtgtgatcaaactcttttaatccaaatctaacaaatatattagggttttgtgccaacaaccctcaaaaatatttttttttgcaacataacctttcatattaaatacatgtaggtcaatactctgatatcaaaagtcacccacagtataaccacgtgcatagattttatataatctttgggcgtgcttagattttgcaaaccgtataagtatgtatataagttattaaactacgtcgtttgagcatcttttcggaaaataatacattactagagtggattggaaccaataacctataatactaaataatgcacttaaccaattgtgctgcaagatttattgttgatattgcataccgataaatatatattgtgaacattgcattctgggtttcttcatcttcttaggaaattaggtttattagcaatccgaaatctctattcacgtgaactagtttgtttatcaccactgatttcattatctttggccatcatcaacaatttgtagagcaagcaagggctcattctcatcgcaattaatctattcttcatcgaggaaagctctgagacgaggcgtgggtggaagaattgagcgtgttcagacttgggtttgatccgatcgtaaccgctcgcgctgtttgtcaagttttatgtttacaattctgaaataatgttattgttgtattcgattcatgtttaaactatatatattaatcggtttgtaaagttaacaaaatcactctgctcaattggttaagtaatctttgaatagttcaatatgccatgcgttcaaatctattttccaacattattttgcgtttttgtttaaaggctcaaaacaacgtagttttaataacctatatataaacatacggtttgcaaaatctatacacgtctaagagatatactataggtgacttttgagatcgcagacctgcatttatttaacttacatgattgagttacaaaaaaaattacttagagaattttttggcacaaaatccaatttttataactaattgaaccttaaaataataataagtaaaagccgttttttttgttaaaagaaggctcaaaacgacgtaattttaataatcatgtacagatttatatgatttgcaaaatctatacacgtgcaagagttatattgcgaacgacttttaatatcacagtattaatctacgtttgtttgacataaataattaagttgcaaaaaaatattatttgtgttttttttatgaagcccaatattttatttaattgggcctaacataataataagggaagcccaataatttgtagcaaatattctagggttagaatattcttcaacagaattagggttacatgtgcggactctatataaatcttttttgcctcctacgaatcacaagtaataagaaaacaatggagcaaacttttattatgatcaagcctgacggcgtccagagaggactcgtaagcttcccttttctcttaatacatacttgttgatcttgatctgattttggttttgtattcagttctttggattgtttatacttaaaagatcgatatgtttgtgtttttttctttcagatcggtgaagtcatctgcaggtttgagaagaagggtttcactttgaaaggtaatgatttcgattaccaaacttgattttacattataattagaggtcttagatctaattaaagtcactttgttacttgaattgagattgtaatgacactatagttgcttatggtttggtctagtttctgaacactaatagtttagtaaaacttgtttgacttgacaagtattctgtgttgtctaatagattttagattatagtatctgtgcataagaacttgttattatctggaccttttgtattatgtaatttggtagataagagtgttagtcttgtgtttctgatcagtgtagatttgtattttatacaggtctgaagttgatcagtgtagagagatcttttgctgagaagcactacgaagacttatcttcaaagtctttcttcagtggactcgttgactacattgtatccggccctgttgttgctatgatctgggaaggaaagaatgttgtcttgaccggaagaaagatcattggagctaccaacccagcagcttctgagcctggaactatccgtggggactttgctattgacattggcaggaacgtgatccatggtagtgactctgtcgagagtgcaagaaaggagattgctttgtggttccctgatggacctgtcaactggcagagcagcgttcacccttgggtctatgaaacttgatgatctgttgctttttcagtagtgtgttttcgacattgcttgtcttttgaacaagacttctatatttaagttgagtttgattatccttctctactttgcttgcttgctacatatgaatacaacagctaccaactggtgatataaaatatatcagttattgcagatactgaaccaaaattgactcttaccaatggttagatcaaacctatttagtaaacacaagatcatacttcttgtaaccttgtgtttcatgaacacataatgttgtcaatctcttagatgctctcgaaaactgcgacgttcgacaaagtggcaagcttaagttgtctagtaagccattgtccaagtttgaggctgacaccaacttgaagggggcatactaggagagagtgataagaaaagttttgagtatttgtctactgaatttcaagcttactgatgaacattggcaagctaaatttaaataactaaattttacaattttggttcttcaaactttagagaagaaaagaatccaacggtcaggttcaactccaacccgtctgtttcaatcatctattttgaccgcttattgtagctgcctgtaacagttcaaacccagccactgtcaacaatcaaagccaagtttgtttccaaagatggacacagctaagtagtcttttttgtcctcttccaattgttggttctaagaagtcggttaagcgagaacgcttctccttgaccatcgttaagcgaccgcagttccagacagcaagctgttagttgtcggagaagtgtctctagatgagaatgcgattgatttttgccctttggttttgtagataaaatcgcagcattcactgtgtctgccactacttccctttgagtctcttctaggaaataccctacattcgattcttcggggcgttcgtacactagcaaagcaaagcagtcctgaaatagataacaagatgctcgaatctcttgtctttgaaaccactaaatattgaaaaaaattccaaaacaccaccactagtttaaggttgcagaaccatcattacctctaaaatgtcttggaatgtagttaaaccaatgaatttggctaattccattcgtccatatttcacagcctcttctagtgctccaatctaagtatgtcacattttagtatttatttacttagagagaggtcagtctaaccgcagtggatctgattaatatataaggaatgaagagcatacccgtactaattcaatgaacttttgacagtgaaggaggaagcatacttctgatttatcgttctgcagattatacaattgaggtaagagttcatattttcaatgtaacaatatgaatcaactgatatgattagttcctcaatccacctgtacaagttggggatagctatctcggagtttcgcaagagcagcatcgatctcacccttccgtataagctttaccaaccgacgtatggatcagttcaatacttaacgaaagagatgtagtagtagtaacgagcaagatagcagtctaattcaatacctgtctaagaatttttctctcatgcaatgcatatgatgtatcatcaataccattttcttgagctccattgataggaggaagtgtactgttagtagccaagtctaaagcatgatgagtctcttcatacccataatgaagcaaatagttctttacaagcctgatgatcaaaaaaaaccagaagcttcttagctacgcagaaattttattaccaatgcaataaaagaatagaagaaaaaacttcacctcagtaactacagaacaagagtgtactcacccaagactcatgttcgatggtatggatatcttttcgattgctatttgttgcttattcctctccgatgattcatatccctaacacaacagaaaaaaagaggaacagctaaatcatacgtaatcactcctgtaaccttaacctcaaacaaacctaaggcagaaagagaagcacaagtaaacacatattactctctacctcaactttctacacatattacacatacaattcttaatcgtagagtctaagagaagatgtttaatcactgtatttttttacagtgaatcatctgccacattatatgtttgtaccatatcaaaaagatgcatatgtttctttactatacgatagttatacttcggactatcccatcgataaattacacaagctaagagctagaaactccactagtataccaaaaatattcaaggatcttaccttaaaatcaaaggcaaacttctcctgcccgaagttgactgtaaccctaccaagattcagaacatcaaacaaagaacatattcaagcacttgaaaaatagttcacgctgacatcatattaagaaacaaagagagcatactcttcgttttggctatgtacagctacagtagggaatagaggacccttgatgtacttggagactgtccctaccagagttccatttacactggcatctcataacaaagatatgtcagaactgtaacatgaaaatgaattgactcttgaactcttagatactcacgtgaaaaagaattcctgcgaatcatagtttataccaccaccaacagtatcaccagttgtataagtcggaccaaaagcttcaccttgacgttttcctagatatataagcccatcttcaccatgataaccacaagtgttgagttcccatctaaccattacataagaaatatcacaaaactatcaatttgaatgctcagcaacaatgatatagaaacaaaatccaacactttcgtatgttctgatcctaaccaaacataaataaaactcacacaattgaaccaaatcctgaacctaatcaaacttaaaacaactaaacaaaaataagagatctttaagaacctaatcaaatctaaacaaaactcaatatcatacccaggatgtctcgcgattctgaaactattagtagtgaaaccaatggagacacgtcctttaacaccagcatctttaacataaatctcgaagtaataagcgaaacgtttacacggagcaggtttattagcttgaacaacgccgacatcgtgaccgtgttgagaaacgccagtgtatttgagagatagcttatcgggagagataactacaaaaccgcttaaaccggtgatcgtgtttaactccgtcggtgattcttcttcttcttcgttatcttccattgtatgtggttttgcagagtgatgaaatttgtgaatgaagttggatttgttcattcaaatcgcagagaagataattgaaaccctagaattttgctgattggtgattgattatagagaaacaaaattgttgagcgaatattttttatttttttcaaatgatctcttacaaaaccatgtgatttcggttcggtttttatttgaattattcggtttttaaaaatttggtttcttagtactggtatccaaattatggatggtttagtatggttttattttggttcggtattgaatgtttatctacaatatccttaatttttaaagaaatttcggttttaaaccatttttctttgtttgatttgattttggatcgacttttcaaatcaagtatctcgattcatttacggtcggtttattggcaacaacttaacattaaaaaaagctaagagttcaaatggttacgcggttaggacggacaaatctatcaacggtttagactgctttttgtttaggaaaattgcacaatctatacttggaagagttgttatttaagtgtccaaaaaaatcactgtttgactaatattgtacatgtggaaattgcgtatgtacccctaggaaaatctttttatactgtatgaatatattgtgtcagattattattattctttgcatgtagtcttttttcttttttgctatttatttattgatttttagggaaaccagtcgtcatcgtcatttctctttctaaatggaaagttgtatcccttctttcccttattaaaacacagtccaaaagataaaagttaatgtaacatttgtattaggtgctaactctaattcataacaaaagtgaaactatctcaaatcaccataaacttatgatattagccggtaatccaagtattaacataccagtttgtattaggtggtaactttgatgcaaaacttatgaattcaaatttttaatacctctaagggtattatcactatatgtaaacaggtattagccgttaacaaaatgttaacgtaacagttgtattaggtgctaactctaattcataacaaaagtgaaactatctgtaatcacaaggaacttatgatattagccgataacccaagtattaacatatcagtttgtataaggtagtaactctgatgcaaaacttatgagggtattatcactatatgtaaacaaatattagccgttaacaaaaagttaacgtaacatttatattaggtgctaactctaattcataacaaaagtgaaaccatctgttcaaaccctcctagtccaaaaacagtctcatccttccatcttgaaccgtcaaaaaaacttttcctcgtcgcttacttaccgccctgcaacacattaattttttgattagcagtcattttccttttttatcagataacatttactttatcgactctactttcttcatacaccatcaacaaatgtaatatgtaaacatttttttaccctgctaattcgtatattatcatgatattttcaaaattatcgataatccaaagttatcagcgacatcttctttcctgttttcaaaaccatggtaaaagttttgttatcgactgtttttttcaaaaaaatgataaggagctatatatatatatatatatatatatataggtacacacctaagacttaaatgctttgtgtctctttcttataggtacaatatatctcgcggaagaaggctactgattctttgtttgtataggggcaattatgtcatatttaatttacaagaaaatttccacctaaataactaaatgatatgtgtagatccttaattatatattcttccatgtatagatatttcattcacccttttgtttatcattcataaactataatccgcagtagtgcgaattaaaaaaaaaaaaagtttgcggtgtactaactacagataacttttacgtagaattttttttatccgcatgcgatttatcgtccgctctaaaaataaagtggttttgtctgttagcgatttagtgtgcttttttcattgcatccattgaaaccaaaatagaatacaatagactaaggccttgaatgttttgtagattttgtaagagtttttagattttgtttttcaaaaacttatttttataccaatcaagattataaaattttggtttccctacaatttagaaaaactattttgttgtagtttttgattcatgattttaattttatagttttcctaaaacttagggaatctagtttttactccatcaacgttatttttctcaaaaactaaaaaccaattttttggggtttttaaaacaaaaatataataacaaaaatctaaaactaaaatctaaaatctagaaactaaaatctaaatccaaaaactgaatcgaaaatcagcatccattcagggtctaaaccaaaaataaatcatcgaatcataaataatttttagttttgatggatttttgagaaaaaaaatatttaaaaatattattaatcttgaattttacaaaagaaacttgaagtctaaaaatattattaatcttgtaaggactgtcaaatgcttttaaagtcttaacagtccaatgtcaatcaccccctaaataaatactagtggtcatagaagtaggaaccactttcccctatctccatttttgtatgaatccatgattccatattcacgtccatgttgtataccctatttaagtataaaaataagaagataatcacataatttttctaccaaaagactattgttcttatcaatttccatatccttgtttttcattttgtatcagaacaaaaattcgtacaatgactacgaataacaaggacacacttgatcaacttaaagtaagctttgacgacgtccaagagaagctcgtgaagatgcatgtagaagtagaagtcaatgagaaatttgctcacattgaagcctcgctaaaacagttcattgagacaatgacaacacaagccatgttccaaatcaaaatgtgatcgacgacatttagtacttaaccgttgacgtctcaatttgggtttccagtgaaaggcttatagtgcttagtgtgcagacaattttggcttcttcacgtgctatcacccttcatttactcaaactagtctgaaagaacaacaaaatcctttatcacttcatctagttctattagcttatgtgcgtttgttatgcggatggactgaagtttgcttgataaattatgcttcatgtttttcttttgtcatgggaccatttatagtcttttgattatactcttaaactgttttcatttttagtgaaatatttacatcttaggaaaaaaagaaaaaaaaacgtagtcaaaatgtgcatcgaacagttctaaggaacacgtctaaggaggattgagtcaggtgctacatatatataagacttgataaaagggtattgttgcaaaaggtagtgaaaaaagggtagttttgcaaatctccctagtttttattcctactatacttcccaaactagtgaattccgcattagttatcaaaactactattttgttcgctttgttttatataaatgagactatttggattagctaggtaagcataacaaaatatagctctaaaacaatgtttggatagcttagaaaaaatccaaaaataacacacacacaaaaaaggtgaggaacagaaccactagaccactttattttagttcaaatgatcttataatctgtaattgttaatcttccatctacatataaactatatgaattttccaagtatatacaaagctccttacctagtaagaaggatctttgaaaacaatcacaaaagctatacaacaaacagcgaataatacgatcaaaatatcgaacgtgagagcagtcattgcttgatcactaagctccatgtttcttccacctaaccggtcaaccatatcaggtattgattcatagcccctaaaatcttgctctttcggatcctctagcttcattctcattttctcagcttgacgactcgcaacttcttgagccagtgtccagtcataaaacctccgagtctcttcatcgctcaaaacattgtacacttctcttaatttcatgaacttttctgaagctgttttaagtggtagtgaagttgtatctggatgatactctttagataatctccggtacgcagattttatctcttctagatcagcatccgttgaaacacctaagaatctgaaaatgattattgttacatgttacaatacatattgaaaaataaaaataaaaagatatgtaatgagaatgtttgttttgctcactggtaatgagaatcaaaagagtctttgattagttctgcaaatttttcgtcactaaggagattggttttgtcctcatcaaccgatttggccgggtcggatcttcctccgatccagccttcgtccgggctttcccagtggattcttgtgtctactcctggagatggttttgacggtttagtcgggccttgtgacgcgtatatacgcgtcactcttcttgctgttatccttctaaatgctttcgtgtcatccgtgaaatgcgcgccgttttggattttgggtaggataatgcatgaggttcgtgcataggtagaagttgcataagccatggctctgtgttgaagatggtttgttctttttttttctgcccttcatgtttttggtttctcttaccgcagaaacttgttccagaacctcatgatatgtgtggtgtagattttctttatatcttttgttgtcctatctagtgtccataggaacaaaaaatttaaataattaaatgtcaacaaaaaaaaagtatgaaacgtaaagatataagagacaaaacgttgagaagagaggggcaatgagaggaagaaataatgtagagataaatgatttctttctttggaagcgatgtctaaatatgttatgcaacaaatgtgtgcgtttgtaatatatatagggtaaaaatagacaattgtatcataattaggatatgacccgcgatataccgtaaattaaatttatttatttatttttctttatcacaaaatataatttgttgtttgttgttgtttgtgatgattaataattatcgataaggttgtgtatgttttttattgagtcacaattatgatattaataagtctaatatatgttattttatcttttaggatttgacttgtgatagaccataccacgggataatattttattttattcataatttgttataaaaaaattatttaatataaacttttggtgttttcaaatttaatccatggaacatatgtagtttagtaactttatattaaaattacacatttaaatgtatcaaagaagaataacatttagaggtgtcaaagaagattaacacttatactaaaatgttgattttatttatttttttgtaactaaaaatttgaaattaaaattgtatttgttatgttattattgtttgttttgtttactattgtatagttgtaatttgattgttaattctaggagtacacccgtggtatccaaatttttcccatctaaactcatagcaccatataatctcgtctcatccaaacccgtcctaccatgtaaactcgtctcctgtaaacccgtcccgccatataaatccgtcccgtgataactaaaaatcaaattgttctttttctttttaataatatttttatttaatatacttcgagtcggtttacaatttcaatttaaaaagaaaaattgtataatatattgaaattttaacaatttcaatctaataagaatcaatatcggatcgtttcgaagattttatatcgaattctttgaacaaaaaataacacaatttcttgttaaatattttgtatcttttaaattaatgtatttcctatttgtatattttatattcaatatatttggttttgatataaattagaaaatccgtttaaataattattaaaatttgaatcccgaagatatttatgtgattttttataatttaaagattgttgttgagattttttagtgtctattttttgttgcatttatttgtttgcaaggtctatcataattaaggtgaagttacaaaaagatctgtaaagtataatatcgttcacatattgattatagaattatttagattatttttaaaaaggaaaaaattacaacatatgccatattttttccaatccttatgcaatctgccataatttgctgggccttacaactcatgtcatatttcatactgaaatatcgattttgtccctctccatttcttctctattttatctctccttccttgaaatctgtgcgctttaaccatatattattatcttcccgaagatgaagcgcttttgtcactctctcactttctttgacaacctgcacagattctttacatgtaactttcaattaaatttgtctctcaattttattcatcacaatatttctgttgtatctagatcttgtccttgatttcatcattttttaccatctattttggtccacagattagttgagcattattgttttcaccgacacgatttttttttcttctattgtaaaacaacaaaaatattcagttattacatattatcttgtctatcattcgatctgactttgtccccgatccaattctattactcattcgatatgaacttgtcccgatataacatattattaaaatatgttaacgtgtaggtgaagacaataacgctcaactaatctgtggatcaaaatagatcgcaaaaatttaaataaaattcaaaattattaaatgagaacaattgcatataagatgtaggattcataataatagagcaagatggtgaaatcgaggacaaaacgtagatgcaaaagagaatttctattcgaggacaagatctgaagactaaaacaaaagtcttgctccaattgttctccgctaataggtaatcatgtctcctaacgcattatatattacgttgtcccccgctatcaggtaatcatgtctcctaatgtattatatattacgttgtcccccgcagaattttggataaccaatttgtttaaataagtcatttttaaatacccaataacaacagtagaagccagttgttctccactattttgtcccctaattctttattcttccagcatgatttttcgtcttgtatcattacatcagccaaaagctgttatgtcaccatcttcgtcagagcgctgacccaccttaaggataatttcgtccactgaattccacgtgcagcaaaatgtggcatgagttggaaggagttacagaatatggcagggattgaaagaaatagagtggaatatggcagattttgcaagatttccttttaaaattattttgtaattatatgtttaattgaagaaagattcttttttttttcatgatgccctttttcaactctatccttttattttatccattttcatttctaccctctttaaatttttaatgaccattttacccttatttggaaattattttaggttaacaaaatggaatcttaatattttttcgcctaaaatattccaaaacaaattttccgccaaaattttcccgtcaaaaacattttccgccaaaagttttcggaaaaaaaatttcccgccaaaattattttttcaaaaaaaatgatcccacaaaaatttttttgggagggaaatagatttacaagggattttaaaagatttacaggggattttaaaatggttttaaaatatgtactaggaatttaaaaaggaaaatttacaagggaatttaaaaggtttttaaaagttttacaagagattttaaaagggttttaaaagatttacaaaggattttaaaagggttttaaaagatttacaagggattttaaagggatttaaaagatttacaaaagttttttaaagatttttaaaggtttaaaactgttttaaaaggattttaaaatatttacaaggaattttaaaaggtttttaaaagatttacaagggattttaaagggctttaaaagatttacaaaagtttataaaagatttttaaaggtttaaaattgtttttaaaggattttaaaataattacaagggatttaaaaagggttttaaaatatttacaagggattttaaagggctttaaaagatttacaaaggttttttaatgatttttaaagggtttaaaagtgttttgaaagatttacaaaggatttgagatagtgaaattgatttggggatttagggtttaaatttgtttcaacagacaaaacgacgtcgtttgtctttgcaataaacgacattgttttgttctaacagagcagatagacggaacattaacgtcgtaaaaaattatgttaacctatttaatgggaagtcaacaaaaactttgtcatttatttataaagtcaacaaaaactttacgatttatttgttttctctgaagtttaagattaaatcgtcccaaatttgaaagttggtgatttttttgacatttttcccttttaaaatcccttgttaatcttttataacccttttaaaatcccttgtaaatctattttccgccaaaaaaaatttacaaggatttttaaaagcattttttcggttgaggaaaaatttgttacgaaaaaaaatttggcgggaaattttttttttggcaggaaaaaattttggcgtaattttctttttgccggaaaaaataaattttggcgggaaattttcagtttccaattacatgttcctattggatgaatgtaatttggtcattttattcaagggaaagagtatttttaaaaatggacaacataaaagggtattgttgaaaaaaggtagtaaaaaaagggtagttttgcaaatctccctaaaaagtttggaaaattataatattcaacttttgataaaaagtttaactatttataatttttgaaactttgtaaagtttctattttttaaaataaagaacccgagtaaagcggataaccactttaattttggatgcctgataaatcaagcttcctgcttattcttaaccggaatcattttggtcctttttatagtatggctatgaaccaatgtccaattttttaagcaatgtgggacattgtacacatattatttcttcatcgattgaataatatatgtccgtttaaaaaaatttgaattacataatatacagaaaatataatattttattatctatttatattttatataaattcaaaataaattaaatataagatcatataaatttgaaagaaaaatcatatatttatgtttaaattaggtaaagatttagaagggaattagttaatgtaaataacaaatatggttagtttagagatattatatatattaaatttgttaattaaattaatttcgtattcaattatttttttggtagaaaatggtaataaaaaccaattatggaagatccgattgaagatttttgagtcaaaatcaaataaaatttttgacccaattgaattccttaaaatgtacttcaaaaatgttaagtatatgttcaagaacgcggtttaagctaccgtttaaatgttgctatgtgtatacacagtgtatttaaaacacctagattttactcgaaccagtgttattaggtggagagttaaatttggtgaattatgtagccattagggccggatagacggatttaattgtgataatgtttttctaatttttgagaacctttaaattgattagaaaaaaactgaaaatttcaaggtatttctgttatgtttttttttttcctcgtaagtttatttattgatcgaaagtctacacagctcaagtcattcttacaacccaatactctacgggctttcaaaaacaacaaacagtccacaaagattggcccaagattaaaccctctaaacaaggaaagtaaagcagatcaaaatatctcacatgacgcgtcacgatgaagatgaggtaaggacacgtgttgatttcacaaatttcgccgtaaaagattcaacttccgatgaatttttgatcgtcgtcggaaaagctaagtcgaagcaaacgaatcttctatttctcatcggtatgacaatcgcgaatcaccaaactaaattgtccacgattgatttctcaccaattgaatctctggttctttaaaaacaacgacgaaaaggtaatttcagatctgcagaacaactaaacttttaatcaggatcctgaaatatgaagtgtcttaaactgaagaacaaagtgtaaatattaagctgatagagcttccgtcaacagctaaaaatataaaagaaaaacaatcttcttcatagatcagtgagaagaaatagccacaactatgttgaactcaatccaaagatactagaaaaaccttcatccacaactccaatttgtttttaaaaaattgaaatcgataagcttgaaaaacaaaacgagccctttaaacaaaggaggttcaaggaattttaattccagatctaagaattgaaacacaagagagccaatcaaactcaatacaaagaagcctaagagagaaaacataatctacacgagacaccgtagacggacgatgaaactctagacataagccagccaaccaccgttgtggaagccgacggatgccagacggtagccgaccaccaccgttaaaagaaacggacggtgtaagaaaaaaagccggccaaacatcaccataaagacgagcgccgccggacggaaagctggacatccctgctgagaaagctagatgattccagatagattgatggccaacgaacactgaaaagctgtcgttgc

SEQ ID NO: 557 - DNA, 113800 bp, Arabidopsis thaliana
aagctttgtgattcctagaagaacggagaaatcaatattctaaaagagagtttttgttttggtataattaccgcatccataagagacttgatttctgattccatcaattcagatccaactctctttagacctgctttaagctcttcaaaggtgattgttccactgttgtctgtatctatcattttgaacaattccttcagaccaccaatctcttcctccgagagtctctccgcgattacctaaaccgggaaatcagttcttgaatataagcaatggcattgagagtttaaagaactatagctttccaacttataaggccatttacttaagtttattcatttcctgaaaatagttcttaaaatgtgttatcttagtcgatcttcctaacagggaaatcagttcttgaaaataagcaatgagagtggagactaaagggctacaactttcttactcgtaaggccattttcttgattttattcatttgcgagaactgcttaagtcgcgacaagactgctgggtcgagaggcttgtctggtgcagcatgttcatcaacaatccaagggtgacctaataatatcatcagaggaaaactcaattcttatatcttacagaaatgaacaacaaaatacatgtagcagagaggaaaacaatcataagtaacaacttacacaatgcttcatgtgcagaaatacgtttcttggggctcctatcgagcattttgtaaatcaaatctttagcaccttctgagatagtaggccacggatcagatttaaaatctatcttcccttgcaatatctgcctaaagattcctgactcggtttctgcaaacaaattactcatggatgcttaaatcacataagcaatatacttgattcagtagtaacaacggtactttcacaaacttacctgcccaaaaaggaggaaccccacttagtaagatgtacaagataacaccggcgctccacacgtctatctctggtccataacatttcttcagaacctcaggtgcaacataatacggacttccaactacatcatacagatactgccctgaagatgcaaacccacacaattgaaaattttgttaagcactgaaattagtcggacacaatgtagctctgatagcatcattacataagcataagtaacacaacaaaactatgtaaatcttgcaagaaaagattcagaaagatctagccacagaaaattattggttctctaacaatgctcaagcagcaaattggaaatgaccattcaacaaatgattctacagataacatatcatgaaaccgattttcaacaccaaacaagacatttctcaacataatctagacaatgaatcgaataaaatctgataagatcgcttcataaccataagcatatgttacatatataacaaaaccttgcacaatcaacacatccatatatatcaactaaatgtcaaaaccagatataacaaaattcaatctttccctaacaatgctcaagcagcaaatccgaatcaagaaaccaaatcaaaacatttccttgaaccaaccaacaaagacaaaaaccataagattccaatcaaaagagaagaatcaacaacgaacctggcttgtagaagacagacaaaccaaagtctgtagctttaagcttagcatcatcactgggactatcaaacaagaaattctcaggcttaagatctctatgcataacaccaagagaatgacaagcctcaacaacaccaagaatagtcttaatcaacttagcagcttcacgttcactaaaacaccctttagaaacaatccgatcaaaaagctcaccaccttcacaaacttccataacaatgtgaacaaaaacagagtcttcataagtacccttgattctaacaacattaggatgctcagagagatgatgcatgatctgaatctcacgccatacatcttcgtagtcttcacgacatacaagcttacgttttgggattgatttgcaagcgtaattagctgatgatgatttctctgtacagagataggttgttccaaattggccttggcctagctttttgccgaggagatagtgatctcttaatcttggtgtttcgtatggaagaacactgtttgagggtcttctagggtttggtttctccattgttcttgatttcgaaagtctctgcctttttttggtgtttatcaaaggaggaggaggaagatgatacgaagttacgaacccttcaatgtttcttggtcatgttgactcgtcttatgcaattattatattattattgctcttttgttatcccgtgaccatttacatttatagtatttaccaactattattgcaaatttgcaataaattgaattgatgaaaaaaatctattgatcttgaccaaaaaaaaaagaaaaaaatctattgaaatatagggactaggcttgagatttttacacaaatggtttggtcatttaggttcggattcggttattagatgtgaattaattagcaggattttagatggttttgttatccaatttttttttgttgttacttttgaattaatttttctaaccaaagtaagtcggattatattaacattattaataaaatcgataaccaaatcgaatcaaattttttataatttgtttattagatcttaaatacataaatccgatagatctgaacaaaaaaccaatcagactcgaccaaaaacaatgtccaacaaaagtatgcgttacatttctcttatatttattaagattattaggtaaattgtgttcaaaaaaaaaaaaaaaaaaaaggtagataaccatttatagagataaatttgtgcatgatattttttgcaagtatcaagtatgtatggattttatcaataaaacatgatattatcaaaaaaaataacatgatattttatttatgtaagacattaaaatatatgtgtaaaatccatccacttaaattatttaataaacagaaaaaaggttggttctcaatttggctactaaacattatgtcttaattgggaacatgattttttaaaaatctatatgatttttttttcccctaaaaatctatatgatataaagagaaaaggtcgtaaatggaaaacatataaaattcaccgacatgcatgcacactaaccaccgaatggacaagaaccaatttcttcatatcatatttggtttggttgagagttcacacggttttcgcagctttttgcaatgcacgactacaaattttaaacctcgctcgtcgtgaagaccactctttcgttttggagcaatattataaaatagacgtggtacatgttaatgtaaatgtaattgtgtgaatgtcgtataatactataatttaacacaaaattatttctctataattgtaaaacaaagtccaatcagcaataaaataaaatttaaacccgaactatctaaatacttttaaaaatccatttctaatacttattacattacgccttaacgatattaaaatatgaaaagcaatgtgtaccgattctttatggctctatccaatccatggctatgcaatattcctcatcttttgcaatgagttccaacgtagaaagaaaatttcaggtattattttgcatgcgtcgttttagtacatgtattctttatttcatcgccgttgggtaagagacctagatgtataagctttagatatatttatttcattgttcatcttcaaaatctgacatcatttggaaaacctccaaaatccatctttaaccaaacccaaatagcatcggaggacactttattcataaatgatgttaaatagatattttctaaataaaattggaactttatgcaggcccctattggcccatctttaaataagcttgggctttcagcttctgtttttttttaataagatgttcgtttgattatctaggttgctgcaacagcggcagatgcaagtaagtgcggcataatgctgcggtcaacgcttaaaagttgtattatatatgataaatgacaattatacccttattatgtttgagaaactacaaacaaacctaactctatttcttctacttctttttcatcatttctctcttacactcatcgatctcaaactctttgaaaccaatctctctccgccgccgcaatcttgcgaaatattatccggtgacttgagctcaactagatctcccgtcgttggttacttctaatacaacgttgaatctctactccgaggtactttcgttattcactgactgaaatctcttaaatattttgagtttcttatttatttgtgttctcttagttactctcagcttgatcggtttattcaaaatttccaaattctatgtctgtttctatataatgggtctaaatgtttggaactaatacttacggtcttcttcactatataggtagaaatcactaatacttttcgaggtggttggtcaggataaaactgtttgagatatagttacaagatatcaacggtcattgaatacggtaaaaaaaaaaaagattgatgatgttttgagtgctcttttaaagtttgtagtggatacactaaagccacaagaaggtgaatttacgagagtaaaccctgtttagaagaatgatgattgatattggcctgtttttagagattgtgttggagcacttgatggaacttatgtcccggttcgccgtctaagtcaatctgtagaaaaatataaatatagaaagatagaacatataatgaatgttcttgctatatgtaacttcgatatgaaattcatatatgcatatgtcagtatatcttgtagagcacatgatacaaaagttttgaatcattgtgcgaggaatgaacctttttcccacatccgcctagtgggaagtactatcttgttgatttcggatatcccaccaagactgggtttcttagttcatatcgtaggatgctatatcatcttggtcattttggtagaggaggaacactagtaactgcacgagatttgttcaaccgaaagcattcaggtttgcgatttgtgattgatagaatcaatttgtaagttattcttcaatatttactcacccaagtctttaagtgaaaactgatagctagattttgtaaaatattttcaaatgcatccaaattgtttcatgtgatgattatgtcattaacatagaccaatgaatagaggatggtataacattttgtatgtacaaataaggaaataatgcattcagacacttagtttctaaaactggatttgatgagataattattgagctccaaataccaagcccgtgaattgctataaatatctttagcaatacattcttaacaatattttcaacaatgtatcactcacacaatctttaaacaatttttgtgctatagcaattttataaattataatgttataattatacaaacctcaaaaatttgatagtggagctactcacatactctttttaaaaattctgaagaataacctactcgaactattagctaattcaatatactattatttattccatattttaagttaaaattataaaaattagcagaaaatcctagagcatgagaaaactaataaaataattttaaatattaatattgatacaattaaatatgtaaaattaaataatatgtataattaaccattatttacatttactatttagagaacatgtgataaatgctaaaatgatgatgtatcattcacatgaaaagttaaccaactttcataaatactagatgaattcccacggtacgcgtgggtttgttttgaaaattgtttagataaaaatatgttaattatttttgttactaatttatgttttgtttgttattttatacttagtaaaattagattcatcttatgtacttgcattttttattgttatattcatttttgactctaaatattaatttctatatactttcatgtataatctgattatttttatatccaaaattctaaaatctgttcattatcatgaatatatcacaacaagaatataaggtatttttatttcaagaattttcgtatgaaagaaagaagcaaaaattaaagagttattttagtaacactttttagattttatgctattgcatatagccatataagacaaatggatttattttaaatttcatagtatgtctaacgtctcaaaagactattacttgaaaatgttgaatgtcaatgttacgaaattaccataagatataaaaatgaaaagacagaatttcatatgatacaatatgaaccataacgtaataataataaaaaatcaaggtaaaataaataaactattaggtagcaaacaactaaactacaacacaaataactatttagtcattatagagtgatgaccattgaccattaaattttttaaaaaataagaaataataaaagtaaaataaaagtactaattgatttatttaaataaataattttataattttatttttattttgaaaaaatcatttaaaaaatgaattaatggaggatttaacacaatatgagacttttgattttctctcaattaattttgctgattttttatttaatcaatattcaatgatacatgtcatttttttgtgtgatgatatgtcacccatatggagaaagttagccacctttcatatatgatatatgatgattatcatttcgtaaattatttcaaaagcatataataaaataaatactatacaaaatttcttcctaagactattgttcttcgaaagccataaatagtcatttggactggtcaaatggacaataagccaagacgagactataaggctataactttctaagatggttgatataagtttgtcaaagacaatggtctcattgacaaatattttatctttttcaatggttctcaaaggagagcgaagttagtaagataaccattcaagttgacagaatggtcaatggactctatccaactagttgcatcacttaatctgagttcaatttatgtcggtgcagtggatactaattgtcttccatttaatatgctttgataccagatccatagaaactataggggtagtaaactaataatgataacatttgttttttttaagaaatttgatattgcaaaatttgatatactaattaaaaataaaataatggataatttggatatatcctcttatatttaacacgtttttcgttatattggaataaaacaaactaggtgttttcaatggataattattccaagagatatgagtatggagtatggaccatggtcctagaaatttgggatggggattggcgggtaatccttccggacgtggacaagtttatttttatgatgcatatgcttaataatctattactccagtaatttccttaaaatcttaaacaaattcaaagaagaataattcaattttacttgttaaaacattgaatctttgacaaacttgaaaatcatattaatttattttattaatagtattaaaatattaaacgtcaaataattttctcgtttcagattttgtggtccacaattgctcacaattacatatagaaaaaaatatttagctattatgttagtcaacttatttgtaatatttcaccagattactgtattactatttaaatcttgaactaattagccatccataattcataatcggaaatttatttatttgacacacatgactggacaaatgttttcccaaaatcagcaatatgtaatacttttttttttgtttgggcaaagcaaaatattttgtttttcatgtgaaaattattttaaggtcctttttagcagaaaacaaatgttttgggtacatttcgcaataattccaaagttaactgctgtaaaccaaaataaaaacaaaaaataattattctgaacaattctagatattctcttcatagtctctggtctcttaactcgccttctatggaagctcaagtgtttataatcttccattaaaaccctaaaatactttttcaatttcttcttccaatttgcttcttttctcttccgatacaaatattcatttttgggttacttcgattcctttaaagctttagaaaacatgatccgttcttcgattgtaattttatctctgttactaatttcacacttggtttctgcaaaagttctgttgatcggtaacagcacatctctctccttcgacgacgtcgaagccactttcagtaagttctttgtcactgttccatcgattactgtaatggaacgaaattgtggaatctttggccttaatagcagatttgggtttgatcgtttatatataaagtttgaaactttgtttcctttttcaagttattgtttgtttgaaatgttccaaattagaattgagaaattgggttttgaatttgttcagcttttgttatttgggtttgattgtatatagagaaagtttgaaactttgtttcctttttcaagttattgtttgtttgaaatgttccaaattagaattgagaaattgggttttgaatttgttcagcttttgttatttgggtttgatcgtttatagagaaagtttgaaactttgttgtctttttcaagttatggtttgttctaaatcagatttgagaaattgggttgttatcagatttttgttcattggctttgatggtaatggtgattgatttactgttttttcagctccgatgattaagagatcggatcaaggcggtgtgttgtatgtagcagagccactcgatgcttgttcggatttggtgaatacggtgaatgtgaaaaatggaactactgtgtctcctccgtatgtgttgattatccgcggtggttgtagtttcgaagataagattaggaatgctcaaaaggctggttataaagctgctattgtttatgactatgaagattttgggttcttagtatcaagtaaacacttctttccctcgccttttttcgttattttgtcgtaggctttgtattgtttcttgttttgatttgttgcttgagactttggttacatacattagttgttaatgatcttgtgaatctaatgtagtggcaggaaacccctctggtgtacttatttatggtacgtttgtctccaaagcaactggggaagtacttaaagagtatgcgggtcgtaccgattttgaagtgtggctcatgccaagtttcgagacttcagcatggtcaatcatggctatttctttcatatctctcctcgccatgtcggctgtgctcgctacttgcttctttgtccgtaggcatcgagttaggcgtcggcgtattctggctcttaatggcaatgactttcatcgtatgcccaaaagcatgataatacgtatgcctactaccatatttaacggtatttgtgatgaagcaactacatctatattgtgctgcatatgccttgagaattatgagaaaggggacaagctaaggatcctaccttgccatcacagtaagtactttgactcagttcgaagtaaaaaaaaattcatgcataaccattcttaattggttcttcttgttgtcttggcagaatttcatgttgcttgtgtagacttgtggcttggccagaggaaatccttttgcccggtttgcaaacgcgatgcaagaagcatcagtaccgacaagcccccatcagagcacacaccctttctttctcggactcctagcatgaccccgacgtcatcgtttctcttatcatcatcctccacaaccccattgcagtcatctcatgagctaccaatatccatcagagtagacccttctttaccatccacctcaatgcagccacacacagttcctatgtatctctcccactctcgctcccacacaagcttccaaaatggatcaaaccgattttcccggcctataccagttagccggagttcagcagatctcaggaacgccgtttcccaaagatcttacaactcaccccaccaggtttctttgcctcgtttcctccactcaagatatacgcacatacttggcccgggaaatgcatcaagaagccaggttgttgggttgttaacaagccagcgcgagcattcacttcatcaaaatgactcgcgcaggtctttcattcactttgcatctgcgagctccttaccaggctggtaaaaccgcaaaaaaggtaacaccgtactaaccaaaaggttcaatgtcggggctcattgctttgaagaagcaatcaactcctctgaggatgtccctcggctatgaatttgtgaccatgcatgattttggcaaacaatagagttaaaaagagtgttcagtgtgactgatattcttcagctgtacagttgtggagtaatgatgaatgtgagatgagtgagtttgaagagtaaagcgtctctggtgaatcattaagctaaccattgagtgtgggtatataactagcttattactttggttctttgtctatatatgcttaatacttgtcttctaaaagtttaaccattacgcagaaactataccgtatacttaccgagtagattaacaggtgaagacgaatattataatattttcttcctaccgatgttaccacagattgatttggcgtaaaggccacggaagaaatacaagtattagagtcaattaaagacagaaatctatggatgtattagccattgtgaaagagtaaaactcaggccttttgtctctaggcttaaagaaaaacacatttccaatactttgtagaagtgtgccattatccaaccctatctctagtctccaaagactttccgatcactcctagcttcccctgacctcgaggccgcaagatcccttataggaaaaaaggagaagtgtctctatgtttgcttaaacttaaataaaaaacctggctggttcgtacattccctttctcccaaccagaaactgataccagtcccttcacttcctaactttccttaccaacatcctagttcttcgactgttgtatcacttggttcagatatttacttggttgtaaaactcatcatttgcgtcaactccccaagatgcatgtccctcgagaagaagcatgttttaatgttatcgacggtaagatctgtgtttggaggcatcagcagtaagtattatgacactgctgagaattatggagaagtttacgacccaaagacacagacttgggagccaacaaaatgtactggaagattttctcgcgagaaaattattggtttgtgccctactgtttgcttgttagagtcaaagaataacgtatggtggacagcgagggtttctgaaactcgaaactagtctgcggtgatatatgcacgttcacgattagaggacttgaagaaccgtcctctaagtatcttatttcggtgacaaaaccctggcctgaggaaggagagtgatagttcggtggaagacttatactaaggaatgtaaaacggagatttggtgtgcagagattttgattgagtgtgatttccctcttcggggatacatagaatgtttttaccttccaggggttgtgaatcagatgatcccaaattccttttgcattctgctttagtgacacatgatcactgaattttctatgagcttttgagagataaaattacaattatatacttttttttgcattctgctactttggctttcaaataacggttcatacaaataaaagaagttataattcatccatacaaattttgtttaaatgatacaaaaaaagtagtaacaagattcacataccaaccacaatacttgtataatccattgcatacctgcaacataaatttcgaccggtcgatatgttagatctgaaaacaacagaaagaggtagacttgggcatagactcgtcaatcatcattagactgagaaaattctcaatacctgatcagtgtatagatggtgtggttgtgacagaatcggggatagactcgcgacgaagctctttcacaacagtagctagagcttcagggttaacaccaagatcacaaagagctatgagaactgacaaagtatgccggtccaaacccgtgtccaagatgtttgacatgcgaaacacaagctctagtgactctcttgctgtccgagatgcctcctcatccatactgatcacacctgttaaactccacaattttaaagtcctaaggtagttagtgaattatagagtttctaccaaaccaaattagacaaaagtaagtgaactatgatctaacaagaaccaagtcaaagactcttaggtgattttgacataagaagttagaaactagagtcttataaattacacaacaacatttcaagctagagctttgtagtgaagatacaatgctcacacacacaaaagtgagtcaaatttgtttcagagcccaataatattatctgataggtgaacaaggattagtctaatagatcagttaataccaaaaccaaaacacaacccagaaacattcaattcaaaagaaatgtaattcagatgaaaaatgagattgaaattagggtttttatgtcggcggcaatttgcataacatcgaataaatttcaaattttttatttcgagactaagaattaaggagtaatctgatagaaacgaagataagaaaacttacgtttagaaacggaatttgcaaaaataaagtatgaagcttggtcttggagatagtcgcagactcacagtgtgaagtgagaagtgggagacgaagggaaaggacttggaggtctttcaataaatgtaaattgtgttatgtcaaaagaaaaaaagtttattgtctttcaataatcatattaatattctaaacaaaaatatgtttgaaatataactccgacactaagattgatagtgttaattttttttaatgaattatactaatgaaaagaaaataatataactctgacacaattgtttttcttttttaacatctgaaaaaaacagattttttataattgagataaatcatatagaagatgtttgtttttaatatttttttctcgaacaaatgcttatttcattatataagaaatgagttttcaaaattattaactcacgtgtcaaatttattaataagatattcgcacatgtcaaatcaaatttttttatatttaaaaacataaatagaaattttttctaaccttattgaaaaagaaatatatacataaagtcaaaaataatgtttctatattcaaattttttatttaatatactaaactattgaactaatgaactaattctattaaaattgatatattcaaaacagaagtataagttctttattttgttttgaaaaatattaatatgtgttttaatattttctaataacttaaatatgtttattcttttattttcttaagtttatttttttccctcaattatatcgttcaatttgtttacaacaatatgcatctagaggctccgttgcgtccgtctttttcttgatgttgtatgtcgtcagtcgtctttgtcttatctttgtgttgtactctgagaaataccttattatatgtaatcaataaaagcatgttatatagaatctatagaatgtgtaagattaaaatttgtatttagaaaatacagattactatgtaaaatttaaatctcgtaaaaaattatttaattctcacaactgtctatttagaagggaattatctaatataattccaagttttgaaacattgtaagacaaagttaattatagaatcgatgtttcaagctgttattcattagaattgaagaatgagtaaatattgaacccaaatacaacttctcaaatgtttttactttatatgatatttttttggagtataacatgtagcgtaagctaaaattgtaagaaataaattggaaaaaaaattatctatttaaaaaataataatttaaaactctatttcggtgtaggaggagttacaccggcaattcttgaacattgttcttttagcatcggagggaaaagcggaataagtggaatttttggtatgcagttggcttcagcgtccaaaaatgctttgcaacaagcagaacctaaattactgaatttgccaataaaaatggattgagaaatctctgcaatgcattcaggaatatccatcacggatgaccaacatttcgttatatcaggtaatcctggcattccaggaatcggttgaaacgaaaatggaaaaagaaacggagccggaaactgaggtaactgagcatttacagaaactatgatgcatagaaccactaagagtgaaaacacatttttgataggcataatgagaaactgagaaataaaaaagccttagtatagccaaatatatgcttaatgctctgtttgtttttgattgatgaacaacaataagattcctgcttatttatatggaatgaaatgtaaaactgtgatattaattattttaataacatctttgaatggtttaattaggtatttgattaacagttttataaatcaaaataaagacgaaactccaagtgtaaaagaagcaacattaactaagaaatattgattaaaagagagaaaataaaagtataacgtatgacttcacataattaatcaatcaccagttttatatctcaaaattcaaacaaacaaatcgatgtataatattttcttagagaaaattatttgaattgacctaaaggtttggtttgtaaaatttttatacaatgggttctccatgatttgtattattaaaacttaacttgaacctacaacactaggaatccatgatctctttgctaaatagtccactctgagagttcaaaaagtgatacaaaagaaataccaagcatagaaagaaaggttaaaacctaagatcatatgcacatactctctgagtttttagtggaatccaataataacgatagtttttcaaccactaaaagcaagtgaacacatctattaacttttgatggattgaacgttttagaacatttttttataaaagaggaaggtttgaaggtgccagggtggtacgatgttccccatatcggagaatagtgaatttacaatatctttgcatagttgaaaaacgggctatacccaattaggccaaacccaaaattaattttttttggaaaattgggtcagagtccaaaagcacgtaacacactctagcatggttcacaaagaaacaaaatcagaattgttttcatgaaactgtttgttaggagattttgtctcggatccaatttcttcattttcaatatttcgctatatggatatatcttttctagatatccaattttttgaatgtttcatatcagatcaaattataaactacttatagctagagttgagacttgtacaacatgcatttcggtttgataaaagatggctcgataaaaatattgatcaaaacactcttagaacaagactctcttttattgatttaggaaacttactcaaaacctaaaccttacaaatcactcttgttctcgtaaaactcataagttatgtcacaacttgacatcttcttatatagagaacatctagacaaatccaagtccaattagaaatatatttggataactcccaaacacttctttacataactcctaaagatcctaagtattatctcttttgtaaataataacgtatgactcaagttaaagcttaaaccaacattttcccccttaagtttgaaatcacatttcaacatattttgaattccaataagctctctcatctccttgaacttgatccttccaagtacctttgtcaaaatgtcggccttttgttcatcaccgggaacatgctccacatccacttgctcgttctcaacgcattcacgtcaaatggtatctcttatgtatatgcttgctccctccatgaaataccaggtttttggctaaagccgatccggagtgttacattctcacatgtccttctggtaacttcacctggaagctcttgaagccaaatcgtctgttttgcggctttagtggctgccataaactctgcctcacaacactaccgtctcttgcttctttgtataccaagtgattggacaattaccaacatcgaaaatgtgtccggtagtactcttaccatcatctatatctacattgtgactaatatcactatagcctactaatcctcgattagatcctcgagtaaatgagagaccaagagaaagagtgccccgcaagtatctaataacttgttttagtgcgcctctgtgtaactcctttaatttggttcttgcatgtacttactcaacacaccatcacaaaagcaaaggtccggtcgtgtatgaagtaagtacctaagacatccaatattctttcgatactctttctcatcaatgcctttctccttttctgctattgacaacttcaaacccaagtccattggtgtatgaactgcattataatctttcatctcaccctcttctagaatattttcctcatatccttcttgtttcattataccctcaccgtgttgaaacacctgaatgccaaggtagtatgttagcagaccaaaatcactaatctcaaacttggagattattcctttcttgaactcgataatttgactttgactagactatgtgcaagtagatcatctacatagatagctaaaagaaggagatgctccttatcttgcttccgatacaaggaaggttccttagaacacttgacaaagcttaattcctttagatcttgttcagcttattattccacgccctaggcccttttctgagtccatataatgctttgttcaatctgtagaccttattttcactttcttcggtcacaaaccctctagctgagaagtgaacactagcttctttaactctccatgcaagaacgccgtttttacatcaagatgatttacttccatccgcttgaggctgccaatgcaataataaagtatagtgtcccgatgcgggccactagagtaaaaaacttcatcgaagtctacaccatgcctttgcacataccacttagccacaagtctcgctttatacttgttgatgcttccatacgagtttccttttattttaaacatccattttagtccaattagcttagctcctgcgagaagatcaactatattctatgtattgttctttgttatggaagagatttcttgatttcttctttacaccaagaaccatgtaacaaatggacagaaacaccaaagcatatccagaatgtgcacacatcgactacttttccagcattttgctcatttgtatttactacgtgagtacccacgctacgcgtgggttgttgtttgaaatttgtttaaaaataattatgtttaactatttttattactaatttatgttattttcgtgtatgttattatgtagttaataaagttatattcattttatgtaattatatttgtatagttagattcacttttgatttaaatatcaattattattttttcatgtataaatcttcttatctatatatccaagtttctaaacttttttaactatcatgaaatacttacatcaacaatatgatacaatggtatgcaattatactacttatttggtttgaaagttgcctaacttgattctaagcaaacaatttcttgttccatgtattctctcctaatctagtattccaatcacatcatgataggctcatggctaaatattggattgacataatttaaataacaaatatataaactactcatctactttaaaagttttcccatgaaagagaaaaaagaaagcttaaattaaatagtcttttaagtcaacagttttaggtttttctctttgcctttgcatatatccatattagagaaagcgtcgtatattgaactttttggtatatctaacgtctcaaaagatcactacttaaaaatatgcatgtcattattaatgttaccaatttatcataaacacacaaaaaaaccatatcatgtaaaccaaaaaatgtaataaaaagaaaagagtaagttaaaattactaaactaagaaaggttaagtagcaaacaactaagttgtaatacacaaaaaattatagtcattatcaagtaatgactattataaaaatagcaaaataagaaaagtaaaatgaaagtagtgtttgatacattaacatgattttttgtattttttcttataaataaagatattttgttaagagtgagattaatggatgatttaatgcaatgtgaaacttttcaatttttatcactaagttttgttattttttaatgatattaatttagaatgacatgtgacactcactggtgtgatgatgtgtcactcatatggagagagtttgccaactttcatatatatgattttctattttctttattttgcaccttatatagaaacacatctaaataaatgtatacactgtcaacaataaattatgtagtttatttatttctataaacaaaattatgtattttacatttaataccaaattataagatgaaaaaccaattaaaaattgtttagcgaattttctctttaactttttgtcaatgaattaatgtttttggaatggtttacctttttctgaaatttaatacagttttcaaattgaaataaatgattatctttttgtctaattcaatttttttacagtaaattaatattatatcatttaatttcattggaaaatttagacttagatagattacattgttgtaacaaatgattacttgctataaactataaaaaaaaattaatagctatatcaaattaaggaaaaatgattacattgttataaattataatattaatttagtatatagaattagatgactagccacatatgctacttggtttctttaaaattttgattgtaaattgtttgattatttctatgtaagaatctctctaattttattttcgattactttttgctatgttccagctaaaaaaatgaaaaacaataccaagttccattcctagaaaaggtaaatcacattctttgtcaaaactataatcccatattttagtgtaggcttataatgtatttgtaataagagattttgtttacgattatgttaatacgttatagtttttctagaattacacaaaatataaattttgttaataataatattgtttttaagaaaaaaagtaagtaaaatataagcaaaacaaaaaatgaattacaagtaaaacataggtaaatttcttttgttcttcatccaatctctatgcattttcatatattcttatgttgtactccttatgtttcatattatatgatgttttgaagaaacagttcaagtttctatgcaaaacattatattaaacggcttttgaaccctaattatttttaatagatattaatttgtatttttaatttataaaactcaaaattaattactttcttaaactttatgcttttatctaaaacatttaatattatgaaatgtagggaatattgtttgttagtatgaccatgttcttttcttcgccgctcaatgagtgacatcgacaaaaaaatacatacggaataagtcggtggtattgttaaaatgagtcgttgttagtgttaattgagttgccgcagctgtcgcttgaaattccagtgactcttctctctttctgcaacacctctctctctctccaacgacacctctgtcgtcatcgttttgcctctgctgtcgtcgtttagctttattgatggctgacttaccgtcgtttagatctgtcgctgagacaatcgctggcgactctcttttgaacacggcctatgtttgatcctgctttacaattttttaaataaatattgaatataaaactaaaggagttagttgaacactttaattttagtttttaatgcaatttattattttgatggtgttttaaatgagagaatacttgctcattgtagatttgattttttttgtttagtgaattactgctccatttagtcttagtctatccattaaaatttaaatactttggaccagggtccttaatctgtatgttcatgaaatttagcaaacatatatatagtgataaaacttgtttttttaatagtactatgtaaaaagcttatatcagccagaaaaaatcatatagttattctaaaacgtttttggttgaaattaaaaaaatatgaatgaatcccactaaattgaattaagtctgtctatgtcaaaacaaaacttgaacggtatgtataaccgactccgtacaaaaacgaagaagaaggacgtagaaaatcaataaatttctataatccaaaacagtatggctcagatctatcatctatatcgtccataaccctcttcatgcctagcttatattcatatctccacatactccaaaaaaaaaagtgtatcattgtgacactagtttgatacggaaaaaaatagtaacaaatactcttgttgtgacaaattatgtacatagtttacttcagtttttttctatctaaatttttagagtgaatttatataaaaaaaatttgattttttttttagaacaaaaatttgggagaatgaatttataaaaaaaatattttggtattaaattctctagtataaacattattgatctccatttatttcttatatagtagcccatgagttacaagagaaagtatgcatgatcaaaccacagaatgaaagtattaatactgtaactgagccttctgaattgaagcaattttgcatggatcatagaggaattcacatatttttcatttcatttagctttaagttgactgaaatttacattaattatgaagttttttttttttttggagttccccaatcaagaattatgtttttacagaatttgataatacatacaaaagatacaaagtttcatctggggcaaaaactagaattttgaaatgaacaagtcatctcttggtattaatcttgattaaaaactatagataaaaagcttgaataactaatagtattgcaaaatcactaaaaccaataacaaacttagttagaccagtgagtatatatgatttttagcctcaaaacgtcacaacttttggcatatatgaggaaatgtaaaaaccttatcggatagtagaaattaagtgaatggagaagtatggagagaaggatcatatcatcctctatgagcagtagcagaaaccatgtgcttttctccagtcacataatcgtagctcaatccatgaacccattatatattaaccacacattattttctctctctcactctcatgcatacgtaatggtttgaaaaattaaagtcatatatagactcttgctaagtcccttgttcccccacaattatccttaggaccaagctagctatagcttagctacgtgatcatatactcactagtcactacacatattgcattatccatttaacaaattaaagaacttacccatttccatgcatacggtttatatataggaccgttccggagatatagcaattgttctgcgttttatgatgttactttgagaatgattcaaatttataaatggtaacactttgaaagtcaataattaacctatatttttgaatggcaaaacgatttgcaatttgaaaactaaattagtaaaatggatatgaagcccaagcctctgtggtctggtagcagaggaagctttggtgaagggtgaaactctcagacccaagttcgattctccctgaaaacaaaaacacatttgtttgggaagtttgccaggcagcctgactattccatagcattagtcggaaaacattctaaactcgaatgaggcagtgtggtggcccaattctacatggatttgaagaagtccactctttagcacttcggtgcgttcctaccgaggtcggccgaatcagccgatagggtctataaaaacaaaaagaaaaacaaaatggagatgaagttttttttttctttttgcatcagcttctattttagtttttttttcttataaattaattaattttgtgtctaaaacatatgaaaactaagtgaatgcattctagtcggcacacatctccaagcctgacaaagaaatataaaatataagtatgtacaactatatatagtaggtacccaacttccaaatcaaagtggaaacacaaagatccccacaaaatccgttaatgtccttgactcacacccaacacaaataggtcactatataacaagcttatataggtaactatgccgcacaaggtcattgacatgcacttccacgaaagagaagaagaagaagatactggtgagagtagatcatcctcaagaacaccgagagggcatttcgtcgtttacgtcggtacgaagaagaagttggaaagattcgtgatccccacaacgtttttgaagagcccttcattccaaaagcttctagacaatgcggccgaggaattcggttacgcggaagctcaccgggacaagattgtattgccttgtgatgtctctactttccgaagtcttgtcatgttcctgacttctcatcaggacaagtcacattaactatatgagcccactactacgtcgtctgaatgataaaatggttatatgttatgtatctcatattgtatgaatatggtttaattcttataatgtacttatatgctaactttattcaactacgaactacgagtgtaagatttttatttatcatatgttgaatattagttcaatgtgcttttgattggtaactttaagactacgtaaaacttatagcagttaggtattttatatcaagcataaaaaaaaaagtcaaataagggacgaactttgaatatagtgacacatgttttatcaacattttttaaaaataagacaaggaaggatttttgttttacatttactctagaggtttcgaaatttatgacaaattaaagaagtgcaatttgtgttgatccaacaaatattgccgaaacacatcggcaactgcgtcgaactcaaaaatcacattcgcttttctacctagaacaactcgagtagccacattcgttcacaggaagaactggacaattaaggttcttacattttggttgatgactttcatgccactacttaatagttatgacctccatgagtaattattttggttccgccattgattgtaagtccacagaaaacttcactgagtttatgtttacttctcctcttccatttagttgagatcatcaatttagctatactcatatggattaacttggactaatcaatcggaagccttttttttttaatgtaatgtcaaattatatttaaaagaaaaatatatacggttttacaacttgtgcataagaattttgaaaaaagaaatcaaaagaattttgaaaattttagagaataattaatcgaaattgtgcaacaaaaggtatctagctccgagattgaatccagtggaataacgttataacgcttgtcacctgaaagtcgaatagctgaaatctgatttcgaatttgtttatccatccatcctgtgatacgctgagccggttgtgaggtttcaccatgtttccggccaatcaatcggaaggcttattatgatttatgaggtaaaaatgttcaaaacctgcttttctccatttgctttataaaaattcgaaaatttattttcttaaattccatttactgtacttcttactgttcatgtaaataaaatattatatgaattaatcaataaaatgataaaatcatgtattaacaggcgagtttctaatttaatgctccatgaatatgttaaatcaatctgtttttattttttatttttgtttttgttgattttcttcttattttgtttatattttttattatatatcaaaatataattgatttgactgacgaatatgacaatcacgctagatcatccacattagttagaacccctcatgggtttctttaaaattaaaagaaaaactatatttatgatctaattataacattacaagtgttaagagagatgcttaatgagagatcattgtatcttccccaaaaaaaacctctctcactcttttctcacagtcacaattctttttctttcttcaataatttaatagaggataccacctccaatggaaatgctctaattagaattttcaaaaagtatcaaatatattaattaagattttacatcattcattttaaaaaaaattatagagtagactttagcaaaaaaaaaacatattactcaccaccatatcattattttcttaaaccaaattctggacaaactctatcaattaaaatacagctacaacactaaccaattaaataacttaaaaagaaaaatcaaactaatttataagacgttgaaacattaaacaagtgcgaaattcttttaaaaaattgtaggtgatggagaccaaacagtaaaaacttacacctcaaatttgaatttaaagtgtttgtgtaaaacagtttttagttttacccccaacaaaatcaaatcaatcaacaacaaaactaatgatgctaaaacctataagagcattcacaactgtggaactctcattttaattattaaaatattataaaataatgaaaagaaagtatggaaagagacaatgggagagaatcgtcaaataaaactctctctagagaaactttgagccatatgagagaacctctactttacagatgttaagattttattggtaaaaaccaattattttaattaaataataaaattataataaaaataatattttttattcaatacatacccatttttgaaaacccaccattgtggatgttctaatgggtttaaatccctttaccaccaaaacgacatcgtttacttaatgactttaaacttagcctaaaacgacatcgttttacgtaatgacttgcatctttctaactgagcagaagccgacaaacgacacacgacgtcaccacaattctcaactttggagctgcagacacaattccggcgacgtttacgattctgacaccgccggtaagggttaaaatggattctgattctgattattgtagattcgttatctaaagattcgaactttctgaacatttcatcgcaaatagctcattcatagaattagagatctctacattgctttgtaataagagatcgatcgttatgtgaatcattgataattcttaaagtctcagacttttaatttcctctttaccaattggaacagaacccacttgtagcaaatggaagaagttcaaaaaagagttgcctttatactaattgatggtttgggagatgtatcaataccaagattaggttacaaaacaccattgcaagcagcagaaatacctaaccttgatgcaattgcttcagctggaatcaatggtttaatggatccagttgaagttggattaggttgtggtagtgacactgctcatctttctctaatgggttatgatccaagagtgtattaccgtggacgtggcgcgtttgaatctatgggtgcaggattagctatgtcacctggtgacatagctttcaaggtttttgattttgcttttacttgtgtattattctttgttgtttataggttttgatcaatgtgtcattatgcagtcaaattttgcaactttggatgaggattctggagttgttgttagtagaagagctgatcgacatttcgaagaagaaggacctatactttgtgctgctcttgatggaatgaagcttccatcattccctgagtatgaagttagagtcaggttgttaaatatgtttcctttcgtctttatggtttcggatttcgagtttttgactaaaggaagtttttggttgatagatatgcaacggaacatagatgtggagtggttgtaaaagggccaaaacttagtgggaatatatctggaacagatccattgaaggataatcgtttgcttcttgaagctaaacctttggatgaatcagaagaagctaatcacacagccaaagtcgtgaacgaattatcccgggagatatcgcgcattcttgtttcccacccggttaatgtaaagagagctgcacaaggcaagaatattgctaatcttgttcttttaagaggctgtggtattcgaatcgaggtttgtgttcactgtctcttacgaatgcttttaatgaatctatttgctccatctacttatctgttatgggttttgtatataaaggttcctccttttcacgagaagcatggtttgtggccgtgtatggtagcaccaacgaagattatagccggacttggtatgtcccttggtattgatattcttgaagctctgggagccactggagattaccggacgcttctcacatcgaaagcgattgctatagcgaatgcgctttcagctcctttgaatccctgcccaaatgtctttgaaccagcagaggacgggcataaaccgggaaggtcagatggttacgatttcggcttccttcacattaaggtgaaaacatgtctctgtcttttaacacaacataaaaaatttcattctgattctaaattattcgtgcaggctatagatgatgcaggtcatgacaaggctacattgttcaaagttcgaggcttggaagctgtggataaagcgatacgtcagctcgctaagcttctatggcaagctgaatcttcttcaaattaccagtatttcttgtgtgtgactggtgatcattctactccagttgagtatggagaccacagcttcgagcctgtcccattcacaatgtgccggttaaaggactttgtgagagcggttggaggagaatcagctctattagagacatctttagacccttttccacttccaacggatatagcatccagtgaaaatgtcatcggaaaagaagaagaagactgtgggaggagggaagcttctctggcgattagtggagattcagtctcagagttgaacgagattgcagctgcaagaggatgtcttggccgtttccatggcggtgaaatgatgggagttatcaccaagtttctgaagttggatgtataaatcaaatttcataaaattttgcattttttctttgaaaatttggattttggaagtgtaataaaaaattatcaactctaacaagctcaggaagttgaaaaaaaaatgtctaacaatgtttggaggtgtagttgcatgttaaagtttacactttggctcttaagatatacacatgaaatttcctttttacattagctcgacgagaaattaaagatatcgaaaaagaagaattttttttctctcgtgactcaattgcctacaaatttataaaaaatgatggtcacttagttaatgaagacactatctttactagatctaaacaatctgtaatgaaaattacttcacgttaatgaaagtcaatcatgcatttcattgtccaaacgaatgcttttacatttcaagcacataagtcaagatttatcgaaggttgacagctcccataattggcgtgtcttcatttgatagtgtataaaaccatcatattcctgagaaatcatcattcctttccaggaaccataaatgaaatatatgaacctgtgtttctgtaactatctccatttgagttaaagtctacgaattggcttcattttactctaattggagaacctcacttgggtctttatccacattttcataaaacttctcatttcaggctttccaaatgtattagatatttagatgatccaaaaaaacttgaactatgggagccacataattcaaagcaacttgaaaatgttagttaatttatattgaagctctctcatcattctacaaataaaataaaacattaaataaatgtgatatatatacttattaattatattgtctacctaccagactaacaagcttaccagtccaccactgtgtttggtttatatgtcgagaaaaaacaaaaatctataataaagaaaataaaagtgactggagaccgataaaataagtatcccaagcgaaaagtccaaaacccaaaatcagaccagtaatataacttgaccgtttcttaaccggtaattaccggttaactccgtctcttccgtcgacatttttccttaccagacccgttttgtttttgtcttgtttcggtctcttaacaagtcccgttttgtattcttcttccttacttcttattctatctataaaacaacaacttcactcatcatgactctttttccccattttcttactctcttgccctttcttctctcactctccggcgactgttacgagtttttaacacttccgtcgtcttctcaggtttggttcttctcatttatgttaaaccattatgtatggtaattctagaatgtagatctggttcgttctcatggatcttgattaatatgtttgtttaatccacgtattagcactaattttggattattatttggaactgttatcattagataagttttgaattatttgcttaagtaagtaaagaagataagagaaaataatatttattagtctgaacataatcttatcttaagataaacagaatttatttccaaaaaaataagtttttgttaaactaaacacaatttattaccagcaataaaaagattctgtttaatgttgttatcttaataactgatcttttgtctgttttttagttgttgttgttgtttatgacaagatcttgttctatccattaaaaccaaagaaatggaggaaggtcataaagaaccattggtgctaagagttgaaggatcacattgttctttatcagagatggatgattttgatctaactcgggctttagagaagccgaggcagctaaagatcgaacggaagagatcgtttgacgaaaggtcgatgagcgagttatcgactggctatgtaagacaagatagcattttagaaatggctcattctcctggaagtaggtcaatggtggacactcctctctctgttaggaactctttcgagcctcatccgatggttgctgaggcttgggaagctttgagaaggtcaatggtgttctttcgtggtcaacccgttggtaccattgcagcttatgaccatgcctccgaggaggtcttgaactatgatcaggtaactaaagattctagacgtgacctgagcataatcgatttttgtgtagaatatctcaaaacttgtcttctatttgagtaggtgtttgtacgtgactttgtaccaagtgcattggcgtttctgatgaatggagagcccgatatagtgaaaaacttcttgctcaagacacttcagcttcaaggttgggagaaacgggttgaccggttcaagcttggggaaggcgttatgccagcgagtttcaaggtgcttcatgatccagttcgtaaaaccgacacaattattgcggattttggagaaagcgctataggaagagtagcaccggtggattcaggattctggtggatcatacttctccgtgcttacacgaaatctacgggagatttgactttatctgagacaccagagtgtcagaggggaatgaggcttatactctctctttgcttatccgaaggttttgatactttccctacgcttctttgtgctgacggttgttctatggttgataggagaatggtaagaactaccttttagtgaacgagcaaaaatcttatatgattcatcacactaaaaccaaatcttgatttgtttatttattagggtgtttatggatatccaatagagattcaagctctgtttttcatggcattgagatgcgccttgtcgatgcttaaaccagacgaggaaggtcgagatttcatagaaaggattgtgaagagacttcacgcgctgagtttccatatgcgcagttacttttggcttgactttcaacaactcaacgatatctataggttagtaagcaaccttaaaatgttcttgtatatggataaaatatgatttgacgtgactaagattgtaaaacttttgttaaggtacaagacagaggagtactcacacaccgcggtgaacaagttcaacgtgatgccggactcgataccagactgggttttcgactttatgcctctccgtggaggatattttgtcggcaatgtaagcccggcccgtatggatttcaggtggttttccttaggaaattgtgtctccatcctttcttccttggcaactccggatcagtcaatggctattatggacctcctcgagcaccgttgggaggagctagtaggcgagatgccgctcaagatatgttacccttgcatcgaaagccacgagtggcggattgttaccggttgtgatcctaaaaacacgaggtggagttaccacaacggtggatcttggccaggttagcattctttgttataaaactaaagacatcatgtgaaacgcttggttccttatcactatcttgatatgtgcagtattgctgtggacgctgacggcggcatgcatcaagactggacggcctcaaatagcgagacgtgcgattgatctaattgaatcacggctacaccgagattgctggccggaatactatgatggtaagcaaggaaggtacgttggaaaacaagcaaggaagtaccagacttggtcaatcgcgggttacttggttgcgaaaatgatgcttgaagatccttcacatattggaatgatctctcttgaagaagacaaacagatgaaacctgttatcaagagatctgcttcatggacttgctgaattttgtttcttgttttgtattataatgtcatttgattaagcattcaaaagacctttaatcagcgagagagtagttctgtttgtatttctctttgatccaactatggtttattttcacttgaggcataatataatctcttcctagatcaacaaaaaactttattatttagtttagtaaaatatatttagattaagaaatttttgcattacaattgaaacatcttatatcaaaaatcttgaataaatcttctgatctttaatcagaagttacacttgtgaacttatcggtaagtagatttgtgaccatgatttcaaacacttgttgtggtaagaaaattgatatcttcacgagtaaagaatactcttttagaccacaatgataacggagcccgaaattactatatttgtttttccatctaacgataagaaatcactaagatttttaataagatttcaaatagccatatacttcagccatcctttgtaacacctgtatgaaatgggtcgataaagtatttgaccaagttagttcacaatcaaatctctttcgagttgttaagctttcagttatactcataaacatacttttgattggttgattctaacagcttgttggagatgagatcttgaacccagagtttataccatccgaaaagatgtatgggctttgtcggaattatttatcattaaaagagagtgagaaaacaaaagtgaatagatgttttattgtacaactattggtctttgtttgtttgcaaaaataaaagtgaatttaactctaataatagaatgagtatttttcctgatgatattgatgtcttgggttgagaagatcaaaatttgatggagaaattacatggtaaagatgctcatgctatcctttgggacacctgtatgaaatagttcaataaagtatgtgaccaatttagttcacactcaaatcgctctcgagttattaaataaacatagttttgattggttgattctaacactataagaaaaccaatattttgcaatggaagaaaataatccctcgcaaaacgacattcgcaagggaagtgcaaaacaatcgtttgttttcttgtagtataatagctcatagaagatgagatcttggaccgagactttatacccttggaaaagatgcatgggctttgtgataactacatatcactaagagagtgaaaaagttcaaagttcactaagtaaataaatcgaatcaaaatgttattaagaatgcttaagaacttatgtaatttgttttagcttgtttggttcaaaactttcattgtactttatatctagtacatactatgggcataaatgcaaactaattaataagcatttacaaaagtttatgcaacaagatacgatagtgaaagtgagtgtccgaataagatttggaatcccagtggaggaacaaccaagttgtttattcaattttgttttgttttagtattaaacaatttttttttgataaataatatcatttcaaaatttagtttatatagaatgtgtaaaattatatactttaaattaaaaaaattatactacagaaaaaaactaacatttctaatataatgtcactataaatttgagaaatatattgtgtaattacaattattttcagatttattatactttgcaaattattatcgtaatcggaatttatttaaaaataaaataaaagcgtcccaaccttacttaaatatgatgaccagtcttcaacataatcaaatcaaattctcttgcaatccctctacaaagtgatcaacgtaaccagtcaataatccaggactaactaaaatctccttcaatttggtgtggttactcctcactaacttcccaatgtcactgtctttatccatcacagatttgatagcattgctcaagctctcctttgaaaaccatcctgttttttccctcggcacttctacagagacctcgaattcctcggtcatcaatcttgtgaagagaacttgatcacttaaaaatggaatcaaaaccatttggcaatcactcaccaaagactcccatattgttccgggaccacaatggttcacaaagcaacctattgatggatgagccaatatcaaaggttgttgcacccatcctccccaaacaacaccacgatctttcacccgctcctcgaacccttctggtaacccttcttggaccgttgatgatcctcttggtggctttaccgctaaaagaaatggtaaacctgttagctccatccctaaacagagttcttggaattgatctttctcaagaattacttggctgccaggtgaacaaaacactactgacttcggcgcgaacccgcttagaaaatgattccagcgttcttctagtggtttacttgtgtctggctcagggaacattggaccagtcaagagaaccttcttatggtattgacgcgatataaagtcgcagaacataccttcgacttctttgcaagtcctcaatgcaatgacatcacagctcttaagacctgtagtgatctgatgatacagtctcttgtaaaatatcgataaggttgctaaggcatgaacatcgttttcacggaacatcacctttgatgacggataacccggtgggcgaacacctaatttacctccagggacatgtgtatgagctattgttgtcgcagatacaatgatgtaactcacactcttgatcatatgttctttagccatatctggaatccattgagcaaaatcgaaaaagatcaagtcaggtctcaaagcacgaaccgcagcttcaacctgatcgcgagtgagatccaaggctttggacaagaggttgtccaacgagatggggatatccgaggttgtctcggcaccagcagggaggccattgacaggaggaactgtgagagggtgaaagacaatactgtctgggaacaagttgtgatgttccaactgtttttgtgctttcttaggtagcaagaaagtaactcggtgacctttttcagctagtttgtttgcaagatgtagaaatggaatcatatgaccaaaagcaaaccatggaaacataaaagcatgaaactttggctccatttcgtttctcaaattgtgaaaacacaaaagtaaagaagtaattcaagaacacaaaaagaagtatctgcttttttctctctgtttttcttcgtcactgaaacaaccttatatgaacttggagactggttaggtgaattgagatatttagtgaggagttagtggagaagcacatatgtcccaagaacaaaaagagataattaagaagaagttacaatacaaaaaacaagtcacgagagaagagagccaataattcactacaaaaaagcaagtcacaagagagccaagaagaacacgtgtcaaaagagaagaaaactaagaagaataatacaagaaacatgtgacaagagaagatagcgaagtcttagctaccacaatcaagtcacaaaggagccaagaataattaaatataagttttctttggtttcataagaagcgttacttctttgtctttttatttttccttggtcatttgctttgattctaattcactgaaaagagccaagaacacagctgactccaatgatctcgagagtcttctgcaaatttaaaaataatgttcattgtaaacaaaaagttgagcaagcagtcgttattgatataactaatagcaataaattaaaaaccacatgagccacactatgcgataaacaccaaataacttcaagtcaatgaaattagaagaggtcaatagaatttacataagtaggcaaacaaaagaaataatcgttattgggagaaccggagatctaccgagatcgacagccgagatgattatctaaaaatatagatatcatgaaaatcgagaagggtctaaaagatcaacatattttactttaaaaaatatttatatttatatttaaaagtattatttacattaaagtttactttaatttagaaaactaggtttagtctttatttatctatatatatatatatatatatatatatatatatatatatatcgatttatcttgtaatattaattctatgagattttattataatttttcctaaacatttttgtgttctttactcttatcaatcgtctctagtaaaacttcctcccttgcgatcatattcattcatatggacaagctcatagaaataaatagtcaagaattgatctcaatccattgatttccttatatataaagctacaagctccttttcattcaaaaaggaagaagctacaagctcctaatttgttcctcaataaattttgtagtacacttccacatcatctttttgacatccaaacacctagtgttcatatattccttgttctccatttttttcccacagtatcttcaaaaaccgtgcatatttctttgcaacatcctcctttcataagctgatacgatcttagataatttagacaatcatacttgcaaagtcttctctcatggccttaagaaaatcacaataaaattttgttgcaaggctactaagtgctggatatggaaatgaacccacaaatgaagcaaaatatgtcaacaaagatgatggtggtcgttgattttaaattcataatgcaataaataagacatcatttgcaggtatatttcaaaccacaaatgcagagaacaatttatcaaaacctacctttgccagcattagagagaaagagcgatcataactccataaaatgagataattgatgagattcgtgtatacatgttagcacaactgtaaggaacatgaaagtaatattttagctcatatactattggcggaaaagaatatatttatctatataaaattatggttaggaatgttatatagagttttccgtagattccggccctatttatttaaaactcgtccctaaatgagctttaactctttttcagcccttaaaattatggttaggaatgttatattcgagacctttctatcccttttcacaatttttttaatacttaaagaaagttttttcaacaaaacatttatgagttaatatcactatgatttaaatattatatataaatactagaacatcatagacttataaatcaattttttttccataaatagcgtattacaaataaaaagaaaaaagagtttcatatcgtacaactcctgaactacttgccatctttatagcatcacaatcttcttcatcaaaaagtttttcaagtgtctcctacaatttaatggtataagttagttcaagagaagaagtcacagcagacgctcccactcccgcatcgctcttttgcagcccttcgtcctgacctcgatcgtgtgacaatcttcacagatgccgcttggaagcatgagactaaagatgtgggctttggatgggtaatccgaaattgcccggaactgacagctctccactaccaatcagcagcccggaatgtcagattgcctctcatggcggaagctatagcgttgttcctcgctctccaatacgcccaatcgatcggtatcaccaaactctcaatggcctcagattcacaacaattaatcacagccatcacctctgagtctccttcaaccgagttctatgggatcatctttgacatcctcaatttatccctaggatttgcagatgttagcttttcctttgttccacgaagtgagaatcgtgtagcagatgaactagcaaaatcaagtcttatctctttttctattgtacccggatcaaccggtttaaacctttgattaatgaaattctccctttgcacaaaaaaaaaaaagagaagaagtcacattagttaattacttaatattgcaattttactttcaagcctacaattctgcatatccacatagccaattgcgagtgcaaagtaatgcttgcacagtttggggaagaaggcgattcctaaaaggatttaacatccgacctccaacgctgaaagccgactctgatgctactgtggtgattgggattctcacactaataaacaaatcaatggattaaaatctgctaaacaaaataagaagaggaaatacattctctcaaattgcaaatgtatagtaatatcaccgaggtacatgttattcaaaaaaataactaaatattatgtgttcataagaaggacgagatgaaagtaacttggtcctaactaggcattcatggatcaaatgtttactttctgagatgcttggaccaggttcttgtttccaggaaacgacttgcatgagacgtccacaagtgctttgaattagaagaggtcgatatatgtgggatgttgtgctttgaattagaagaggtccacatggctcctaactgtagaagatggaaaagcacccacaggtgaagctaaataagtcaacaaagacgatggtcagattgtggtcgttgatcctaaatttacaatgcaataaattagacattattttcaggttatatttcaaaccataaatacggaaaacaatttgtcaaaatttacatatgcaaggattatagagcgagcaatcctaactccacaaattgaaactatttacgagattaatgtaaacatgttagcataactacaagagacatcaaaggtatgtcttagatcagaaagggatatatttatatttttaaagttatggttaatacctatggattctcattataaattctcttagcgcaaacctcgggaggtggttccatatgacagatcctcactctaaaactagtcagacgtgttggctcttgtaaccggtggaaccatcgcactctttgaaatgataagcaccaatgataaagaacgaactaagctatgactttcaaaatggaaaacagagtaaataagttgaaaataaggaagacaataaattaaaagcttaaggttttgatgttgtgattgatgaggttgccctaaagggaatcaacctttaaatacaacccacacattaaaatgaaacgcaaagtttaagaggaaataaagcagagtgagaatagaagcaaagcctctatttctaaaagagtctttgagcttcttcagccacttttcttcatcagcttccccaagtatatctcgaacgctcttgcctttcttcctcctgagcgcattctacttctcacatcagctagaggcactctcaacctatcagtgtgcaataaggacgttgaccagaaggacgaaaggctgcatatgcagtattctcaagaggtcctgagtaatatccaacatttggattctcattatttccactataataaccaatgtcattatgttcagtatgactagagctttgaaaagctacattatccatcttagcaacaggcttaatagacttctgtcgctcatcttgtgcaaccatattaaagacatcttcaatagtcggaataggtttcaacatcaaaatgtgtctttgagtagcttcataggcttcatttaatcccatcaaaaactttgtaacacggcttcgctgttgcattttctcccataaggcagatgcattacactcacaacgaccgcaagtacacaaaggcaattcaatataatttttgtattcctcccaaagagtaactaactctgtataatatgtacttacatccatagatccttgctgcaatgatcctaaacgttgttcaatctcaaaaactctaggagcatcatcttgcttgaatcttgataatagatttttccaaattgattcagctgtggacataaacagaagactctggccaattttctttgaaactgagttcataagccaagtcgcaaccatgtcattgcacctagaccaagatcctgcatctctatgagtactaggaggttgaggaatagtaccgtcaataaatccaagcttatttctgacattaagcgccattcgaacagatcgacgccaagaatgaaactctgaacctgaagaaggacgatcagagactagaatcaaccctgcttgatccgatgaatgaagaaaataaggattctcatacagatccgtagaaaaacgattaacatccatagtcgctgtgtgatttggtggaatcgatcccatttctgatgttgaaattgtaatcgacgataagaacttgttctggatacgaatttgtagaaccagaaacaactaggtcaaagaaaaagaaaggttcaagagaagatagtacgaaaatggaagaagatcattcacagcgattttgagtaaggaaacagtgaaaagagaatcgttgaggcttcggaagctccattagagaagacttttgagctcaaccgatgaagaaatcaacaaaaacgaagaaaattcgaagaaattgaaaaatgagaacgatggcggaaaagtttgttattatggctctgataccatattaggagagagactaattaactttcttattctcattaattgtaagtaatctgtacactgttccttatatagtacttacaagtattaactaactttgcaatgatgaagtatatacatgatgattatgatgatatatctaatattacgcatctacgtagatagctgatatgctaagaaaaataagtaatcttctgactaatctaattttattgtgattcggagaaggaaagaaaaaaacttgctgccaacaacatgtgtaaccctgccctctcaggggctccacgcatcgcttaatgcgtcatggaatacctttatatcaagatcaattattaaaaatagttactaatgtcagtgcatgtattgtatatcaagtatgtgttgttgaaaacggttcattcaaatttaaaactgaaacaaaggaaaaaataaatctttgtctcagagtttctttcctaaacaatatctacaaacatagaccacatgttgagtgtcattaggattcagattctcagaagtcatgtgagttatttaacttagtttccactttagatttgacaaatgttcaaccatgtgaatcccacataaaataatactttcttactataaaatctaacattttcaacaacaaaaataaaatctatcattttgtatatttgcttaagttaatttctgtaaaatctatcttttgttggtaaattaatatttcataatatcacaaaatcaatgccaatatttggtatttgttttccgaaaataattagacatttattccaccaatgtttgatcccacatatatcgagcatctataccacaacatcccttctgagtgctggcttgttgcagagaatgtgagttgcttggtctctaaggctgactaattggtaaatagaaagtggaaaatgtagcgtatttgcggaagcaacggctttatgtatttctgaagcatcttgaagcatctttatcatggatgtagcgtaaacctaaccgctagctgaatcacacccattttcttaaccctgtatggttttaaaaccactaaaggataagaatgtgtgtaagtctttgaggttataaaggtcgataaatgtatcatgatctgccccgtccttgaatctttactctcccaagaaaattcaaattaccgaaaacactagttgttatcatagtctaaggatcatatacttcccaaaaatactacttgctgtattttggattgaaagtttccatgcggtcgtcctcgttacaattctttcttttatctttttttctattcgtgttatatctaatgtatcactttgatttgtaataacattaagacaaaaggagttttcacaccttgtaagttacaacttgtggagaagctctagtctctaccgttaacgtcttctaaacaaaactagtaaatgaagaagtttatgaagtcagtaacataaaactattaataaataaacaatttatcaattaaataccttcaccgattgtcctatataacatctcttgtttttttttgtttcatgtcaccagtcttacatccaaaaccaaaaataaatatgacaaagtctcttctcatggtcatgcttgtatccattgtaatgttttacatggcttgtccaattttctcctaggaaatacatgaagacgtagccatatctccaactccattcgaagaagctaattcccccgcaatggaatatgacaagaagcttccccattactcgcaaaaagtgttcgattttcttgagacttgcgctgaaaagccgagctccatatgcggaggtgagattttccagaatgtgttggatgcaacaaccctagtgacagataaatgttgtcgtgatatattgaagattggcaaagattgtcatcttggattgattaaaatcttcttctcatcgtatgaatataaaaatattgcatctattccaagaagcaaacagacatggaacgattgtttccgtagagttgggagcaagattggtgttccggtctctattgaataataaactaatattccatcgttctgatgtaactgtgcgtttttgtaatttaaaagttacccttataaaacagctatcatattatttttaataataaactaaagccatacaatattttatgtttttattcatcattcgaattagttcaacattaacttcttaatttaaatagagagacctttgtttcgacgtaacaaccatgtctaaacctccataattcagaactcatagttctttacggaataaacatgaacgaactttctctaaccaataacaaattcttgtagagcaaaaatttcaattaaacaaaacattgaaacgtatgttctttctttggtttcaaaaatttcatcttcctcttaattaaccacatggataaaaaaattatccatctccacaatagtaaatccagatttagataagatgttatatatgtttataaaggaatttttgttggatgttttacagtatttttatgaagtttttttcagaaaaaaatatctagttaagatttgaccctggttaaaaatctttctgggtctgccactggagcagagtgaaccctggagtgacctgtcttggttatcttgcaccgaaattagacagtttgttggtcaagtgcagtagattctctatagctctgcaattttagttctttgtcaattatggttataaggttaatatccaacaatcaacttatgaactcgttcatgcactattttctctaagttcttcatttaagtatccttatttcttttgaaattttaatgagttttatgcgtgtgattgtatatctattattggtctttccttcaatgcattagttgtatacacagtatgatgcaacgtaaaactaggatgttggagcgtcaattttagttgtttgttatttgtatttttttctttattttgatcgtcattttatcagtattttttttatatttaacatccagtattttaataatgtttaagattttcgagggctttccaagctttaattttagggtgattttgtgcatagacaaaattggggttaagtatttaggtaatagacagtagggggttttcttttcaacgagaggtaaataaagttattctaatgttattcggattctgaaaacatctggtttctcgaatgttattcggattctgattataatgatattatgatatgaagaaccgaagatagaccgagatcgacggttgagatgaaaagatcgagatatggcaagaagatattattttagaagataaatgttaatattggagtttaagaaatttaacattatctctaaatatattatttacatttatgtttatcataatctctatataagagaatataaattgtaatattattcttatgagagtttattataatttttcttctaaacacttttgtattctttattctcatcaaacttaccgacagggatgacgacgactatgcgacaattatgttgactatagtctatattggactcttcttaacaatgcagtggcaggttttattttctgttcttgtcaagttcaatggcgtgtggcgctgtgaaatgataattggctcttgttacatattgatattatggtgatccgttggatttagataaaaaaaaagttaatgggcttggttaaggaatgttctctaaaggcccttgaggaactcacgaaggccagcaaagttttgttaacgatcgagggtttgtttcttgaggttacaaacttaccgcacaaattgttaacaaattatagtataatttgttttgttttttaaaacaaattgtaattcaatgcaatggtacatatatgttgtaatatatttagtaactttcagagtggaatttagacaagttgttattatttgttttgtgattattttctttattctaatacttatgttatcagtatttgaattatatttaagcttttctagggctttgcaagcttttgtgtagagtcgaagctattttcatattatgaatactcgaatatatatctaccctgatttttctttaattccagggacagttgattttatcatttttaccaacatttttctactctttcgaactttagtgggattctgtttgtattttaaaaatgctagtaaaagtataaaccaagttgatatttttagctaaagttgcaaaagattctttcctattggtcaagactcaagaatatatatcaaatagattctttctttatatatatactgtttgtttccactataatcatgttgttgaacatcgtccgtttatgtcccaaattgtttcgtcgaaaacatgaatggtttgttgggggtgcgaaaacacatttacggccatgattgttcctctctctctccaagtgtggcatgtactcgcaatcggtgacccaatcaaaatgattctgatattagagcaagctagaaagcccattagcataatccatgactagtccaaaagcctatgtaattaggattcttagcaagtgagaactcatatatatatatatatatataccgaggcgtattttgtcatcttaaatcatacatgttaattttaacatcgatctagattagcatttctataaaagtaaacgatgaaatgtgtatactacattatttaaattttaaaccgagtgtccacttagatctagcaaaatatgagggagagagagagagagagagagagagtgagtgagagaaagctggcccctaagatcttggaatccttttgacatgcatgttgtgattaatgatgttatctaatcattgagacagtcaagttgcaaatggcgtggcccatctcctgcttcgtcaatgagtaaacctagcagcaagacaaatctattaagattttgttcccacaatagatgtttatatatctcgtgatttcatctcacgtatatacaaatatcagctggatgttctccttcatcagtccattgatgaagttactgtagttcacctgtttcaagttttagatgttaggattccaatcaaacatgcaatttcaatgttcttcacaagaaaaataagtgtagaaacacgaagtaattcacttgtttaagcatatttgagcttcaaggtaaacataacgtatggaatcaatgcaattagggggaaaatctaatcaaacgtacaccgtgttgaagagaaccggcattgatgagctcgatccaaagaccccttatctcacgtttcttgttgcacctttctctgtaagagtattgtagagctttatcaacattttccctcgcgattcttatgcaattcttagctcttcccctgaaacccttggctagcttgaagatctccttcttgttcatctcttgaaattcattaacaagcaaatgcctaaaactttactacactatatcacgaagatggctaaaattaagattaaaagtcttcttattacacactcacttgaatgtttcaaaacagaagatgcccaaaaaacaaagtcttcctattacacacattcacttgaatctcttgcaaactcgtaatgcccaacacttcactttgttgatttattttcatgtttacttgcttggttgtttctatgaagaaatctaaactaatctcttaattttgtcatagcttatttctattctaattgatttggaacacattctctctctttttgtgtaatcaatccttaaatacacataagcttagtggtgcattcgataccatgtatttataaaataaaacttatgaggtaaaaaagcacacacatcattattccacaagactctcaagctgatgcggtcttagcatcatctagacagtcatacttgtaagactcttgcaaagtcttctctcatggatttaaaataatcccagaaaattttgatgcatggctcctaactgtagaagatggaaaagcatccacaggtgaagctaaataggtcaacaaagacgattgtcagattgtggtcgttgatcctaaatttataatgcaatagattagacattattttcaggttatatttcaaaccataaatacagaaaacaatttgcaaaaattacatatgcaaggattatagagcgagcaatcctaactccacaaattgaaactatttacgggattaatgtaaacatgttagcataactacaagagacatcaaaggaatatcttaggtcagaaagggatatatttatatctttaaagttatggttaatacctatggattctcattataaattctcttagcgcaaaccttgggaggtggttccatatgacagatcatcaaacctttggagcttattgtttttgaatttcaaggactaggaaggtcgtttgagttaacaatgcaccgtttaacgagatccgtaaataacaacttttctagaaaaactatattaatggagacaaaaaaaaattaggaatttgatagtggattagcataggtggttaagttatgaacttacgatggtatctatttggtggagcctcatggttaaagagatttgttcaacttgaatcatctttgtaaatatatatatttgtttttggatctgtctcgctttttatgtcttacgtattcaatcaaattaattacgcatttattcaccaatggatgattgaaatcatcatttcttttattacgtattgtattcaccaatggatgattgtaatcaccaattcattgttttattacgcatagaaattatcgaagcaaaataaaatttctaagacgcatacacacatttaccaaaactaggatcggtagcagcaaatgtgccggtatttttgaaactacatgcctgattggtacgaccatgggtctgataataagagttcatcacaaacgatgcatgatttgcaagattattagggataaaacaagatccaccaggtcggattggcctacaatcaactccttgactacatgcaaaattaatatttgcttgcagctgcgcattcgttgcgattagagttgctatacaccatgttttggaactcgccacatggatatggttgatcatgatggaagataacatgatgaataagagagccaaaggtgatgatattttggccatttttaaaactgacaattgaattgtattcaactaatttagtttttggatatctatgtaggtatatgtatgtgtgcgtctatgtatatatataaaattttgacgatatatttctacttttgtagatatattattcatagctattcatttttgtcgaagatctgaataaaaaaaatatctcgtgatagtagaagtaagagatttgaaatatctagaaatatatctttataattagaattgatgtctataaaaactttttaactagatggtagaaaatcaaaaagattaaaatattttggaaaataaatatatgctttataattagaaatatgttgtaaacagtaaattttctttttaatttgaaattatatgtcagtaaaaatagaaatatatttttataatcagaaatgatatgtctataatgtattagtagaaaaacataatttaatcatattagatacttcttttcaaaaatactcggggtttagaacttagactatagactattcgaaaaatttgagtaactgattagtaactgaattgttagaagaattgagtaactgcttagtttagaacttagactatagactattcgaaccgtgagtctttaggtcatttttgttccacctaagattaagttaaagaatttgtttagtaagtgatcgataatcttagagtcatggaatgaaggttttaatgaatctcttgcaaactcgtgatgcccaacacttcactttgttgaattcttttcatatttacttgcttgcttgtttctatgacgaaatataaactaatctcttatttttgtcatagcttatatcttttctaattgatttggaacacattctctctctttttgtgtaatcaatccttaaatacacatacgattagtggtgcactcgatacttttcatgtattttataaagtaaaacttatgaggtaaaaaagcacacacatcattattccacaagactctcacgctgatgcgtgtggtcttagcatcaagtagacagccatacttgtaagcctgttgcaaagtcttctcccatggatttaaaaaatccaagaaaatttagctgcatggctcctaaatgtagaagatggaaaaatacccaaaggtgaagctaaataggtcaacaaagacgatggtcagattatagtcgttgatcctatatttataatgcaataaattaaatattattttcaggttatatttcaaaccataaatatggaaaccaatttttcaaaaattacatatgcaaggattatagagagagcaatcctaactccacaaattgaaactatttacgggattaatgtaaacatgttagcataactacaagggacatcaaaggaatatcttaggtcagatttaacaacagaaagggatatatttatatctttaaagttatggttaatacctatggattctcattataaattctcttagcgcaaacctcgggaggtggttccatatgacagatcatcaaacctttggagcttattgtttttaaatttcaaggactaggaaggtcgtttgagttaacaatgcaccgtctaacgagatccgtaaataacaacttttctagaaaaactatattaatggagacaaaaaaaaataataggaatttgatagtggattagcatcggtggttaagttatgaacttatgatggtatctatttggtggagcctcatggttaaagagatttgttcaacttgagtcatctttgtaaatatatatatttttggatctgtctcgctttttatgtcttacgtattcaatcaaattaattacgcatttattcaccaatggatgattgaaatcaccatttcttttattacgtattgtattcaccaatggatgattgtaatcaccaattcattcttttattacgcatagaaattatcgaaacaaaataaaagttctaagacgcatacacacatttaccaaaactaggattggtagcagcaaatgtgccggtatttttgaaactacatatctgattggtacgaccatgggtctgataataagagttcatcacaaacgatgcatgatttgcaagattattagggataaaacaagatccatcaggtcggattggcctacaatcaactccttgactacatgcaaaattaatatttgcttgcagctgcgcattcgttgcgattagagttgctatacaccatgttttggaactcgccacatggatatggttgatcatgatggaagataacatgatgaataagagagccaaaggtgatgatattttggccatttttaaaactgacaattgaattgtattcaactaatttagtttttggatatctatgtaggtatatgtatgtgtgcgtctatgtatatatataaaattttgacgatatatttctacttttgtagctattattcatagctattcattttggtcgaagatctgaataaaaaaaatatctcgtgatagtagaagtaagagatttgaaatatctagaaatatatctttataattagaattgatgtctataaaaactttttaactagatggtagaaaatcaaaaagtttaaaatattttggaaaataaatatatgctttataattagaaatatgttgtaaacagtaaattttctttttaatttgaaattatatgtcagtaaaaatagaaatatatttttataatcagaaatgatatgtctataatgtattagtagaaaaacataatttaatcatattagatacttcttttcaaaagtactcggggtttagaacttagactatagactattagaaaaatttgagtaactgattagtaacataattgttagaagaattgagtaactgcttagtttagaacttagactatagactattcgaaccgtgagtctttaggtcatttttgttccacctaagattaagttaaagaatttgtttagtaagtgatcgataatcttagagtcatggaatgaaggttttaatgaatctcttgcaaactcgtgatgcccaacacttcactttgttgaattcttttcatatttacttgcttgcttgtttctatgacgaaatataaactaatctcttatttttgtcatagcttatatcttttctaattgatttggaacacattctctctctttttgtgtaatcaatccttaaatacacatacgattagtggtgcactcgatacttttcatgtattttataaagtaaaacttatgaggtaaaaaagcacacacatcattattccacaagactctcacgctgatgcgtgtggtcttagcatcaagtagacaaccatacttgtaaacctcttgcaaagtcttctctcatggatttaaaaaatcccagaaaatttagctgcatggctcctaactgtagaagatggaaaaatacccaaaggtgaagctaaataggtcaacaaagaagatggtcagattatggtcgttgatcctatatttataatgcaataaattagacattattttcaggttatatttcaaaccataaatacggaaaccaatttttcaaaaattacatatgcaaggattatagagagagcaatcctaactccacaaattgaaactatttacgggattaatgtaaacatgttagcataactacaagggacatcaaaggaatatcttaggtcagatttaacagcagaaagggatatatttatatctttaaagttatggttaatacctatggattctcattataaattctcttagcgcaaacctcgggaggtggttccatatgacagatcatcaaacctttggagcttattgtttttgaatttcaaggactaggaaggtcctttgagttaacaatgcaccgtctaacgagatccgtaaataacaacttttctagaaaaactatattaatggagacaaaaaaaaaaaaaaggaatttgatagtggattagcataggtggttaagttatgaacttatgatggtatctatttggtggagcctcatggttaaagagatttgttcaacttgagtcatctttgtaaatatatatatatttgtttttggatctggctcgctttttatgtcttacgtattcaatcaaattaattacgcatttattcaccaatggatgattgaaatccccatttcttttattacgtattgtattcaccaatggatgattgtaatcaccaattcattcttttattacgcatagaaattatcgaaacaaaataaaatttctaagacgcatacacacatttaccaaaactaggatcggtagcagcaaatgtgccggtatttttgaaactacatgccttattggtacgaccatgggtctgataataagagttcatcacaaacgatgcatgatttgcaagattattagggataaaacaagatccaccaggtcggattggcctacaatcaactccttgactacatgcaaaattaatatttgcttgcagctgcgcattcgttgcgattagagttgctatacaccatgttttggaactcgccacatggatatgattgatcatgatggaagataacatgatgaataagagagccaaaggtgatgatattttggccatttttaaaactgacaattgaattgtattcaactaatttagtttttggatatctatgtaggtatatgtatgtgtgcgtctatgtatatatataaaattttgacgatatatttctacttttgtagatatattattccaagttattcattttggtcgaagatttgaataaaaaaaaatatctcgtgatagtagaagtaagagatttgaaatatctagaaatatatctttataattagaattgatgtctataaaaactttttaactagatggtagaaaatcaaaaagtttaaaatattttggaaaataaatatatgctttataattagaaatattttgtaaatactaatttatctttttaatttgaaattatatgtcggtaaaaatagaaatatatttttataatcagaaatgatatgtctataatgtattagtagaaaaacataatttaatcatattagatacttcttttcaaaaatactcggggtttagaacttagactatagactattcgaaacatttgagtaactgattagtaactgaattgttagaagaattgagtaactgcttagtttagaacttagaccatagactattcgaaccgtgagtctttaggtcatttttgttccacctaagattaagttaaagaatttgtttagtaagtgatcgataatcttagagtcatggaatgaaggttttaatgaatctcttgcaaactcgtgatgcccaacacttcactttgttgaatgtttttcatatttacttgcttgcttgtttctatgacgaaatataaactaatctcttatttttgtcatagcttatatcttttctaattgatttggaacacattctctctctttttgtgtaatcactccttaaatacacataagattagtggtgcactcgatacttttcatgtattttataaagtaaaacttatgaggtaaaaaagcacacacatcattattccacaagactctcacgatgatgcgtgtggtcttagcatcaagtagacagccatacttgtaagcctgttgcaaagtcttctcccatggatttaaaaaatccaagaaaatttagctgcatggctcctaactgtaaaagatggaaaaatacccaaaggtgaagctaaataggtcaacaaagacgatggtcagattatggtcgttgatcctatatttataatgcaataaattagatattattttcaggttatatttcaaaccataaatatggaaaccaatttttcaaaaattacatatgcaaagattatagagagagcaatcctaactccacaaattgaaactatttacgggattaatgtaaacatgttagcataactacaagggacatcaaaggaatatcttaggtcagatttaacagcagaaagggatatatttatatctttaaagttatggttaatacctatgaattctcattataaattctcttagcgcaaacctcgggaggtggttccatatgacagatcatcaaacctttggagcttattgtttttgaatttcaaggactagaaaggtcatttgagttaacaatgcaccgtctaacgagatccgtaaataacaacttttctagaaaaactatattaatggagacaaaaaaaaataataggaatttgatagtggattagcataggtggttaagttatgaacttatgatggtatctatttggtggagcctcatggttaaagagattagttcaacttgagtcatctttgtaaatatatatatttgtttttggatctgtctcgctttttatgtcttacgtattcaatcaaattaattacgcatttattcaccaatggatgattgaaatcaccatttcttttattacgtattgtattcaccaatggatgattgtaatcaccaattcattgttttattacgcatagaaattatcgaagcaaaataaaatttctaagacgcatacacacatttaccaaaactaggatcggtagcagcaaatgtgccggtatttttgaaactacatgcctgattggtacgaccatgggtctgataataagagttcatcacaaacgatgcatgatttgcaagattattagggataaaacaagatccaccaggtcggattggcctacaatcaactccttgactacatgcaaaattaatatttgcttgcagctgcgcattcgttgcgattagagttgctatacaccatgttttggaactcgccacatggatatggttgatcatgatggaagataacatgatgaataagagagccaaaggtgatgatattttggccatttttaaaactgacaattgaattgtattcaactaatttagtttttggatatctatgtaggtatatgtatgtgtgcgtctatgtatatatatataaaattttgatgatatatttctacttttgtagatatattattccaagttattcattttggtcgaagatttgaataaaaaaaatatctcgtgatagtagaagtaagagatttgaaatatctagaaatatatctttataattagaattgatgtctataaaaactttttaactagatggtagaaaatcaaaaagtttaaaatattttggaaaataaatatatgctttgtaattagaaatattttgtaaatactaatttatctttttaatttgaaattatatgtcggtaaaaatagaaatatatttttataatcagaaatgatatgtctataatgtattagtagaaaaacataatttaatcatattagatacttcttttcaaaaatactcggggtttagaacttagactatagactattcgaaaaatttgagtaactgataagtaactgaattgttagaagaattgagtaactgcttagtttagaacttagactatagactattcgaaccgtgagtctttaggtcatttttgttccacctaagattaagttaaagaatttgtttagtaagtgattgataatcttagagtcatggaatgaaggttttaatgaatctcttgcaaactcgtgatgcccaacacttcactttgttgaatgtttttcatatttacttgcttgcttgtttctatgacgaaatataaactaatctcttatttttgtcatagcttatatcttttctaattgatttggaacacattctctctctttttgtgtaatcactccttaaatacacataagattagtggtgcactcgatacttttcatgtattttataaagtaaaacttatgaggtaaaaaagcacacacatcattattccacaagactctcacgatgatgcgtgtggtcttagcatcaagtagacagccatacttgtaagcctgttgcaaagtcttctcccatggatttaaaaaatccaagaaaatttagctgcatggctcctaactgtagaagatggaaaaatacccaaaggtgaagctaaataggtcaacaaagacgatggtcagattatggtcgttgatcctatatttataatgcaataaattagatattattttcaggttatatttcaaaccataaatatggaaaccaatttttcaaaaattacatatgtaaggattatagagagagcaatcctaactccacaaattgaaactatttacgggattaatgtaaacatgttagcataactacaagggacatcaaaggaatatcttaggtcagatttaacagcagaaagggatatatttatatctttaaagttatggttaatacctatggattctcattataaattctcttagcgcaaacctcgggaggtggttccatatgacagatcatcaaacctttggagcttattgtttttgaatttcaaggactagataggtcctttgagttaacaatgcaccgtctaacgagatccgtaaataacaacttttctagaaaaactatattaatggagacaaaaaaaaaaaataggaatttgatagtggattagcataggtggttaagttatgaacttatgatggtatctatttggtggagcctcatggttaaagagatttgttcaacttgagtcatctttgtaaatatatatatttttggatctgtctcgctttttatgtcttacgtattcaatcaaattaattacgcatttattcaccaatggatgattgaaatcaccatttcttttattatgtattgtattcaccaatggatgattgtaatcaccaattcattcttttattacgcttaaaaattatcaaaacaaaataaaatttctaagacgcatacacacatttaccaaaactaggatcggtagcagcaaatgttccggtatttttgaaactacatgcctgattggtacgaccatgagtctgataataagagttcatcacaaacgatgcatgatttgcaagattattagggataaaacaagatccaccaggttggattggcctacaatcaactccttgactacatgcaaaattaatatttgcttgcagctgcgcattcgttgcgattagagttgctatacaccatgttttggaactcgccacatggttgatcatgatggaagataacatgatgaataagagagccaaaggtgatgatattttggccatttttaaaactgacaattgaattgatattcaactaatttagtgtttggatatctatgtaagtttatgtatatgtatgtctatgtatatatatccaatttttacgatatgtttctatttttgtagatatattattcctaagtattcattatggtcgaagatctgaataaaattgaattgttatgtctattaaaaaaattatctcgtgatagtagaagtaagagatttgaaatatctagaaatatatctttataattagaattgatgtctataaaaactttttaactagatggtagaaaatcaaaaagtttaaaatattaggaaaataaacatatgctttataattagaaatattttgtaaatactaatttatctttttaatttgaaattatatgtcggtaaaaatagaaatatatttttataatcagaaatgatatgtctataatgtattagtagaaaaaacattatttaatcatattaggacaagttaaataaatctttaaaattggaaatgacatatttgtaaaacattttagtaactagatagtagaaactttaagatttaaaaatatttaagaaatagaaatatatatttgtatatccattatctattaatgagtaagtgttagaaaagccctcactctcaaaaataccccacttttggccatttttatttttgctctctttcaattgttaattaatattttacccctatttgaaaaatattgaaatcaaaaatgaaaaagtgtatttttttatcaaaaatgttccgcaaagtttttcctttttgcaagagaagtgatcttgtattttttgacgggacacttgattctgaaaagttttgcgggaaatagatttacaagaggggtttaaaggattttaaaaaagtttacaagtgttttaaagggatttataaagtttttaaggaggatttcatgatcgattagttaaagtgacgactttaggatatctttttaaaagaatttactgttctatactgtattttatttcatgtgtgtagtttgtcatacactatttgctgatttctcaagaagtagggctcgtcaaaagcttaaaaaaaacctttatttctccaaccctagatttagacagactcgacccaataatctacaaaagtggagtaatgatgtatctttcaatctaaccgtacctaatcgatcgatgcctgcaattgttgagtaacagattaggttagttcttagactatagactattgaaattgtaagtctttggttcaattttgttccgtggaataagaattatgtttagtaaatgatctataattttagagtcctggaatgaagattttaatgaatctcttgcaaattcatgtaaatatatagtcctatatacttcaatagtttatcaaatatggttagttttgcaaatgatcctaaaattaattagacttagctattgatagtttacaaaattatgaagactatagtctatgtttatgtagaagatgtaaaaaggtatatcaattcatataaaataataacttaaactcgttagagaattttcttaattttattaatattaaaaatgagagtgataacttcttttttaatttccaggaaaagaggaagtcatgtttggctggatctcacctaaatctcacattcccattccttcttcctcctcttacgcacatgattctctcttttgttttacatttatattattgtttctttaattgtttagatatatttatgcgtatgaatatgataatatctctacgaaaccaattcttgttttctttttttttcttgttctgacgtcgaccaaagatttgtctaaagacaaaacattttgctttgccttaagatcatattgataaatgtttttatcgagacttggctatgtcaaatttgtttcggataatctataaggttatagtattgatatataaaatatttatcttattaaagattaggtaaagtcaattattttttggtacacaatatggttttaatgatagattctgccacctacctgcctaaaacatgtcacatgtctcctcccttatcttattctcttattctatatttctttatttagtaatcaatttgtatctcttccaatcagctgcttcttcacattccttttcaatgtttacgtctatagtagttcttttaattaatttcgttggcaccaaattacgctacaactataagtattaatagaagttctcaattctagttttttcctaaacaataaaaagttctacaaactagaagtttgtttgttgagatgaggaccatgtgtcctagcactatatataaactaacaccgaaaacctaatgaaaaaaaatagttaacatagtgaacgagatatttgttgaaacttgctagttgcaactatatggtccccattataacctaattcaagtttctagaagcttttgcttcaaaaaacatataaaaactatgatctataccaacatgtaaaaatggataacggttgatccataagaaagagtccaaaagggaccaaccatgttcacatttcactcctacatttatacttctacattttataacaatattgtcaaaataaaattcaaattactcatttgcattcctagacaatggtgtaatattcttatatatttccataaaattattttggaaaccatgtatcgttttttttctttttcttcaaaaggtaatatgaacaaaaactaaaacaaaaataccaaagaaactgaagtaaagaatttctatatttatccaaaaggactcaagcaaaaaaaaaaatgaagtaacaaaacccattttttgggatttttttgacaaattattacaacagtgacaaacgcgcctccatcaccgggtcgcaccacggtttagaatcagccgatgacccgactccgactatccgacccgaccaggatccaaacccaagagttaaatccaaattcagctttatatgtcctgaattatcactataataacactccccattctgccggagatcctcgtccgtcgtcgtgccgctagtcgaagctccgttatcggaggaattttccgtcttcggtttaacggctaaattggaaaaagaatactcaacggcatcgttttgaataggaacaacaacttgagacgacaccgttttggattcgttaatctgacgatgagtttgtggatcaataccgtgactaagaagcttcctcttaatatgagtgttccaataattctttatttcgttatctgttcttcctggtaatcttccagctatcaatgaccatctgcaaaacaaaacatttcaaattcatatgaataacaataacagaggaaagctttaacaaaaacagaggaaacaaaaaagtgaacgactctgtttcctagaaagttgaaacttttttcctgggaaagatcaaagaagaagaaagagcaggaaaacaaagtgacccagtttctattttctctctgtttcctagaaagttgaaatctttttcctagaaacaagagtagggagaaaaaaaaaagtgactctgtttttctattttcactctgtttttttagaagaagagaaagagaggaaaaagttatcgtacttgttaccgagtaagctatggagtttgatgatgatttgatcttcatcatcagtaaaattaccacgtttaagatcaggacgaaggtaattaatccatctcaatctacaacttttaccacaacgcaacaatccagcggatttaggaagagaacgccaacaaccttcaccgtgattacggatataatctacgagacgttgatcttcttctttagtccaagctcctttgtttgtgtgagctttttcacaacaaggagatcttcccatggtgaatgaagaagatggtgtaagagaagagagaagagatcaatttgtgggttatataaaaaggaggagactttgactaagtttggtatatgtacatgtgactatgtggagataaagtgaggctgtgctttgctgtgttgtgtgtggggtaatggagattaggtaggtaagtaagtaaccttcttttctctttttttcttgtctctttactttttctccttagattttggtttttgtttttttctttctctcactgttcttataatttagttggtagttaagaaaaatacaatgcaaaaataatatttatcaaacatgttatcttttggaaaaaaatgtcattaaaattctcaacttattgaaaactttgatttaaatcttgaactctcggcgaacgaaacaaatatcaaacttatgttactttccaaataaataccaaaccttcttgacttttcaaataaatatcaaacttttgttgacatgactatattaggcatgatgttcagtaggttaatagaccttgaacgtttagtgtgttaacatactcgttgattgaaaacgacaacgtttactctaacaataaaacgtcatcgtttttgtcataacggctcaattaaatctccagtttcaaatcatatggggatttagagataggaattttgcttgatttagagatcttagattgaatttgggaatttagttcagtcattattacaaaacgacgtcactctgttgttggaaacaataacgttttgcattaatgggcctctgttaacaaaaaaattaactccgttaacgggatctagtaatttacttaacagtgtgtctaatatcgccaggtcaacaaaaattagatatttatttagaaagtcaaatatttattttgtttcgtcgagagttgaggatttaaatcaatgtttgcaatgagttgaagattttaatgacatttttcccattaattaaatttaaaattaacaaaagaacgacgtcgtatgaaggagttctgaattgttttagttaaatacagttttttagttgttcctgaagagaaaaataaaactgtgattatttcttgacaaaaaatgtttttattttgcttatctttcaatggagttttacatctttcttttatagacttctttagaacaatctagaatccttgacaatgctatctttaatcaatagctatttattgtgaattactgcaacggcagcgactgcaacggcttgaatttgttttcaagtgttattgtcttcttctccgtattagtgacagtcttctgttttgcaggtaaagagcttttggtctttatcttcttttgcatatgttgactgggcttctgtagtgggctttgttgagtttgggctaccatgtctttgtttttgtcaaagcccgttctatttattgggttgtcttctacaccctccttcaaacttggcgtgggtgagaccggtgacgcagacacgccgagtttggctctaagcgtgataaagggccgtcgcggtagtgacttggtgaagacatcagcaagttgaatagttgctgggatgtgttgcgtttctatgagaccgagagccacacgttccctgatgtagtgaaagtctttatcgaagtgtttagatcgtttatgaagagcaggatttgcagagaggtagacagcagataggttatcacagaacactcgtgtaggttgatgttgagagattccaagatctcggagaagagaggaaatccaagtgatttctcgagctgtatcggaaagagctctatattcggcttctgttgaggagtgagagatagtgggttgtctctttgcagaccaagatatcagagtagatcccaagaggatgcagaaaccagtagtggagcgtctagtgtccttgcagccagcgtaatcactatcgcaaaatcccgaaagaacagggttgtggtgttttctgattggaagccccatgttgatagttcctttcacatacctgagtatgcgtttgagaaggccaaaatcagagttggtcggagcgtgcattctttggcagatgaagttcacggcatattgaatatccggtcttgtgattgttaagtattgtaacttgccagctaaactccgaaagtatgttggctcttcaaagggttctgaattgaggtcttccaagtgttgtggcagaggggtaggcatagggttgcattctgtcatgcctgcttgatgaagaatgtcggaagcgtatgcgtgttgatgtaaaaatagaccattgttgtaagattcaatttctatacccaaaaaatagcgaggaggcccaagatctttcatcgaaaagcggttgttgagagcttgaagaagtttatccatgagcagttgatcacttcctgtgaggagtatatcgtcgacatataagaggagtatgagactttgcccattttgatgacaaacgaagagggaaggatcagatgtgctgcactcaaagccaaagtcaagaagaaagttgctaaaggtgtcaaaccaggctctaggcgcttgttttagaccataaagagctttggtgagccgacaaacgtgattaggcttgttaggatcaacaaaaccagagggttggaacataaacaccggttcttgtaattctccatggagaaacgcgttggacacatcaagctgtttgagaggccactcatttgcagtagcggtatcgagaacaagacgtatagttgcagttcgaacaaccggactgaatgtctcaagatagtcgactccttcttcttgatcaaaccctttggcaactagacgagctttcaacttatctatggtgccatcaggtttgagtttagtcttgaaaacccatttggatgtcagaatattcatgtcctctgttgcaggaactagagaccaagtgtttagcatgtgaatgcgatctatctcatccataactgcagcgttccagctaggatgcttcatagcagtagtaatagtttttggttcatcaaaagaggatttagagacaatgagagcataccgggggtttggcttctgaattccatcttttgatcttgtaatcatgggatggagattttctaatgagccttgtcctagtgcattgtcttcattttgatcatttagtacgggagctacttcgtggtcaaattcatcatttgattcagtttcctcatcagagctagtttccatattaacattgacggcttcctctgtctcataattcatcattggctgattctcacttgttgccataggagtcatttgtcttgcaagaggttgtaattgagaagaaggcactgaaggtggtgtgagatcagtatgttgccaagcctgtagtaaggtcgtctggtattttggaaccagactgtggtacttttctttaaatgggaattgagcttcatcaaaaatgacatgtctagagatgtagactttaccggtaggaggatacaaacagcggtatcccttgtattggttgtgatagccaagaaacacgcattgcaacgagcgtggatcaaacttgttctttgctaacggtctcaagcaggggtagcaggctgtaccaaacactcggagaggtgtataatcaactttttgttgaaacaaagtttcatagggacttatttccttgaggacagaagaaggcaagagattactgagatagttggcagtgaagaaagcttctacccagaacttgagaggtgtatgactgtgatataacattgaaagcccaagctctaccaaatgtctgtgcttcctttcggcaacaccgttttgttgcggtgtatatggacaagatatacgatgatgaatgccatgctctctaaagtgttcttttaatttgttgcttgtaaattctccccctccatcgctttgaaactctttgatttttgtaccaagttgattctcaaccaatttctgatatgcaataaacactgaaataaactttgacttcatgcgcaaaggaaaaaaccaagagaatcttgagaaatcatcaacaaaaactgcatagtatttgaatccttggtttgatacaaccggtgatggtccccaaagatcacaatgaactcgatctaaaggttttaaagctcgaaaatcagaagagaaaaactgtaatctagtgctctttcccatttggcaaggctcacaaacgggagaagttctgcttttattcacttggatttccttgcgggttaaaagttgctgaagaatctttgagtttgagtggccaagtcgatgatgccatgtttccatgctagctgcacattgacgatttgaatagagtgctacaaactctgaattctccagcatgtagagcccattatttcgtggacccttggacaccactttctgagtggttaaatcaattatgcaaaccttattagcatcaaaataaacaccgcatggataatcatcgcaaagtttggacacagatagaagagatttttgtatagcagggcacactaagacttcattcaacggaatagtacctttggatgaggaaattgtggtggatccaacatgtgtaatagggaggtatgttccatctccaaccaagactgcatcgtttccctcatatgttgttgcgttttgcagaccagatgttgaggctgttatgtgggctgtggctgcagaatcggggtaccattccttgccggtttcatcagagacacggagagcagaaaatgcttgagtagggacttcactttggtagttgttgtcaaatcggttgtagcatttgatagcagtgtgtcctatgcgaccacaaatttgacaaactggtctttgtcctgatgatggtgaagcggattgatgttgagaaaatcctctgccgcgtgtagagtagccaccgcgtcctctgttttgcccagaacgaccacgaccacgggaattggaattgtattgaggagcgccagagttagatctttcagtattgaacgcaagatgaggattaacagagacagtgtcgtcataagattgcagcttactgtcaaacccttgaacttcggagatgacgtcgttaaacgtcggagcagggagcttgcttagggagctttggataactgtggtgataggatcgtactctctgccgagtccattgagaaagccaaagattttcatggattcctctactggtttgccaatggagcttagagagtcgcatattattttaaaatcacgacagtaaacagatagagacttatctttttttgtcagaagttgaagattacgacgaagagaaaactctctggcgatgctacttttgttgaaattttcagctagagagatccaaatctgacgagatgtagtgaggttgtggacatgaccaagcacttcctctgaaagcgtaccaaacaaccacgaccggacgagctggtctgtgcaaaaccagtcttcatattgaggattcggaacttcgctggtgacatcatcattaacaacaagacgagtctgagctggaggagtgacgactccattgacaaaacctatgagcttttggctcgatagaagggactcaaactgtgtcttccacaacaagtagttactatcgttgagctttaaggtaacggaactagagacatggacattgtctggaaaagggtaagcaggggccattgaatcacctgttaaggtataatagctctgataccatgaagagaaaaataaaactgtgattatttcttgacaaaaaatgtttttattttgcttatctttcaatggagttttacatctttcttttatgacttctttagaacaatttagaatccttgacaatgctatctttaatcaatagctatttattgtgaattactgcaacggcagcgactgcaacggcttgaatttgttttcaagtgttattgtcttcttctccgtattagtgacagtcttctgttttgcaggtaaagagcttttggtctttatcttcttttgcatatgttgactgggcttctgtagtgggctttgttgagtttgggctaccatgtctttgtttttgtcaaagcccgttctatttattgggttgtcttctacaaaagtagccagcaagttgtcacagtttgattaacgacatctatgtaaacgtaagttttggaccatgcttttgtttatgtagaaaactcaaattttatttagttcatatagtttgatgcataaaagttctatataaaccttaattcgtgtatataaaattatgtaagacccaaaactagatcaattgttaaaaagaaaagggaaacaaatggaaacaacagagctatcactagaacacttgtatcatcgttagagctatctttttctacacgttagcttttacggcctcccctctactgcatcatcgcgttttctccttttgcgcctcctcctacggatatctatttcattaggttttcaactgcggcaagtcacaacatgttttgatcacaccgatgcttttctaaactgctttctcttttccttttgcttagtgcaggttcctcgatttggatcaaacttggaaaataagagtatatgcatgggtgtggccaacgtttattatctacaggtactctgatatctaaagtttttgaagtatccagcctctccattaatattaataactagtttggtataatcctcagtgtcagagtcagaacttgctcttcaacaccatttcggcctcaatcttagtcgtaatctatatctcaagatcatctatgtatcgttcacggtgctgaaataaaaccgcaagtttctcttctttaacacaagataaagtcacaaatattagtatagccattagctacaacgtgaattggtagaggcagaagcggcccaaatctctctcttgtaaaatcaaaatagattatgtgattcttgctaccttcggagctccttttattagcacaccaataactatttcccttaagagaaacgctaggggaagaacaatatatacgccaacgtggaatgacatcaagagttgtccaatcacccgagttaacatcatagatttcataccaaaaaaccgtgtttcgggtgtattgtagaaataatataaaaacctcaacagcacaactataactgcacttgtcatgtccgtctctgagatcaatccaccttgtttgccccaactacggatattccaaaccacgatcctattaacttcttccaatttgcataaaattaaaccttcatagtggtaaatataagatatgctgacttgactgtgaagaaaactaaggttatctgtgacctcctgatgtttatacctataatgtgtatatcaatgggttatgcaagctgaacaatatccaaggcgctataaagatgatgtcttctatgaaaaagctaggttctgagcctaatgtagttgcatacaatatattgataaaaggattggttaaagctggagatctgagtcgagctaagactctatggaaagagatggagagacgaatggagtttagacgaggttgtttgtgctcactgtttattggaataagcatttaacatgagttcaagaatttcggaagatctgccttgactgaactcacaccatcacattgttgacattcctttcctggatccttagccgtctccacagcttattgttggaacttttttgacataaaattttccggtgactttccggccaaattccggccaaacggctgaacggaattgtcgggtcattagtgaattggaaatttggtaaagagtactacaaaatagtatactcatacgtcaaaaacggagttgtattgaatgagaaataagggtgtaaagtgggacacttgctcttcctctactcaccaatacatttttctttaccaaatatattcattgatttaaagagagaaaaataacctttggtaacatacacgtagatagagatgtgtttcaaaagacaagactgttatatttcatcttttcaggaaagcgaaattttcaaagatgcaaaacagagagaagtaagaacagagtgcttctgctgttgtggacatggagccatcataggtttctagttctcagcaagtgctccatcatctgcaggagaaaatggcttgtgtgaaaaacaaagaaatcgttttggtcgatcccacgttcattacaaaacagagttgtaatacgtttcagcctttcaggttgccttaacaatgtgataagctgtggagacggctaaggatccaggaaaggaatgtcaacaatgtgatggtgtgagttcagtcaaggcagaccttgttcgttaaagagttcaagaatttcggaagtcatgagtaggtggagtaaggtttaatggataaagcagtcaaacttttagcacacctggtttaagcaatgtggagcaaatctaaatagttgtatttggtcttattagttagaacttaaaagaagggtgattagtttgtttgacaagactttgggaagtgatcaaactacatatccaaacttaactctacgccagaaaccaacactctaacaccaaaactctaaatccctagaactaaaaatcacattagaaaacttaagcgtagtataagtttgccatacacccatcaccatcgctgatcaaaaccccgaaagttttcctgggagggataatattgattcgaaggaatttgatcaccaaaatgtggttgctggccagtagactccaagttggatccagggacattgaccgcaactcccagagtcatgtcatgaatactcgggcgtttagtattcgtactctcctgcttttgccttgcaaaatacttctgagcatggcttgccacttgcgtcgaggtccttgacttcacacaatacctcgatatgttcttccagtctcctttcccaaacttatttagtccttccagaaacaacctgaaaatatcattaaaccaaccaaaagtccaaagttaagatcacatagcaaatacgagaggaaaacagtctatttcccccgagaactatgacatcataacagatagagcccaaacttataccacggtccatatatccatgaaatagaagttcggttcctatttccccccaaatcgaaagatctatatttagatatccctgagtcaatagttcgagagctaaaacaccacatagtttgatttaatcggtttattgtattcaaaaccgaatgctaaaccaattaaacgtaataataaccagagttaaccatcatttacccgttttcaacctgattacacggacttaaccaaaggaccataatttactcgttcatctcacccaactaactttttcgttttcgccttcatctaattccaaatcaaatcatgagaggattaaccaatgtttttctaaaaacgtacgtaccacctaaaaacgtacgtgatatatatataagtttactcctagccctaaccaacaaaaccctaattcatcaaaccctagcaaaatttaaaactcttaaacttgggactttatctccacaatccaaagaaattcttattcataaaatcattgactaacctctgttcctcttctgaccaaggaattcccgtctttttcccattgcccttagactcacctgcttccgtcagtttcacgtaatcgtcttccgggtatttgggcaaaacatacttacccgattcgatccgctcaatatcatggaccaacgcgcagtagtagtactccacctccttcaccggtttctggagataataggcgatattctctataaaattcggcgaaccctccgggatttgaagcagagctaactcaaaacgtttgtcatcgacccttgtccactgcggaaacgcggccatagtatctaagaaaaagagagaaaactggagatcgcgaaagataaggaatctgatagaagcaaggaaacaattagttgaaggaaatattgagggttttgttattgagggttttttcttgttccagtcagattttatagggagaaataatagggcctatcggacaaattaaaatttaacaataatagggcatataggaaatagtatagtcagattttgtagtcagattttatagggagattttatagggagaaataatagggcatataggaaatagtatagtcagattttgttaaaacacaggacaaagctgtgagcaaacctgtcgtgaaacctcaggaaacgaaagatgatggagcagaatatgttcgtggcttgtgtgaccatttgaagactttgtcatcagttgatatcttgagaatctttgtgtcaaatgttgttgaagataggtcaagagagattgcaataagaagacttgaagttgtactctctgatcacacttgaaagaaagtgaaaatagaattgtcagagatgagagaactccagacattgctcatctcttgccttaagcaagaaagaatctctggcagtatgttcagagtcctaggtaaggtggtgaaccacgttgtgtgtgagatgttcaaacaccaagatatcgcatgggacggtctacgcgattatattgtatcacaaagcaaaacaaagtttcagagagcggtttatatcttccagtgcttaacaacgccgcttgaggatgacgagtttgtgattcatgtgatggagaatcttctcccagagataagaataaggctaaacccaccaagagacttgttggtagataacagttgctgggttttggcgtttactggtgcattctgtgcgaccatacacttgagagaatttccaagccaagctgaatccgttaaggagattgcaaataagatgatagattctgtgagagagcttgtggaaataggaattgaagttgggcttgtgaggagagctttcagagatcttgaaaacattgtcaagaacctaaacaaatggaatggtacgggaagttagaatacaaattccatacaatcaaaggcatgaaatgggaaagtaagatcgtgttgtggagaatcaatgtgattgtggagagaggagtgaatgagcaggttaaagagctcccaaagggtaagtttgattggctgaacctacctgaggctgacggatttgaacagtctgaaattctgcttgcagactatggtttttgatacatagtttggagttgtagaaagaattaaccttgtatagaaaaacaagtcaagtacaaatattggtcttggttctttagtaggtgcttaggtatttctgattttttgtagactaccaatcataaacccacaatagttacaaaagaaacacgagtaattaaaatttcattcataaccccactattataaaatccgtaactcaatagctctcttgcttcttttttttttttactgcaaactaaattttatttagaagaataaatctttacaaaggagatttgtgagccacaaatgctgattgtttgaatctgtgcttgaaacaatgtttttgtgaactctgaagaagctaaatgatgagctatggaattacaatgacgattagtgaaaaataactgatgagaacttcgaagaccagaaatcaacatagatggtaaatgtcaaagtactaacctttctgctcttgggagataagtcattagtgctggtacatgacttaatttgtatatatgtggcagtaaccacctatactgcaatgcaaaacaattgttagttttatacttttatatacaaatctgactatatgaaattttatgtactcaagatgataatgaactcttatatttatatacattcttataaagctaagcttttcagttagcaaaactttattttcttgaatcattgcatcgtttgcagatttaaagaatctattagtttattcttttctgtatcaccaaacttgatccattggtttcacaatccgagccataactccttattaagagatgcaacatgttctttcttgattgcctaaataaatctagctctagataaaattaattttgatttcaaatcgaagaaatctatatctacaaaagataagagacagaggtgaagatcttacctagggatataaaagaaacatgttttaaatcggagcatgtttgatgagatacaatgaggaagaagatgatgtggtcaagagagttttagttatttaaactaattagtgggaatgtgttaacttgcccaagtttcacgtttcttagtagttagttatttgcttgtgtatttaagcatcgtttattgcaaaatctattatgaagagaaaaattaaataacttgttctaaaagtctttaagaaccaaaatgttcttgtccttgttcttcatatcattatatgattggaaaataaaatcaaaattgatatccttaatatgtcttgaatgggctcagaaaaaaatcgacagtctcctcgatttgttgtagcagccggcgattttttatttttattttttacttaggtaaacgttgatttttgttttgggtctatttccttaattttttctttttcgatatagctcaaattaccctaagaactacactctcaaataagagatcaattgcagtacttaaggatcgaatttccacaaaataattttgttcacacagtgagttaattaagtgtcgagattaagctagaagaaaatgagaaaaataaaaagaaaacatagtaagcaaacaacagattagttggttgtaaaacaagataataaaaagttaggtttagggtattctcaagaaacaaatgattagtagatctaatgatagctaggttgttatcgaaccgttcttaaactcaaactctaatattagaataaccggtcgcgttttccaaaactcactatgcctagagctaagattcccagtggcgttctgtgaaaccctatcctagacatgcatgctaaacgagttcgataagttcaccttagtagatagaccgattcttattacacacctaaagcccggcaacaggaggctttttttattttgtgttttgtaatttttcgttttgtatttcattgcttaatagaagatgtgttcaaagccccataatggtaaaatatgttttataatatgtaactttaaggaaaaagactttttaatctattatcaaggaaaataacttttttgttttaaattttgtaattatccttttcgatgttgtatatgttaataaatatttaaaattttaacgaaaaatccgttgtagtacactggctaaattcgtcatcattaccaaacttactgggttcaaagcccaacaacggtagactttttttattttgagttttataattgtttttttttgttttatatttcattgcttaatagaagatgtgttcaaaactcaacaatggtaaaatttgtttcatactaggcggaagtaagtaactttaaggaaaaacactctttaacctataatcaaagaaacaacttatttttgttttaaatttagtaattattcttttcgatgttgtatatattgataaacatttactccctctgttcctttttgtttgattgtttagaaaaaacacacatattaagaaaacatattaaatgttgattataaatgtattatttttagtgttttacaattttctataactttaaaccaatgataattaactattttttttgaaaattacaattcaccaatactaaccaatatatattacatggaaaacttaaaaaatcaatcttttagaaacaaatttttttttctaaacaatcaaacaaaaaggaacagagggagtataatttaacaaaaaaatccattgtagcacactggctaaattcattttcattgccgagcttaccgggttcaaagcctcgcaatggaagactttttaatttttagttttgtaattgttctttttggttttgtattttattgcttaatagaagatctattcaaagcccaataattttaaaatatgtttcatactaggtgaaagtaagtaacttaaggaaaaagattctttaatctattatcaaaggaaacaactttctttttgttttaaattttgtaattatccttttcgatgatgaatatatttatattttaacataaaatttgttgtagcacactggctaaattcgtcttcattgctgaacttatcgggttcaaagccctacaacggaagactttatgattttgaatttttcaattattctttttgattttgtatttcattgcttaataaaatatgtgttcaaagcctaataatggtaaaatatgtttcatagttggcgaaagtaagtaactttatggaaaaagactctttaacctattatcaaaggaaacaacttttttttgttttcaattttgtaattatccctttcgataatgtatatataaataaatatttaaatataacaaaacaaatccgttgtagcacactggctaaattcgtcttcattgccgaacttaccgagttcaaagcccggcaacagaagacttttttattttgagttttgtaattgttctttttggttttgtatttcattgcttaatagaaggtgtgttcaaagcctaataatggtaaaatatgtttcatacttggtggaagtaagtaactttaaggaaaaagactctttaacctattaccaaaggaaacaaattttttattttaaattttgtaattatccctttcgatgatgtatatattaataaatatttatattttaacaaaaatttcgttgtagcacactggctaaattcgtctttattgccaaacttaccgggctcaaagctcggcaactgaagacttttttattttgacttttgtaatttttttttttggttttgtatttcattgcataaaagaagatgagttcaaagcccaaaaatggtaaaatatgtttcataccaggcggaagtaagtaactttaaggaataagactctttaacctattgtcaaagaaaacaacttttttgttttaaattttgtaattattctttttcgatgttgtatatattaaaaaatatttacaatttaacaaaaaatccgttgtaatacaccggctagattcgtcttcattgctgaacttactaggttcaaagcccgacaacggaagacctttttattttgagttttgtagttatttttttggttttgtatttcattgcgctaatagaagatgtgttcaaagccctaaatggtaaaatatgtttcatactaggcggaagtaagtaactttaaagaaaaatactctttaaccttttatcaaaggaaacaacttttttttttttttaaactttgtaattatccttttcgatgttgtatatattgataaatatttataacttaacaaaagatttgttgtagcacactggctaaattcgtctttattaccaaacttaccgggttcaaagctcgacaacggaagactttttgattttgagttttgtaattgtttttttttgttttgtatttcattgcttaatagaagatgtgtttaatgcctaataatggtaaaatatgtttcatacttggcggaagtaagtaactttaaggaaaaagactctttaacctattatcaaaggaaacaacttttttgtttttaattttgtaattatccctttcgatgatgtatatataaatatttatttatatagaaaaaaaatattgtaccacactggctaaattcgtcttcattgacgaacttacggattcaaagccccgcaagggaaaacattttttattttgagttttgtaattgatctttttggttttgtatttgattgcttaatagaagatgtgttcaaagcccgaaaatggtaaaatatgtttcatatactagccggaagtaagtaactttaaggaaaaagactttgtagtttaacctattgtcaaagaaaacaacttttttttttgaaattttgtaattatccttttcgatgttgtaggcctgggcattcggtttcggttcggttgcgcatggtttcggttatttcggttatagtaatataagaaccatttggatatttgaggaattttggttcggttcggttcggatatctttcggttcggttcggttcggatattaaacttggtaaccataaataaaccaaaaccgaaataaccgactaaaaatcgaaacaacaaaaaaaattgaccaataaccgatatagaacgtaagacatattcacaactcacaaagatgcaaatatggtccatactctccataacattaaaacacctgattcacaactcacgaaatttaacttgcaaactaataaagagaagaacatagttaagtgtcaatacatacaatatatgtgatatattatctatcatacatatatgctttggttatcctttggttatcggttactaacctaaccgaaaccgaaaccgaaatctaagacatgtaatatccagccggttattttaagctatccaaacccgaaccgaaccatgtttttcggttcggttcggttcggttaatcggttagcggtttttttgcccaggcctacgatgttgtatatattaataaatatttacaatttagcaagaaatccgttgtagcacactggctaaattcgtcttcattgccgaacttatcgggttcaaagcccgacaacggaagacttttttattttgagtttttaattgttctttttggttttatatttcattgcttaattgaagatgtgttcaaatcccaataatgttaaaatatgtttcatattaggcggaagtaacttaaggaaaaagactctttaatctattatcaaaggaaacaacttttttgttttaaattttgtaattatcccttttcgatgatgtatatattaataaatatttatgttttaacaaaaaatcagttgtatcacataggctaaatttatcttcattgccgaacttacctggttcaaagcccggcaacaagtcgcaggatctgatctaaaaaaacaagcaacgtcaagaaatgcatatttgtagtggaactttctataagtatacccactatcttttagtgccaaattaaagccatgcatgataagtgaagcaccctaactttctttgtcgtttaatctcgggactacttccgcatttttgaataaactcttgagcagtgacttgtcgctaaatccaatataaattaccaagaagaggtgaaatgtttctttccattaacatcatcgagaacaacaagaaattttcttttgagtaactcatacattacatccaaaccttatgtgcatgctttgtgtgtcctatcatctgcaaacaactccagtccatatgctcctttaggtcgttaacatcttgcttacttctgctatacatatattgtgcgtaaaatctccttaccacttgttgtaaaacgatttagcaagagtagttttgccaatcccaaaccatcccaacaacaccaactatagggttgttttcctgcccaatctctaactcctcttctaaattcttgaaaaactcaagaaagcagctggaaaagagcaactgagaaagaccaaatccttcaatttatcttgtctattaagtgatgagtgaatgatttaaccaacacaaaaaggtgaggatgagtgaatgaatcactcaagaaaaattacttttctggaagatgttaaatttttaaattctgcttccaaattgtgaataacaatctcagtgtgaacataactcttttaggcttgtctcaaattttccgcaaatgaagtacacgtgtcatagatacgcaacacacagacagggacacaatctggtacaacttgttgtgttaaaacagaggattgtctagtgatttaccaaagcagagaattttttagtattttataaaataaaatggcaagaaaaatgatgctccatgttgattttgtttgtggtcaagcgagctccacataaaataacaatctcagtatgtgtttgtggcaatttgagttgcagaccaagctttggtaaagcggtctttggaatttctctgccgctggttttaggattttggctataattggaaaacccactcgaaccggaacgtaagccaaactgatgataacatgaaccaaagtaactgaaccgaacaaaggaaatcaccgagtcgaagttaccttcttggtttgatgaactcggatcaaattatcgagttgactcgaaaaagaaaaatacacagaagatgagaagaacgaacggaaggacactaactacagcagaaatatcaggagacgagcagtcacacatagaagcatccgattactaggaggctccttgtggcttgatagttaaaaggggaaagcaagcgattcgtgatgaaacctataaaaaaaaaagaagaagaaagaaattgaaactcgcgtggcaaagaaggatcaaggaagggaaggtacttgcatcaaattctaaaccttttttccactacctcaatctagcttcaatcagggccctttgacgaatgatttcaggaactggggaaaatccagttagggttatccaatgcgaaagttggccgatcctcgtacattggccgctacattctcgataaagtagaaattcgtattgacatctatgagaaaaaagaaagggggggataaatcatatatcagtatagtagaggcatcacgaaatagcgggtcgacaagagaaaacttaccgcttcaccatgtctctcgtttgaaaccagagtctttatctgctcgctttgtttcaggcgggggcaatctctaagatcgaggtgtttgatcgtatggtttggggaaagggtgacgttctccagataatcacagccgtgtgcatagagatggttgagactcaggggaagctcttccacatatttgagtttcttgcagttcttgaggcagagagtgttcagtgaggacaggtgtctaatgcttgttggtattctctcgaaatcatggttgctaaggtctaaatatgctaaactggtgttatagcataatagctgatcttgcagtgactgaagattcttgcagttgtcaatgcaaagctctatcaaacccctcggttggttgtctagaccaggaagagtgagggtgggagtaagtagtggcaatgctttgagctgacggcagtttcgaagagtaagacattccagcttggtcagttgtgccatggttttgggtagatgaacgaaatcattaccggtgaggtccattttccttaaggacaacaaacaatcaatgtcttgtgggatttctcggatgcttaagttgatgagctttagctcagtcaaacaaggaaagcttgaaaagctctgacaactgaaaggagcttctctcgccccgtagttgaacctctcaatgacgagtgttttgataaggtgcaagggttgaattgaacctgttttctgtgccatcgtaattttcaattgatcagggatctgttgctcgcaagtaaaagacaagtgctctgcacttcctatgagagtgtgcaataacttaacagatatttcgccttggatggataattctgtaagagaactaagcgctgttactgtatcaagaagcaacaaattaatatgtcgataggggctgggtcggctggccttgggttgattatggtcgtcagtaaccagcaagagacccataaggctatcacacttgaccatattgagtttcctcaaaggtaatctgtttaaggaccatggggtttgcctaaggctcctgcagccttccattatcaactcctcaagattcatggaatctgaaagatctggaagttctactagactcgtagagcctgtcacatctagtcttcgtaggttcggaagctgcttaaaacaagacaacagaaaagtatggaacacattttagtcaatgcaaatagattcaatgtatatgaaaagggaattaaatatgaattttgaaaagtagcgtaccttggatctatagaccttggtttcatcccaaaagtgttttaggttgctgtatcgcagattgatttcgactagggtgcttgattggaaactaaaaggcaaggtttccagagggtaggcgtcccaatggagtaacttaagtccatgagtgatactagaaacatccgaaatgagctgcagcttggacgttatatcaaccacatgctttaaaaacttgagaaatgtgagatcacgcattggcctgcactgctccctatacgtaaagtgtcagacagatcacacatttctagtgacaccccatgtattttggatgtaccctgttgaacaaaagcatgtatactcactttaaaggattagaaacaaaaacaaattgaagaatttatttgtaagaacttactatgttccttgcgagtacatcatagatctcttccggcttccacaagaacttttgctcggaaggtatacagttggattgttggcgcacaatttcttttcctatttgttcaaccaagaaatgcatgattaaacgtccatcatttgatatgtccaggagagactttgcccgtaagctatttatccttgaaccaagtttcccaagaaaagctctgataagccagagaaagcttccgttgaagagacatgccacttgaaggaaaacagactgctcgtaataatctaaatcatcatagctagctctcaaaatttcttcaacattcttctgaggataatcttctagacgaaataattcatcttcccatccctctatggtggtctgttcactgagatgcgaagcaaaagctacaagggcataaggtaggccgtgagcaagctgagaagctctggtaaagagtctctctgaaccatgaaatggaggatttcttcctccaaaagcaaacttttcaaaaacctggagggcatccttactatccaagcacttaacctcatatacattatttactccacatgaattgaggagacctctatctcgagtagttatgatgatcaagctccctggaccaaaccagcttctctcttttgccagtgcatgtacttgctctgctttattcacaccatctatcacaagaaaaaatttcttgtgcttaagtatacccttaatcttcatggctccagcttccctggtaaacaacttggcattttcatcattgcagatatgggaaagcaatttcctttgtaggtgagttgggtcattggtgttccaagcgtcttctatgaaacagtgtgcccaatattcatgtgagaattggttatagagatagttggcaatggcggtcttgcctatgcctcccatacccaatatccctatcattctaacctcacttttaggctccttatccaaaaggagttgcatcttctccatatgagcatccattccaactaaattgattagatctgtaggcttcatctttctcagtcggtttgaaatttttgaaactatctctgcgatgttcgttgcctcatcggaactgacatggaacaagagcatttgcgttaaaaactaaaagatgaaagaaaggtatatagttaatttacacatcaaggtggttcttcttggctaactcatttacttcttaatatccttctattgctataagacaaacatgggagaataggaaaggttgtagatggctcagattttaatttaaggaaaggttcttcttcgttaactcgttctttccatctataaagaatgatgtcaaacaaacaaaaacaaaaacgtacagacaatgaattacatgtgtaagtgtacggtgtaccaaagtctctcagtgaaatgaggggtaaaatattagcctattaggctatcttccaggcaaaagaaaaaacccaagaaagcaagtttcagaatgaaaatctttttggtaaacaagatttaatcttaggagtggatgtaaagtaccatgtctggaaatgcttgcctgacatattgccaacttgagtgagagctcccttccatttgagaatcttctctggatctctgtagtgctgaagcttaacctcgaagctatttttctggtatctcacgtctgaaggttctactttataaaagatgggaacgactataatgtcatcctgaatggaaagctccattatatgtcggagttcctccaaacaccaacttgaagtaacatatttttctgagagaacaaccacagcaaaccacgaagtttgtatagcgttgacaagtttttcagaaatgatgtcgccttcttcaagctccttgtcgtctttgaaggtacggattccgacatcaacaagtgctttgtgcaaatagctgactatgttattgcgggtgtccgcccctcgaaagctgaggaagacatcgtactccttgactcgagttggagaggatgtggatgaggaagccattgacgaaggtgctgaagataaaaaatgtcagagctctctgttacgatatattcatggttgttgttgtgaaccttgaaccttcagaaattggatcgatttcaggttctgacttgatttgagatcggattcaaagaaaaaacgtaaaagagacgcacgggaatttatcgagttcaggctccgatgtggaaccctacgtctcgccggagatgtctccggaattcactaaaaacacttagctcaaactcgagctctttctctctacaattgttctcttctctctcttactctctctcgattcaatacacttttaaatcgaataatcagaactaagataacagatgagtacttaaagaaacagaagaagacgagctctcggaagagataattccgttagagatgggcgagctaaggagattgctccacgtgtcgtaatttccttagctcgcctaaaacagacttctgatgtcgccacctccttagctcgcctaaaccagacctgatgtcgccacctccttagctcgcctaaaacagacttctgagaccttctgattctcttagagtgttttttgagacttaacatatagatcaccaaacttcaaatctccaccttgatctttatgccactttgctttagtttgaattcctctccggttcctgaacaaactcgttcagcttcaaatccctgagtaaacccactcagcttcttctccctgagtaaacccactcagctggtttcttggagcagtgctccaccttaattttgagacactctgagcaattcaagggcgtcttgaaacttgctcactggtaaaaccttagtgaatatgtctgcagggttgtcttctgtatcaatcttcagaacctgcacttctccattattcaccaaatctctgatgaagtgatacttaacatctatatgtttagttctttcatgatataccgcattcttagccagtgctattgcactttgtgaatcacagtgaatgttcactgtcttttgtgtgaaacctaactcgttcactagcccttttagccaaattgcctcctttgctgcatctgttaaagccatatattcagcttctgtactcgacagagctacaactttctgcaggttagacttccagcttattgtatttcctccaaaagtaaacactactcctgaagtagatcttctgcttcctttgtctgcagcataatcagaatcgcagtacccttctagaatgcattctccttcattcttgtaacacaactttcggtctaatgtaccactaatgtacctgagtatctattttacagcttgccagtgttccttcagaggcttactcataaacttgcaaactagacctactgaatgggctaggtctggtcttgtactaatcatcgagtacatcagacttcctactacgctttgatatggaatagccctcatcacttcagactgcttctgcacttcttcatcatttgctggctttagtttgaaatgaattcccatgggtgtgttgacagacttggcttggtccattccaaagtccttgagtacctttagtagatagccttcttgtgagatagtcaaagtaccagcttgtctgtctcttgtgatttccattcctaggattttcttagcatcacctaaatccttcatttcaaactcagaattcagtaaagtctttagctcacatacctgctccttgtccttggatgctatgagtatatcatccacgtagagtaacagatagatgtaatctccacttagtaagatcttgtagtacacacaactgtcatacttacttctctcgtatccaattctctgcataaactcattgaatctgttgttccattgtctgggagactgcttcaacccatacaatgacctttttagcagacaaactttatctggatatttttcatgaatgtaaccttcgggctggtccatgtaaatggtttcgtctaagtagccatgtaagaaagccgtctttacatccatttgctgcagttccatgtttagatgaactaccattgacaacaagagtcgaatggacacatgtttcactactggtgaaaaaatctcttggaagtcaattccttctttctgcgcataacctttagctacaagtcttgccttaaaccttggttgttctactccagcaattccagcttttcttttgaatatccatttgcacccgataggcttctgagaattgtctctgtccactagagtccaagtcttgtttttaatgagggattctatctcctcatctgctgcttcaagccatttcttattgtcagggtcttgcaggacttcttggaaatcagtgggttctggatttcctccatcttctgtgataagatacgcatatcctgctatctcatcaagtatttcctcattcatttcataatcctttaaccttgagggtataacaatctgtctctttggtttgtctctggctatctgatgggttctctgaatcctttctgttcctgtatcttcctggtctgtattggatagttctagagtttcatctgactctttttcaatagctccaccttgaactaaacgttcaccatccttgttaagacctgtacattcaaaactgggaaccttgttagtaacaaacggtagttcaagactcatacctgaggttaacttgttcaagatgtctttgtacattacatcttccctgaacacgacgtttctgcttatagagcacttctcctcatcaatcatccagactctgaatccctttactccctgtggatatcccaaaaacacacctttcttagcccttggatctaattttccttcttgagagtgcacatacacaatgcatccaaatctttttagtccagataagcttggaactgcagatgtccacagctcttcaggtattttgttttccaaagcagatgatggggatctgttgatgagatatactgaggttgctgctgcttcagcccagaacttcttgtcaagaccactttcactcaacatacttctaactttgttcataatggtcctgtttagtctttccgcaactccattctgttgtggagtgtaagtacaggtcctgtgcctcactattccttctttcttgcagattccatcaaatttatggttgcaaaattcaagaccattatcagttctcaagtgtttcagtttcctttcactttgggtctctaccatcgttttccattctgtaaacgactgaaatgcttcatctttagtcttgagaaaatagatccaaacctttcttgaccaatcgtctgtaaaggagatgaagtattggcatcttccaaggctgtagggtacattgggtgacccccataaatctgagtgaacgtaatcaagtttctctttagttgtgtgttgagctgttccgaagctgactttgtgtgtttttcctattacacagtcttcgcaaaattttatttctgagatcttgtcatttccaaaacaccctttcttacttagaatatccatggcctgttgccctatgtgacccattctactgtgccataactgtgtctgatctgtttctcctgtagttgtaaccaaagattctgaattagccatttcagcttgtgcttccagtatatacaaagaagctctccttcttcctcttatgaattcgtttgagtcctgcatgactctcagaataccatggttacctttgaattcatagccttctgcttctaaggttcccattgatatcagattccttgaaatttctggaatgtatctaactccctgaagaacaatgcttgttccatctttcttgacaaatctcacgctgcctattcctttgacctcagagtaagaattattagccattctaaccttccctgacttagccttttcaaagtttatcagatactcctttcttggtgtcatgtggaatgaacacccagtatccataatccattcttcctgatcgtttttatcctcactaatgtttacttctgaggcaactaaaccgaccaagtcttgagcatcatcctttaccagtgctgtttctcctgcactatttcctttattcttctcaagccacttgtaacattgtcttttgaagtgtccttcctttccacatatccaacagactttcttgccctctgttgacttatttcccactcctccagcttgagatttacctcggacgtatagaccttcacctactggtcttgatcctcctgaactatcccttagttccagttctttagacttcgcagcgcttatgacctcatccaatttgatgccttctctcccatacttcagagtttccttgagcatgtcataactgtcaggtagggcactaagtatcaagatcgcttgaacttcatcaggaacctgaatctgaaggttactcaagtctgagatcatctttagaaactcatcaacattttcttcgagagtctttgaatcctgcattctgtaattatagactttaagttgcaggtagactcgatttgggagagactttaccaaatacaatctatcgagtgttgcccatgcctcagctgcagtctttgagttctcgatgttcctgagaaccttatcaccgacgtttatgaagatcatatccatcgctttctcgtctcgatctattcttgccttctcttcatcgatcctttgttttttctttgcaggatctgattcttcttcatctttcagaggaggtaactgttcttgttccactagagcgtcttttaaccccatcactcttagatgagagaacatccgagtcttccatagtgagaagtcaccggatccatcaaactgagaaatctttaacttcgtactcgacatctttgattcgatcttaccttcttgagctaaacctttagctctgataccaatttgtgaaccttgaaccttcagaaattggatcgatttcaggttctgacttgatttgagatcggattcaaagaaaaaacgtaaaagagacgcacgggaatttatcgagttcaggctccgatgtggaaccctacgtctcgccggagatgtctccggaattcactaaaaacacttagctcaaactcgagctctttctctctacaattgttctcttctctctcttacttccttagctcgcctaaaacagacttctgatgtcgccacctccttagctcgcctaaaccagacctgatgtcgccacctccttagctcgcctaaaacagacttctgagaccttctgattctcttagagtgttttttgagacttagcatatagatcaccaaacttcagttgtcttactgttccttataagtctcccttttagatatatatatatatatatatatcccgtttgatcaattctagtttatttttcaggtccactaccgtttcggcgtttctcatagagctgtcaatgttaaccaaagtccgcagatccagcttcacataatcgatgacacattttattttcttcacgtaattcagtgatttttaaaaaatttattattttgtcaatttgttttaactacaaaaacaaatattttacattttaaatataagatagtaattgtggaagtctttgaccgaatgatcaaagatgtaaaggcttatacattatgtatgtaatttgatttccaaaaaatgcaatttcttacaatttgaaggggtaaacgttgtctgtcataattcatatgtatggtatcaatctgagtattgcagagaggtgaagttatttaactgtttattataatcgtattcgtatgtatagaaattgataagttgatcatttatctgtaataaaattagatcaactatcttgatcaaaatatatatcatatataataagacaatgttttttctaactttgtttactaatgcaatatttatcattaattgtagtttaactaaaattatttactaatagatatatgatatatttagaaaaatagtcattaaaatatgtaaactactatatattaaactaccattttgagatgaaatttgggatctactattggaaataaaaatataattaatatatctttataattatttgtgtttaataactatttttagtataagtgaaaataactaaatctattttaatatacattaattagaatattatattttttttaattttattatattagtttcatccacgcataatgggactttctctaatatactatatgatactagttttgtgattaaagagatgtaaaaaggtcaaaacatatgtctgcgtcgagcttaccacagtggtcccaacccaagcaactaagtcgtaatatactattccgtccgtcccactaagatgaattttttagaaatttcacattctttaagaaatattgtataaagataattttaacctcttaatatactttaaaaataataataaatatttatctaattagtaagggtaaaacgggaaaacagttttaaaatttgcattggaaatataaaacttctatctttgtgggacaaatattttttctaaaaaatttatctttatgggacagaaggagtaatatataattgattgctttctattgtctttaagtcgaggctactaagtcttaaatgtacagcttataggctactgttattaataaccagataacgacatagttcccaacaggcgaggtgcttcacgacttaaaagaacaattgtctaagaccacaaccttttaaaagaaaaaatctatgtgctagattgataattatttgtattatatgattaaatcaaatattagatataacatatgataaacaaatatatttgatactagttttgtgattagagccaaaaaaaaagtcaaaacatatgtccacgtcaaacttagcacattatggtcccaatccaagcaactaaaaagtcttaatatacagcttggttgctttctattgtcgccaacaagacggtaactagacacagagttcccaaaggccatactaaaataaaatagaaggcaatgttttaatcaaaattaggattatgtatgtagttttttttttcttctaaatgcatgacattaaaattcttagtttaacaagagggattgaatggtttgctatcatatttataaagagaaagttggtaaaaaaaatcgattatattattagtgtggtgaacaattcagaatttagaataatttagcaactcctaatctctctagcaaattctgaatcactttcttcaatgtattcttcttcttcatcttctacccccaagtttgatgtcttcctgagttttagcgtagaagccgaaactttagtctcggatcttcgcagttcgttttctgaaaatggcattacaatgaaagatgacgatctagagaagggagtctcgtccttaggttctgagcgaagcgaaggtatcagggagtcaaaagtcgctgttgtggtgatctcccagagctatgcgatctctgctcagtgcctgaacgagctccaaacgatagtaaactttcacgatgaacgccgtatctccattctgcccatcttctacggagttgattatgatgatgtaagaaaccagattaaagaactcgcagcgtccttcagaaagcttggtaaagaatatccatctgagaaggttcaagcatggatgattgctcttatcaaactcatcaacatatcccgctcagattcacggtacttttacaagatgctgctctattagtctatttgtgctttcaactttttcatagttaatccttttgttttttttaaccacagaatccatgacgacgagactacgatcgatatggttattacaagtcaggtcaagcaaattctattggataaggataagcagatcaatctgaaagcaaccatctcgcatactgtctcaaacaagcagatcaattcattgacaacaaaaaacgttggactgatcgggttggatcgtcatatgctagcactgaacgaattgttggatttaaaatctaacgaggaagttcgcttgattgggatttgcggtcaaggaggcgtcggcaagaccacgctagcgagatatgtgtatgaagaactattcaaaaacttccatgcccatgtgtttgtagacaatgccggaaagatttataagcaagataccgatgagtcacattcacaaaaatctttaacatcaaaggagattcaagagggcactcaaacggtgacaaggactctgactgtggcctctgattttatcaaatcgacggtttcacaccagagaagtttgctagtcgttgattgtgtagataacatcaaacagttagaggaaatcgcaaacattgtcggcttgtgttttcctggaagcagagtcatccttgttacacaggacaagaaattgctagatgactttggtgtggagcatgtctacgaggtccagtctctgagatacgatgaagctcttcaagtcttctctcaatctgcattcaaccagcaacaccctccagctagttttgaatcactctcctttcgtgctgtccgggtagctggtttccttcctctgcttcttaaaatcctcggttcttctttacaagacaaggatggcaagtattgggagaaggaactgcaaagactggagggaggccaagaaaaagcaattatggaagtaatgaagaaaagctgcacaagagaaaaagtccctacatttatctttcctctaaactgatgaaattctccaccacagggagatgttggtattccaaactcgatcaacaatgccaactgatagatgagttgtcatgaatcatgatgtatgatagaaagtttttgctatgtaaaatatctctcttatggttttttgaaattttattgtctccatctcaaggctaagctaatgaaagtagtaacacaaaagtgcataacctggtaaagcttgttgagtagaagcagagcaatgtatagtaaataggaataggatttacgtcgttgaagcaaaatttacaaagcagagatttttccaatgttttctagagttcagagtaatcacaaagatttcacatgttcaatctcttcgaagttcgaaccctggtcctgattcatcttcatttttttttgtatccatctctagtctaaagtaatgaaagtatgaaacccttgtttatgggttcctggtacaaagagctagcaacatggtaaaacttgctcaatagaaagcaaagcagtttcgtaaaattaaaattaaaaatcttaaaagtattcaagacagtcgtgctctgttttgtagtaaagcccggttgtttaggaatgatgtcccatcactggttaatttttggttttagttcgaaaacacgatagaacctaaacaaccaaaccgattataaatatatacctcaaatagactcaaaccaagccgaagttatactggatttgtttagtcttcttcgtcaaagtcctgatcaacaatgccactgaaccggaaatttgaatctggcgtgccatcttttgatctgcatgccattcttgtagtggataatacctatttacccttaatgaattatatctattaattttaaaagaaaaatcaaaaacaaaatctaaatcgaaatcaaaataatcccgacccaacccaattaattccgacccaattcatttaattttgacatttaactccgacgagataggcgatttccaattaacttccgacatcggcaattttcgacattggctccgtcgagtctggagaaactttgttaggtcagctaatccaattctccggccgtcgatttctccggtgctgcatgctacgtgagttgatactgttggatcgaattctttatcgatctttgctgcggctactctggaaacgatccttctttagttcgtccatctcctgtaagtattatagttagtacaatgtaattgaattgaatcaatgtgtagcagaatcaaaccaaatttgcagaatacaatgaatgttcgaactgaaattgaatcagacactggtacatctcgtggttcaactggtactaatatattgtttatatttgtaggaggcgatgaagaagaggatccagacgaacctacactttgactatggagagtactatacagcagaccatgagtggagttgcaaaaattcagtatacggtatagtgtttaaaacatcatcgttggagagaataacatatgcggatttaatagataacatctttagaaagattgctctaggtggacagaaaaggaatctgaaattgagttacaagatatctaaagcatggagagagtcttatattgtagataatgaggatgtgttgatatatttaacgtcattggataaagagggacttagacctgttttgcatgtagagttatgcagtgatttggaaagtaataataggctagttccaatagtagagcgaagaagttcatgcggtgtgaattatggggaattggctgccaatgttgtaatggttgcggatgcaaatacatgaattctgagtactaatgaacctattattgaactagaggaacagagtgagacagttagtgaacctattattgaactagaggatcagcgtgagacagttagtgaacctatgatgctagagaatggagttactgaaactgttattgaaccgttgatgctagagtgtggggttaatgaagattctgataatgattatgttagggaaaatatgttcatcttgcacgtccggtacaagaaagtgtggctgccgttgtcaaagaatgggaagatggtattggtgatttagtaggtcaagaatttcgttctaaggaggcagtatgggatttgattaatagagcttcaaaagaggaagtgtttggtgtgaaaactattaaatctgacccgggccgtcttatgttagaatgcagtcaagcatcattgggttgtgattggtatttaagagttacaaatacttcgagcacagatttttggtgtgtgaagaaacacacacaaatacataaatgctctcggtgtccggaggcaactagatatgaaaaactaaaaggcacatcgcaattagtagcagatgtgttgcatgaggactatccgggtcttcttaatactctgaaacctaaacaaataatgagtattggtaaaggaagacttggtttcgattgttcctactccacagctttaagagagaaaaaaaacatgttagtaatgtgcgtgggagccctgaaactagctacaagttattgtttgcttatctgcacattttaaggtctgtgaatcatgggacaataacggaagtggaattggatgcagatgacatgtttaagttcctattcatcgctttgggcgcaagcattgaaaggtttaaggcaatgaggaaagttatagtgatctatgcaacttttctgaaaaccatatatggagggatgttagttattgcaatagctcaggatcctaatcatcatcattaccccattgcgtttggtgtaattgatagcgagaatcatgctagttggaactggtttttcagaaagttgaatttcattataccggatgacccggaattggttttcataagcgacagacatggaagcatcatcaagggagtcgcggatgtgttcccgaaggcatcacatggacattgtgtatgacatttgtctcaaaacattaagaaaaaactggcaggtgacaaagaagaaggtatggccaaatttagggaattaactcatatttatactacgactgagttcaacactagatatgcagaatttaggagaaagcatcctaatgtagccacctatctggatggggcaattgggcttgagaaatgggctaggtgctatttccagggagacaagtacaacatagatactagcaactccgcagagtcaatgaacgccgtgttttcagaagtaaggaagtaccatctgttaccgatgatcgatgcgattttggagaatttttctgagtggttcaacacacatcgcaaagattccgcgtctgcatcgaacacaaggcaagtggtgcctgttgtggagaatatattacacacgcgctgtccaattggtgcaaagctaaatgcaactgaactaaacagcttctgacaagaatacaacgtaattggaaatgacggtttttcttatttggtggacttgaaaaagaatacttgttcttgctgagaatttgatattgacaagtacccgtgcgtccatgctatagctgcagccataaagcgatctaagatggattggaatagccattcaatcttgaatgtaagtatctatggtctatgctcgaagtattacttgatcgagacgtgggcattggcatattacagaacgatttatgtggtgccgcatcaggctcattggttctttcctcctgattatgtggagaaggtcgcaaaaccgccagattacactccaaaaaaaggaaggaatcaagaaacccggtttccatccaaaggtgagaagcgccgaaagaagactaataacaaagctacgcgtggcatcaacttggagaggtggttgcagcctgaaaccaatgatgattgacgttaactcgtcaactagtacaagaagttcaactacgataaagtctttgtgtgtaaatttgtgtttctcggaattgtcaaatattgttcgacaggttcaattaagaacaatcctttgtgtttagatttgtgttttcggaatttttaagcatagttaagttttttagttcaacagaattgccaaacatagttcaacaggttcaactacgaactagtcgttgtttggcaaacctagtacaacaggttcatctgggtcaactatatacacgggtggcatcacaatcaacgcgtcagttgaaatattagcagtgacaggtggcactgcgagtaccaatcgtcgcgtcgtttggaatattatttaagacaggattacaatcgattttacaccattcatatttcatcctatccaaaaaaaagagcccaccccactaataaaggaagtcgtcgtttgtcaacatggatggatatcattctgtttccgaactttgtccgactatcagtggatggactatttgcgtttttgttgtgacagtgttcaaaaagtttgtggcaccggatgagttcaaactgggcctcatattggcagatcaaacggtaatatattgcgaatatgtttaattttgtttctttcacataacttgcaagtatatagttaaaattatttggtgtagggtccccgttcccgaatcaaggctaccattcctcgtcgccttgcgtcattttactttgatcgaatacgagaatatgagtatgagtggataattatcactaatttctcggtccgaaacgacgctgagtctgtgagagcaacatcccatgactaccagatatggtttatggaacagactattgttactaaagctttgcgaacggatgcactctcgttttacaattttactcctttcgacaacatcatagagaagacagttaacaagaatgtgttggtcggtgagttttttttgacaattttatagtattttctttgagaaattgtacgaatacttacttctattattatacacaagatgcggtaggtgcgattatttggattggccgattgatcgaaggcatcgacgtttgaagtttcctttcaagataatgaatcaacagtaagtgcctccatcttcacttattataatgaaacttggttactattttgggattagttcaaatggttcaaatgatatagtttaaatggttcacctattttagttcacatggtgcacctattctagttcaaatggttcaaatgctttagttcacatgttcacctactctagttcaaatggttcaaattgctatagttcacatggtgaacctactctaattcaaatggttcaaattgctatagttcacatggttcacttggtctatttagatggttcaattgctatagttcaaatgcttcagcagacctggttcagatggtcatgttcataatttctgatcaagtaaataatttctatgaactggagcaatgaagttctctattgtgaagcacacaatcaacaagctttggactttcaagctcacttcggagtctttgtaatccggcaattgtggctgtactcgtttgctggcgtgtgagcggtcattctaaaccgaagcttgtgagtcatggccccgtgtcgaaggtgttaggtaatctggaaattccggaagttgatgaaatttataatgtagtattttagtatttgggtactttgtattattcgtataaacgaagaaatttgttatctgactttattattttaactaataacaagtctttctatgtacatttgtaattcccggaatcggtaagcctagtacaacaagttcagctcgttcaactataatcacttattaaaatgtgtttaacgattttataatatgtagaaacgtttgaagtttactagtagctcaacaaaaaatctactattactattaaagtttcattgataaattttttttataaaaattgaaatcgtagtatgtgttcacataaacaacctcttatatgataaggagtagttactatgagatcacctcaaatgaagtgaattacgtgaatatggtcttatatcaaatatgattctgccaaaactttgaatatgaaaaataaatcacagttaggttgggttcgacatacttatcaagtatgtacattaagttcagctgcaatatatgaaaacagtgaaaagtacatctatgtgtatgatagttcagcaatacaactatgtgtaaaattccagctgatgagcttgataattccagctggcataccgcataattccagctggcataccgtatatcaactcaagaaataaatgtctggatttatcaactcaagttagattttggtgggtccctatgtttaaaatatttttttttaatggtagggttttgaggattttcatctatatttaatcatttacttgtgtgaaaaatcgaaaattcgagaaaaccctctgctgaagaagacggcggcgattctttagcggcgacaagtattttccggcgacaagatttttccggcaaacgacgtcatttcttcacaaggttaggtcttttctattaaagatctagggtttatgtggtttattttagtcaagatctagggtttatttaagccaagatctagggtttagtcaagtatttgatagttttctattttgtatttgacagacatgcctatctcttttaacggaagctccgactcctctcctagtgagaaatctgacggtttcgactactacaatgcaatacgcgacgggaattggggcattccgactaagtgctacggtggaagagacgttgaaaagggtaatgtggttggtggcaatcaccacgggaaaacaagattccgatgtccactaaatctgaccgaggtggatggagaacacttgcataagtggtgggaggaagccactgaagagaagttttcgaagtactgtagccggaaggacaagcgagaagaaggacctcctgcttggcaagttccgatgttcgagcccatccacgagaagatacgcattatgaatgaccggatcactgagcttgagacccaattattcaaggaattacgatcaatccggactgctattagtatcctccgagctagaggagggcgtggttctcgttgaaccatgtatgaaccatgtgaaccacgttgttttcattatgcaagtatttacttttgaaccatgtgaaccactttgttttaattatgcaagtatttatgtatgaaccttgtgaaccactttgttttaattatgcaagtatttatgatttattacgatgtgcaaccaaaatatacagttaaataggataatgtgatgaaagatgaaccatttgaactaaactgttttgaaccagatgaaatatctctatttcagtcgaaccaatgaaataacattacaaagtcacaaatcaaaagcattataaaatcaaggaataataaggtcaaaaatccgacattgcaaagtcattacaagatattaaagatctaatacaacattacaaattcatgtttctttttattaccaaacattacgtaaacaatggcaatggtgatcaagcaaagccacacaaaacacattgttaagcaaactttccacttgcggaattcctttttccccaattctgcttcttctttcagttcttataacatcgcatgtagctctttcgcctcagatttgattttgttaagctcatttgcaatgattccaaaattttctaaagcatcttcgacctcttcttgcacagcatcctcaacccactcaaacaaatgaccctattgcacaacccacaaaccaaatccgacaagtttagcaaaccaaatccgacaagtttagcaactacacaaatacacaatataaacaccagctctacttacatctcttttgtttgtccacgtattcagatctcttttggttttacaccggaaaaaggtcttccgggattgtcttgactcttggatgtgaagatcgtcacatctgctccacacgcacatttcaccggaaaaccacagctccgtcaacaccagatgacattgacactgagcttgaactcatcggagtagttagagaagggatttcgaatttttgcaattcggaactggaattcgaatttttcgatttagggatttcaatcgtttttgctttttcgaattttgaattatgaattatacataaagcggcctctattttttgaaatttattggattttgttttgtaatttagaagcccattaaagatggcaaaaggcccaaaacgaatacttattttagggatgctaaaagcccatagtaaacgaaaggcccaagcccagcccatttacttaatcgttcggcgtcaaagttcagatgggacagccgaagagtcacgtctattcaatttactcgtctgcttttaatttacacgaaaccagagaattcaagaaattgaactgttccccggtgaactacatggatcatcgccggagcattcagtgagtgagaatgtcggcgccttcctctcctgcgtctctgactccaacatcaccggattgttcttctccaccaccacctgagtggttagttgacatcggtatgatccgcctagagttgggggttccgcttcaccgtgtaatcccccctggagcagtggagccaacagtaccatggatgaggtctcctttaccaggatatatggggccggattttgttccagccccaagagatttcgtcccaagtgaagttatttggcccgaaaagttttttggtcaaacgaatctatttccggagatgcatgaagcatgtcaaatgttcattcaaaaggtaaatgtaagaatagtgtttcgttgttgccaatgtggtttggtttagggtttaatcaaatttcaggtttagggtttagttgtgttgattgttcgttatattaggtgaatcatatagtggtggtatagttgtattgatggatatttagcgagaaattgacatttatattgttggacaggtggataatcaacaccaagcttatcgaaggcgtcaccgccaactactcattaagttgcaagacctggagagaggtatgaggcggttggaggctcatccgaaagactgggtgagatacggtttcgacaaagttgctgacattccactgccactaaggagatggtgtgttgagcatgatggatcgtcaccgaattatgcgtgtttcgcggagccaattcccattaaggaggacgatgaaccagatgatggaagttactacaggagagtggatgagcctccacgcgagtatcctcctgactctctctttcaataaacattatgtctttgttttgcttaagtttgtaaaataaatctaaatctaaattgtggttttaaatctttattttgctaactatctgtgttttgaatacaatatatgaatctaaatgtttgaatataattatctgtgttttgaatgtaaattttgctaacaattatataatcagtcgaacggaggtactttattggtcgaaccatttggacaacttagtcgagccatttggactattagtcgaaccggatgaactatttgaactaatcagtcgaactggatgaactatataggtcgaaccgtttgaactaaccagtcgaacacatttgaaccatttgaactaatcagtcgaaccatttgaactaatcagtcgaaacgtctcgcacgcattcaaatcgccaacaatccttaacagaaactcttcaatgtttccatcattctttgcaccagcttttactaccttgaccaagaagtacaacagcactaacttcaacctatctgaaccatgcttcatcttcgagcacttagcaagaacatctaaaacctttatcctagattcttttttgaatatcctcgaacaaagttaatattccccattgtatttagttcttttggggaactgtggcaatcaaacccacttaacaacgcatgctctttaatggaatacctaataggtactccatttaccacaaaccaagcctcctcgagcaaatttgtcttcactatgcgtaacataagcacccacatgcctgacgattaacgttctctaccccttcttttagaattgtattcaccatttcctcctcctccagctcctccccattcccgtctttcgcttcttcgaattgttgaatgacagcgtcaattagaggtttcaaagatgtacctgtctgatcctcttcaatttcggcggttcctttaggagaagcctcatcaccatcacgcggttcctccatagccttttcaatcttagcggtttcttttgtagtatcattcgccgcaacatctcgtgctgctggttcggtcggaaccaagtcgacggcatctccgtcgttctcaatttctgaagtaactggttctgatgtcgaaactttaccggacggcttgtccgtcgaagtaactggttctgatgtcgaaacttcaccggacggcttctctgtcgaatcatatacagggccacctttaccgtctccggcggcatctccgtcgttttcaatttctgaaggaactggttctgatgtcgaaacttcaccggacgacttctccgtcgaatcatatacagggccatcaataccgtctctaacacgagtcatcaaactattacacgaatcaagaattcgtcggaaaattgtgaaaggcgagaaattatgaatttgattttggaaaatttgaattgaatgagagtagaaacggtttgattttagaaattagggatttcgcttaagtgtttggaatgggttttgggttgctaggcatggatcttaattggatcggatattttgttgggtcgtctgagtttttggtcttttgccaattatttggattttctctcatttatctttaattcgacaaaaattgggaattagaagagtggcattcctggttactttttcgcagatagtggcactccagacatttgaacttttatcacttatgccacttttttgaaaaaactgatctggactgccatcagttaatctgaatgccaccgaaaatgtgatataccagttgtacccttaatgagttgattaaaaaaatgaaaaagaaattcaaaagctaaataaagaaaatcgagttcggagattctcctcttcgtcgtcgtgttcttcttctttggtcgacgttcatcttcttcgttggccaccatcgatttcctcatgccgccgacttgaaatccggcgtaaaagccacgaattaggtcagtttcttctcatatttcctttgacattggtgcattgtgattttagattgggattttgaattctatataattcccagctcgattcaatttgatagtttgatgattggtttgcaaagtaaagagtaatcgattagaggttgccgaaacgttatttgaggtgatgagcaaaggaatgtaggttgaatgtgagttgaatttgaattccgagatttcatattaaagatttggggggtttgtgtttgcaaagtttagattaaccaattagtttaacgaataggtatgtattaacattggaaatcaattgaaaggtaacgaattaggttcagtagaatcgagtgcgacgagagattgatttcaacgtatgataagagtacatgtggtataactattaaaatgtttgattggagttgaactggttgtattttcaggagcgatgaagaagaagatccacactaaggtacattttgactttggaggatactattctgaagtgaatgagtggattggtaaaaattcactatatgctatatcgtttaagacgagtagtttggagaagattagctattcgatgttagttgacaagatcatgaagaaggttgcgattgatgaagcttctgtcaagttgaaactgagttacaatctgtctaaagttaggagagagacatatattgtagatgatgaggatgtcttcatatttttaacagaatctgatgaagagagtcggattcctgttttgcatgtggaggaattaaatggtataggagttgagaggagagaggaaatttctgtaccggagcgtcgaagttcagttggtgtaaatgtaatagaggatgatgttttaaatgaagtatgtgagatggtgcatgatggatatgataatgatgtgaatgattgtgagaatgtagtaggtacggagatcgtggctgtcgaaaggccgatggaaaggccggtgaattctgttgaggaagaagatgaggatgataggattgattatgatgatattcacgatattccacgaagtgtagaagttactccgcaggttatagaatgggatgatggtacgggtattgaaattggtcaagaattttgttcaagggaggctgtgtgggaattggttaacagagctgcaaagaaagaagtttttggagtctatactattaagtcagacccgttgagacttatgctacgatgccgccaagcttctaaagggtgtacttggtatctaagagttgcgagaactaagaaatctcatttttggagtgttagaatgcatagaaagatgcatacatgctctcggagtgttgagactacaagcaatagtatacagcgaggcacaccaagattaatagcatcggttttgcattgtgattatcccggaaatttagagaccccaactccaaaaaacattatgtcgattgtaagaggaagacttggggtgcattgttcatactccactgccttaagaggcaaaatgctacatgttagtgatgtgcgagggactccggaaagaagctacacgatgttattttcttatctttacatgttagagaaggtaaatccagggacagtaacttatgtggagttggaaggagagaaaaagttcaagtacctcttcattgcattaggcgcttgcattgaaggttttagggcaatgcggaaagtgatagttgtggatgcaactcatcttaaaactgtgtatggtgggatgttggttattgcaacagcacaagatcctaatcatcatcattatccacttgcgtttggaatcattgatagcgagaaggatgtaagttggatttggttcttagaaaacctgaaaactgtatattcggatgttcccggattggtctttattagtgataggcatcaaagcataaagaaggctgtcaagacggtgtacccgaatgcgcttcatgcagcttgtatatggcatttgtgtcaaaacatgagagatcgtgtgaaaattgacaaggatggagctgctgtcaagttcagggattgtgctcatgcatatactgagagtgagttcgagaaagagtttggtcattttacaagtttatggcctaaagctgctgactttcttgtgaaagtagggtttgagaaatggtcgaggtgccattttaaaggagacaagtataacattgacactagtaattctgcggagtccattaatggtgtgtttaaaaaagcgagaaaatatcacttgttaccaatgattgatgtgatgatttctaagttttctgaatggttcaacgagcataggcaagcttcaggttcttgtccaatcacagcacaagttgtgcctactgtggagaacatattgcacattagatgtcaagttgcagccaaattaactgtgtttgagcttaacagttacaaccaagaatacaacgtgattgatctcaactcggtaagttttctggtggatttgaaaatgaaaagttgttcatgcaaacgttttgatatagacaagatcccgtgtgtccatgctatggccgcagcaaggcacctcgcccgcaaggaagggagaaatgcgaatacaaccatctacggactctgctctgtgtattacttgatagatagttggtcattggcctattaccggacgttgtatgtagtcccacatgagtcggtttgggttcttcctgcccatattaaagagttagttgcctttccgccggaatacacaccaaaaggaccaggacgaaatcaagagaagcggtttccatcagctggtgaagcgcgaaagaggagaaaatcgcaacctagaataaacttggaggcttggctgcagcctgaggaagattaagtctgatgcagaaagggttcaaccagaacaacctggccaactgcagaaagggttcaaccaatacaactaagttcatttgtatttgcattatattatttgtaagtgtgatgtactatgttttatgttttcgtatttgtattgaattctttgcaagtttattgaattctttgcaagtttattgaattatttgcaagtttaatgtatttttttaagttcaactgagacaactgatatatgtatctgtattttaggattaataaaatgataaaataattctcaatattttcagctattatcaacatctaaacattgaataaatccaaaatatgatattacaacattgttattaataaacttgatcataaactggtttcctaataaatcacctatgtatgacaaggaacatatagttcatgattgtccaatatacatacgttatgtatgaaaacagatatttactaaatatgattctatcaaaacttattaaaatccattaatatgttaaaacttatgggaccaactaaaaaaatgagttggtttttcagattcaacttcaaaaacacaaaatttagaatagttcaactgtttgtgattccggccaactgtacatatacatacaactatgtgtattctgaatattctaataaataatttttttaaaaaatagatcccacgaagtcgcgttcacactacgattattgcgttcacactacaaagtttctacctatttattctctctctctcttctatttcacttctctcgttcttctctcttcttcacttctctcctcagatcgtcctcaaagctcctcagctcgtcttcaagctcttcccatcacagcgaccatctcctcgcctagctgtcaacaaccaaggtattacatgcactggagttcttcctctctctcgttcttctctcttcttctaaagggtttctagccgccgtaattagtagatatagggtttcttacgggtttttagccgccgtaattagtagatctagggtttcttacgggtttctagccgctgtaattagtagatctagggtttatagcgttcatgattcatatctctttctttctctgttctgtagatgccctatagttactctcaaccatccacgtccgaagctagttggaatagtggagaggcgaatgccgatgcaaattggggggttccagaaaaatgtttttgtggtaagcctgtaaaacttgaagtgtgcaaaactggttacaggcaaggcgacagagtctacaaatgcccaatgcttaaagtaagttattgtgttttcatttcattggaacaacaaagtacaagtgaattatatttatgaagtcttctctctttcgcaggatgaagagtacgagtcccgaaaccaccttattcagtggtgggatcaggcggtaactgaggagcttgagaaggtaaatcacaaacttgattccgcactaagacatggacaactagcatgcaatcatgctttggagtccatccgggaaactattcaactcatgcaaggtgaaattgaaacccttaaagaaaggttactcgccaaaaaagtcgagattgataggcttagggcattactttctacatggtgattatgatgtgttttatgttattgaggatggtgtatggcatttgaacctaaatatgttactcttgtattttaagttatgtgtattgaccggccaactgggacaacttagctactcttgtattttaagttgtgtacgaaaatgttgatacacgaatcacagctagacgaggagtcgtacgaaaattttaaggtaggtagatgtgcgacgagctggatagagaggcgaattggacaaaccgagttgtctgctgaaggtatagacgagctgggcgacgagataggtggactatgcagtcaatggacgaactgccgctaggcgaggaggtagatgagttttgtagtcgagggatgagctgatagctagacgaggagtcggacgagctgactagctgacagctaggcgaggagatggtcgctgtgatgggaagagcttgaagacgagctgaggagctttgaggacgatctgaggagcttgaggacgagctaaggagcttgaggacgagctaaggagtttgaagaactgacgagctactctctctgggtgtcccggccaactgggtcaacttagctactcttgtattttaagttatgtgtatcgaccggccaactgggacaacttagctactcttgtattattgaccggccaaccgggacaacttagccaaacgttttgattttaataaaatcctaaaacacataaaccattacagaaaataagtttgtcctctacacataaactacgcataacattcccaaatacacaaaaagaaagtcctatttctccaaacacctaagagtccacacacacacataagcaagaaagaaaagtcaaagtctcttcctcgtttgcttcccctcagctgtaaactcttcccccttatacttggaaggtttccttccacgttttttcccagattccagagtaggaccaacatgctttctcttcttcttcgatatctgcttcttcttcttcttcttcttatcctcttcatcggactcatcgctgccatcacctacaaaaatatgtaaccaaacatgtaagaactattgtgaaagcatcactacacaaaagttcaacaaaaactcacttagagactcaatagttggaggtgctgggtcacggattccactgtgaataaccaaggccttgctctgagtatcccttggctgataagacggtggcacaaaatcagcagctgaaccaggacgcatatcttcatatttgtctttctctgcctctttctcaagctgatctgccacatattcctctattccttgtactctcacacaaatccgcttgatttcgctatccatcacagcaagcttgtccgtgagcttgtcaaatcctctctccatagcttccttgaacgagagaatcgatgtcccagggatttcaggttcaggtacagctggaacatcatcaacagtttcaatacgtctaccatcaatgtctgcttggtagagactacgccagaaaatcttctttttctctacgataagcctctctctccaactatcaacaattggatcgatatatccaataccatcatcaacatgcttctctacaacgcgtgacaacatttttctctcatccatatcaggttccaagatgcttgaaatatcctgtcaagtaaacatatatttcaaacaccacaaagattataaacatagatttcaagagaacaaagctaaccgttatatctccaagtgcttcatttatttcttccaaagtaaatcccttcatgcaactttcactgaacttgtgcttgcacattcttggacattccttgtctgcacgtacagcttctctaaatctcttcccaagctgcggaatgcactcaaatgccagaatctagacacaaaaacataaaagtaaatgaaagttcacaataacaaaatctagccactcatataatttactcgactacttacctcaagtggagtaataaatccataaaaagcagtctgtgccttgggtttcaccacacctttcatgttcttcattactctccgcaccccttccatacactgctcaaaggaaaaacgtccccacgggaatgtctcacaagctctgacattatccacaatcctaagcaaaaactcctctatcttcgaatcccctttagaatcagctttcataaccttagctaagaataacagaattgccaacttcaacctagcagtagacttctcactcttaaactcttccagcttctcttccacgtctttaatcttgatgtcctcagtcctcttaaacaacttctccacaaacttcaaactgcctaaagtcttatagttttttgggtactcacggcagttcaaaccggtcaacaatgcatgctctctaattgagtaccttataggtactccattgacaacaaaccaacactctctctccaattctgtcttagccgtgcgaaccataagcatccacatgccttgaatcatgtgattgggctccttaggcatgtggaatatgtgcttaaattggtcatgattcctaaaccacttcagttctgcatccaaagtctctataaattccactgtttgtaccaactgacacctcgttcctatcttacacaccttcgtgtaggtagttggatcaaagtacataacttctggcggcaatggttgattatcatcatcatcatcatcatcatcctgcatattctgcggctgaagatcatcatcaccatcctgcatattctgcggcaggttatcatcatcaccatcatcctgcatattcaattcaaaatactttcaatttcacattaactacctagttgtactacttgttcctgaatgaccattcacaaatttacgacctagttgtactacttgttttatctgaagcaccattcacaaatccaatcatttaccaatgcatgcataatatcctaaaacgagcctaatcaaaaaaaataacggtcttctatcataccttatttgctccatcatcatgttgaacaactgcattcgttgcctcttcttcttctgcacaagaatcggcatttgggtctgaaagatcgtcatttgattcccatgcgacggcgtttgaattacccaaatcggcggcgtcacaatcgccggttgtaggctgaatttctccggcttcctcttctgttgtaaaaagctctgcgccttcttcatctcttcggggaatctcggcggcggtctcgtcgactgatggaggaatttcgccggtcgattcaaccctagttgattcatattctccagatgagtcttttactctagccattggaaaataaatttgcggatatgaaagagacaaagacgaacgaaaacggagaagaaagaagaatagaagagattgatttttccggtgaaagtggtatcgtcggagacgagagaagacgacgacggagagaagaggaagaagtcgagaagtgaaaagggggaacttaggtttttacttaggttttttctgtaaataatacaactgggccgagtatttacattttttttttgatccgagcccaacaaattaagttttcttgtagtttttgtggtttcgcaagagtttttcgtccttttctcatttttcgatttaaataaaaatcaataataatattccaaacataagaatggcacgagtgattatttcttctccaatagtggcataagaggtgagctctccagacatttagtctcttcgtcaaccatgcgaattccacaagctcttatctcgcagggtgaaaactgaaactcctctggaaattgaagagaggattcgagtcgcaaatcttcgattttgtcggtgtttatgctactgggtacgtggatgataaccaggtgatgtgatgttacagtctcttcttcctcaatctccgatgaaagattgagatttggtgtgaggttaatcgaaattacttcatcatctttgcggttccaatcataactaaacgctgggaattggaggtagaaggacctctcgcaagaaatcaagatacaggcagcgaaactcagaagtgtcggtgtaaacaagctgatcttcgtcgatgtcccatgtgactgattatcgaaatttctgggtacttcagttcctggtaagcaaagaaatctttgtgaaacctataaaaacagaaagcgaattgttcacaagagaggattagaagaaaagaaaatagcagttaacattagcagtcaacaacgaaggtcacctcttggctacacttgtcgtttagaaattgtgtaatctgttgctcatcttgttgcaaaccgaagcaatggctaagatcgaggtgtttgattgaatgctttggggaaaggtcgacactttccagggaatcacagccgtgtgcgtagagatgcttgaggtttagtggaagctcttccactgatttgagtttcttgcagttatttaggcacagagtttccagcgataatagctcttttacacttgcacctcaaagtcgtggctgcttaggtccaagtgtattaaattgctgaaatggcttagctgttctgataatgcttggagattcttgcagttatcaagctcaagcgctagcaaacagaatctgcctacatcttgaaccgcataaggaagttccagcagagattcgaggttcgtacaaccagaaagcttgagcgtctgcaactcagtcagctctacaaatgcctcgagtttgatgcaattagagagcctcgcgtatttcaacttcgaaaggttctttgttgatgcgggtagattcctgaaatcatttccgctgaggtccactttctctagtgactgcattagaccaatgttgtctgggattttctggatgtttaagttgatcagattcaactctaccaagcactggaaacctgagaagctaatgcaacggaagggggtaccatctgcaatgtggctaaaccgcatgatgctgagagatttaagatcataaaagcttgagatgatcggaaatcttttctttggcaccattaccaattcatcagggattttttgctcggaataaaggagaggtgctctacggttcccgtgagatgccacaagccgatgtgtatcttcccttctatagataggtttgcaagagaactcagcttctttactcctctgggaagcctcaatattatttgtcggcgtcgccttagtccacgttctggaaggacagccttttctgatactgtatatggatttgaagatttattaaggcatcacagtttgataaatcgagttttctcaggcaagataagcgtccaatggactctagagttttctccaatcttgtgcagcctttcattatcaactcctcgagcagcatggtcctcgagagatctggaatttctctcagattcttagagccagtaacatctagtctcctcaactgaccaaggccctggatataagaaaaccacaaaagacggtgaaaactcagtgataaggttttaatgatctctacacccctgaattgttagctgtgcctggaagaaactgcaatttggaattcataacctctatatgcgtgaaagccttgaagaatttgagattgttgatagtgttaagaatatttccgtcgataggcaacacgtgtatcatctcacacatgtgaagtgctacaccttcaaccattgctgtatcctgatgtgagaatcgtcagagtcagttgacatgaaaacaatataagcatggccaaaaccatggagattcgaacaagaaagaacgtcatgcaaaggttttaataacacttactgtgtttttttgcagcaaaaagatgataggattaattttccacaaaattctctgtctccaaggcatgaacccggattcttgacgtacaatttctcttgccgcttgttctatcaagacatgcaatgtaatgcatccatcaagtgatatgtctatgagagacttcacttctaaagcttttatcctcatgtcaccatcatcgataagggcatttacccggtggacagagtctccattgaatagacatgcaacatgaaggaacgcagcttgctcttcctcgtctaaaccgtcatagctagtttttaaaatatccttgatacgtttttgaggaactgtttcaagaatgcccaacgccttttcccactccctctatccagggaatccgacagagatatacgccaaaagcctcaagggctgaaggaaggccttgagcaagcctagaagcacggactgagaattgatggtagacatcaaaaggaggttgccctccgtcaaaagcaacatgtttaaagactttgatagcatcattgtcatccaaaaagctaacacggtataataatctcactccaaaggagtagagtaagccaaagtctcgtgtagttatgatgattcggctccctggtccaaaccagctcgtctcttttgctagggcatgcagctggtccacattgtccacatcgtcaaggacaaggaaatttttttccttgagcttcgacttgataagtctgcatcccttctccacgctccataaggtctcttgctttttgcctcggatttcagatagaagcttttcctgcaaatatgggaggccattctttgcaaaaatcctaacgttttctatgaaacaatagtgaacaaatcggcgcgaatattcttcatagagacacttggcaatggtggttttgcctatgcctcccattccccagattccgatcatacgaacctcattctcagattcgatgctcaatagaggattcagtcgttccatgtcaacgtccattccaacaatatcggtgacaaattaaggttcatcaagctcttcttttcctgtttttcctcctgacgaaatttcttatttttgtggcaagctaaaagttcttcaagctctcaagatcacaacttttggtaaagttcccactcatgagcgtaaaagtcgtctacaaatttaaaagagaaattaaattgtgatgctaataagcaagtcaactaaaggttaaaccaaaagaaaaaagagtcaacttaaggactaaaattgttgatcagacaaatggcataaattaaccctttctaaaagaaaagggtattcaaatgagacgtgttcatattaatgattttggcccgtcactcctccggaaagtcgcagctcaagcttctgtctatttcatttggaaacaaaggaataacatggttcacaaccttcaacacatccctccgtcaatcatcttccgttgcattgatcgtgaggtgcgcaatactattacttctcgaagacataggaagcactgtaaacaacttatgctactttggatccattaatctttcctgattaactactctttatcttaatcttgtttttatttctttttgccaaggttaatttaatttaggtaatgcgtctcttgtaataccttacatttcatttctaatgatatttacattcttagcaaaaaaaaaaaaaatatattaataattttgggcagagaaatatgcattaatttagggtttaggcttagaatgaaaagaaagacgaatctttcaccaaaagcgtacatataacacgttccagtgaaaaaaaaaaaatctgaacagataatttgaaaaacctttttttaacatttatcaatttcaatgagatataagaacaaaaaataattgtgggattatgaggtgaaaccatttttgaccaatagactgcttagagcgtatatgaagaatcgaatatacttttgtaggagaaacctaaccaacaatggtttatgcttaaatgagcttattaacagaaaaatttaagattgaaattagatagcttaagagctttattaaaatgtgaagtaaaggaaagggaaagactttagtttgtcaccaagatcacaaatgattctagatttgatatatcattaaatgaaagggagagttggaaacaactctcaaagttgtttacattgattttctaaacacatatttatataaatctctattaactaaaaccctagttatatgggctaatggacttctcatatgactctatcttgggcttcatttgaatcctctaataactttcacgaatattgctacatttgttactctaacaaaaaaaaaggatacatcaaaaacaatataactaatcacttccatcggaagtcattttcatatatagtcctactaatataaaataataataagtttgaaggaaaatatgttaatcatctatttactcattagagaaaatacacattgatttagaaggacaattacaagagagagagtgtcacgaaagaaacatttgcttaaaggaataaaatacatggatgtattaagcagtgtttgttaggtataaaccaaaggttccacatcgaaaatttagaaaaagagtttctaatatataactatataagccaagaaagcccattagtgttcaccaaagcttccatctatcgtctgaaatacctaggcaattttagtctagttctagacgattttacaagatgtacataggtgattttttgatagtctaacggttttagaataaacaatatgtatatattataacttaatgaatataacataacagaaataccaaaagtttttttatttgaatgttaatttctgagtctttatcacacaaaacatcggacttctctctcttctctcacctctatttttcagagaggaagtcatcaaagtttcttcttccggcaacgacagcttttcagtgttcgttggccatcaatctatctggaatcatctagctttctcagcagggatgtccagctttccgtccggcggcgctcgtctttatggtgatgtttggccggctttttttcttacaccgtccgtttcttttaacggtggtggtcggctaccgtctggcatccgtcggcttccacaacggtggttggctggcttatgtctagagtttcatcgtccgtctacggtgtctcgtgtagattatgttttctctcttaggcttctttgtattgagtttgattggctctcttgtgtttcaattcttagatctggaattaaaattccttgaacctcctttgtttaaagggctcgttttgtttttcaagctt

SEQ ID NO: 558 - DNA, 97876 bp, Arabidopsis thaliana
aagcttttggaatgaagggctcttcaaaaacgttgtggggatcacgaatctttccaacttcttcttcgtaccgacgtaaacgacgaaatgccctctcggtgttcttgaggatgatctactctcaccagtatcttcttcttcttctctttcgtggaagtgcatgtcaatgaccttgtgcggcatagttacctatataagcttgttatatagtgacctatttgtgttgggtgtgagtcaaggacattaacggattttgtggggatctttgtgtttccactttgatttggaagttgggtacctactatatatagttgtacatacttatattttatatttctttgtcaggcttggagatgtgtgccgactagaatgcattcacttagttttcatatgttttagacacaaaattaattaatttataagaaaaaaaaactaaaatagaagctgatgcaaaaagaaaaaaaaaacttcatctccattttgtttttctttttgtttttatagaccctatcggctgattcggccgacctcggtaggaacgcaccgaagtgctaaagagtggacttcttcaaatccatgtagaattgggccaccacactgcctcattcgagtttagaatgttttccgactaatgctatggaatagtcaggctgcctggcaaacttcccaaacaaatgtgtttttgttttcagggagaatcgaacttgggtctgagagtttcacccttcaccaaagcttcctctgctaccagaccacagaggcttgggcttcatatccattttactaatttagttttcaaattgcaaatcgttttgccattcaaaaatataggttaattattgactttcaaagtgttaccatttataaatttgaatcattctcaaagtaacatcataaaacgcagaacaattgctatatctccggaacggtcctatatataaaccgtatgcatggaaatgggtaagttctttaatttgttaaatggataatgcaatatgtgtagtgactagtgagtatatgatcacgtagctaagctatagctagcttggtcctaaggataattgtgggggaacaagggacttagcaagagtctatatatgactttaatttttcaaaccattacgtatgcatgagagtgagagagagaaaataatgtgtggttaatatataatgggttcatggattgagctacgattatgtgactggagaaaagcacatggtttctgctactgctcatagaggatgatatgatccttctctccatacttctccattcacttaatttctactatccgataaggtttttacatttcctcatatatgccaaaagttgtgacgttttgaggctaaaaatcatatatactcactggtctaactaagtttgttattggttttagtgattttgcaatactattagttattcaagctttttatctatagtttttaatcaagattaataccaagagatgacttgttcatttcaaaattctagtttttgccccagatgaaactttgtatcttttgtatgtattatcaaattctgtaaaaacataattcttgattggggaactccaaaaaaaaaaaaaacttcataattaatgtaaatttcagtcaacttaaagctaaatgaaatgaaaaatatgtgaattcctctatgatccatgcaaaattgcttcaattcagaaggctcagttacagtattaatactttcattctgtggtttgatcatgcatactttctcttgtaactcatgggctactatataagaaataaatggagatcaataatgtttatactagagaatttaataccaaaatattttttttataaattcattctcccaaatttttgttctaaaaaaaaaatcaaattttttttatataaattcactctaaaaatttagatagaaaaaaactgaagtaaactatgtacataatttgtcacaacaagagtatttgttactatttttttccgtatcaaactagtgtcacaatgatacacttttttttttggagtatgtggagatatgaatataagctaggcatgaagagggttatggacgatatagatgatagatctgagccatactgttttggattatagaaatttattgattttctacgtccttcttcttcgtttttgtacggagtcggttatacataccgttcaagttttgttttgacatagacagacttaattcaatttagtgggattcattcatatttttttaatttcaaccaaaaacgttttagaataactatatgattttttctggctgatataagctttttacatagtactattaaaaaaacaagttttatcactatatatatgtttgctaaatttcatgaacatacagattaaggaccctggtccaaagtatttaaattttaatggatagactaagactaaatggagcagtaattcactaaacaaaaaaaatcaaatctacaatgagcaagtattctctcatttaaaacaccatcaaaataataaattgcattaaaaactaaaattaaagtgttcaactaactcctttagttttatattcaatatttatttaaaaaattgtaaagcaggatcaaacataggccgtgttcaaaagagagtcgccagcgattgtctcagcgacagatctaaacgacggtaagtcagccatcaataaagctaaacgacgacagcagaggcaaaacgatgacgacagaggtgtcgttggagagagagagaggtgttgcagaaagagagaagagtcactggaatttcaagcgacagctgcggcaactcaattaacactaacaacgactcattttaacaataccaccgacttattccgtatgtatttttttgtcgatgtcactcattgagcggcgaagaaaagaacatggtcatactaacaaacaatattccctacatttcataatattaaatgttttagataaaagcataaagtttaagaaagtaattaattttgagttttataaattaaaaatacaaattaatatctattaaaaataattagggttcaaaagccgtttaatataatgttttgcatagaaacttgaactgtttcttcaaaacatcatataatatgaaacataaggagtacaacataagaatatatgaaaatgcatagagattggatgaagaacaaaagaaatttacctatgttttacttgtaattcattttttgttttgcttatattttacttactttttttcttaaaaacaatattattattaacaaaatttatattttgtgtaattctagaaaaactataacgtattaacataatcgtaaacaaaatctcttattacaaatacattataagcctacactaaaatatgggattatagttttgacaaagaatgtgatttaccttttctaggaatggaacttggtattgtttttcatttttttagctggaacatagcaaaaagtaatcgaaaataaaattagagagattcttacatagaaataatcaaacaatttacaatcaaaattttaaagaaaccaagtagcatatgtggctagtcatctaattctatatactaaattaatattataatttataacaatgtaatcatttttccttaatttgatatagctattaatttttttttatagtttatagcaagtaatcatttgttacaacaatgtaatctatctaagtctaaattttccaatgaaattaaatgatataatattaatttactgtaaaaaaattgaattagacaaaaagataatcatttatttcaatttgaaaactgtattaaatttcagaaaaaggtaaaccattccaaaaacattaattcattgacaaaaagttaaagagaaaattcgctaaacaatttttaattggtttttcatcttataatttggtattaaatgtaaaatacataattttgtttatagaaataaataaactacataatttattgttgacagtgtatacatttatttagatgtgtttctatataaggtgcaaaataaagaaaatagaaaatcatatatatgaaagttggcaaactctctccatatgagtgacacatcatcacaccagtgagtgtcacatgtcattctaaattaatatcattaaaaaataacaaaacttagtgataaaaattgaaaagtttcacattgcattaaatcatccattaatctcactcttaacaaaatatctttatttataagaaaaaatacaaaaaatcatgttaatgtatcaaacactactttcattttacttttcttattttgctatttttataatagtcattacttgataatgactataattttttgtgtattacaacttagttgtttgctacttaacctttcttagtttagtaattttaacttactcttttctttttattacattttttggtttacatgatatggtttttttgtgtgtttatgataaattggtaacattaataatgacatgcatatttttaagtagtgatcttttgagacgttagatataccaaaaagttcaatatacgacgctttctctaatatggatatatgcaaaggcaaagagaaaaacctaaaactgttgacttaaaagactatttaatttaagctttcttttttctctttcatgggaaaacttttaaagtagatgagtagtttatatatttgttatttaaattatgtcaatccaatatttagccatgagcctatcatgatgtgattggaatactagattaggagagaatacatggaacaagaaattgtttgcttagaatcaagttaggcaactttcaaaccaaataagtagtataattgcataccattgtatcatattgttgatgtaagtatttcatgatagttaaaaaagtttagaaacttggatatatagataagaagatttatacatgaaaaaataataattgatatttaaatcaaaagtgaatctaactatacaaatataattacataaaatgaatataactttattaactacataataacatacacgaaaataacataaattagtaataaaaatagttaaacataattatttttaaacaaatttcaaacaacaacccacgcgtagcgtgggtactcacgtagtaaatacaaatgagcaaaatgctggaaaagtagtcgatgtgtgcacattctggatatgctttggtgtttctgtccatttgttacatggttcttggtgtaaagaagaaatcaagaaatctcttccataacaaagaacaatacatagaatatagttgatcttctcgcaggagctaagctaattggactaaaatggatgtttaaaataaaaggaaactcgtatggaagcatcaacaagtataaagcgagacttgtggctaagtggtatgtgcaaaggcatggtgtagacttcgatgaagttttttactctagtggcccgcatcgggacactatactttattattgcattggcagcctcaagcggatggaagtaaatcatcttgatgtaaaaacggcgttcttgcatggagagttaaagaagctagtgttcacttctcagctagagggtttgtgaccgaagaaagtgaaaataaggtctacagattgaacaaagcattatatggactcagaaaagggcctagggcgtggaataataagctgaacaagatctaaaggaattaagctttgtcaagtgttctaaggaaccttccttgtatcggaagcaagataaggagcatctccttcttttagctatctatgtagatgatctacttgcacatagtctagtcaaagtcaaattatcgagttcaagaaaggaataatctccaagtttgagattagtgattttggtctgctaacatactaccttggcattcaggtgtttcaacacggtgagggtataatgaaacaagaaggatatgaggaaaatattctagaagagggtgagatgaaagattataatgcagttcatacaccaatggacttgggtttgaagttgtcaatagcagaaaaggagaaaggcattgatgagaaagagtatcgaaagaatattggatgtcttaggtacttacttcatacacgaccggacctttgcttttgtgatggtgtgttgagtaagtacatgcaagaaccaaattaaaggagttacacagaggcgcactaaaacaagttattagatacttgcggggcactctttctcttggtctctcatttactcgaggatctaatcgaggattagtaggctatagtgatattagtcacaatgtagatatagatgatggtaagagtactaccggacacattttcgatgttggtaattgtccaatcacttggtatacaaagaagcaagagacggtagtgttgtgaggcagagtttatggcagccactaaagccgcaaaacagacgatttggcttcaagagcttccaggtgaagttaccagaaggacatgtgagaatgtaacactccggatcggctttagccaaaaacctggtatttcatggagggagcaagcatatacataagagataccatttgacgtgaatgcgttgagaacgagcaagtggatgtggagcatgttcccggtgatgaacaaaaggccgacattttgacaaaggtacttggaaggatcaagttcaaggagatgagagagcttattggaattcaaaatatgttgaaatgtgatttcaaacttaagggggaaaatgttggtttaagctttaacttgagtcatacgttattatttacaaaagagataatacttaggatctttaggagttatgtaaagaagtgtttgggagttatccaaatatatttctaattggacttggatttgtctagatgttctctatataagaagatgtcaagttgtgacataacttatgagttttacgagaacaagagtgatttgtaaggtttaggttttgagtaagtttcctaaatcaataaaagagagtcttgttctaagagtgttttgatcaatatttttatcgagccatcttttatcaaaccgaaatgcatgttgtacaagtctcaactctagctataagtagtttataatttgatctgatatgaaacattcaaaaaattggatatctagaaaagatatatccatatagcgaaatattgaaaatgaagaaattggatccgagacaaaatctcctaacaaacagtttcatgaaaacaattctgattttgtttctttgtgaaccatgctagagtgtgttacgtgcttttggactctgacccaattttccaaaaaaaattaattttgggtttggcctaattgggtatagcccgtttttcaactatgcaaagatattgtaaattcactattctccgatatggggaacatcgtaccaccctggcaccttcaaaccttcctcttttataaaaaaatgttctaaaacgttcaatccatcaaaagttaatagatgtgttcacttgcttttagtggttgaaaaactatcgttattattggattccactaaaaactcagagagtatgtgcatatgatcttaggttttaacctttctttctatgcttggtatttcttttgtatcactttttgaactctcagagtggactatttagcaaagagatcatggattcctagtgttgtaggttcaagttaagttttaataatacaaatcatggagaacccattgtataaaaattttacaaaccaaacctttaggtcaattcaaataattttctctaagaaaatattatacatcgatttgtttgtttgaattttgagatataaaactggtgattgattaattatgtgaagtcatacgttatacttttattttctctcttttaatcaatatttcttagttaatgttgcttcttttacacttggagtttcgtctttattttgatttataaaactgttaatcaaatacctaattaaaccattcaaagatgttattaaaataattaatatcacagttttacatttcattccatataaataagcaggaatcttattgttgttcatcaatcaaaaacaaacagagcattaagcatatatttggctatactaaggcttttttatttctcagtttctcattatgcctatcaaaaatgtgttttcactcttagtggttctatgcatcatagtttctgtaaatgctcagttacctcagtttccggctccgtttctttttccattttcgtttcaaccgattcctggaatgccaggattacctgatataacgaaatgttggtcatccgtgatggatattcctgaatgcattgcagagatttctcaatccatttttattggcaaattcagtaatttaggttctgcttgttgcaaagcatttttggacgctgaagccaactgcataccaaaaattccacttattccgcttttccctccgatgctaaaagaacaatgttcaagaattgccggtgtaactcctcctacaccgaaatagagttttaaattattattttttaaatagataattttttttccaatttatttcttacaattttagcttacgctacatgttatactccaaaaaaatatcatataaagtaaaaacatttgagaagttgtatttgggttcaatatttactcattcttcaattctaatgaataacagcttgaaacatcgattctataattaactttgtcttacaatgtttcaaaacttggaattatattagataattcccttctaaatagacagttgtgagaattaaataattttttacgagatttaaattttacatagtaatctgtattttctaaatacaaattttaatcttacacattctatagattctatataacatgcttttattgattacatataataaggtatttctcagagtacaacacaaagataagacaaagacgactgacgacatacaacatcaagaaaaagacggacgcaacggagcctctagatgcatattgttgtaaacaaattgaacgatataattgagggaaaaaaataaacttaagaaaataaaagaataaacatatttaagttattagaaaatattaaaacacatattaatatttttcaaaacaaaataaagaacttatacttctgttttgaatatatcaattttaatagaattagttcattagttcaatagtttagtatattaaataaaaaatttgaatatagaaacattatttttgactttatgtatatatttctttttcaataaggttagaaaaaatttctatttatgtttttaaatataaaaaaatttgatttgacatgtgcgaatatcttattaataaatttgacacgtgagttaataattttgaaaactcatttcttatataatgaaataagcatttgttcgagaaaaaaatattaaaaacaaacatcttctatatgatttatctcaattataaaaaatctgtttttttcagatgttaaaaaagaaaaacaattgtgtcagagttatattattttcttttcattagtataattcattaaaaaaaattaacactatcaatcttagtgtcggagttatatttcaaacatatttttgtttagaatattaatatgattattgaaagacaataaactttttttcttttgacataacacaatttacatttattgaaagacctccaagtcctttcccttcgtctcccacttctcacttcacactgtgagtctgcgactatctccaagaccaagcttcatactttatttttgcaaattccgtttctaaacgtaagttttcttatcttcgtttctatcagattactccttaattcttagtctcgaaataaaaaatttgaaatttattcgatgttatgcaaattgccgccgacataaaaaccctaatttcaatctcatttttcatctgaattacatttcttttgaattgaatgtttctgggttgtgttttggttttggtattaactgatctattagactaatccttgttcacctatcagataatattattgggctctgaaacaaatttgactcacttttgtgtgtgtgagcattgtatcttcactacaaagctctagcttgaaatgttgttgtgtaatttataagactctagtttctaacttcttatgtcaaaatcacctaagagtctttgacttggttcttgttagatcatagttcacttacttttgtctaatttggtttggtagaaactctataattcactaactaccttaggactttaaaattgtggagtttaacaggtgtgatcagtatggatgaggaggcatctcggacagcaagagagtcactagagcttgtgtttcgcatgtcaaacatcttggacacgggtttggaccggcatactttgtcagttctcatagctctttgtgatcttggtgttaaccctgaagctctagctactgttgtgaaagagcttcgtcgcgagtctatccccgattctgtcacaaccacaccatctatacactgatcaggtattgagaattttctcagtctaatgatgattgacgagtctatgcccaagtctacctctttctgttgttttcagatctaacatatcgaccggtcgaaatttatgttgcaggtatgcaatggattatacaagtattgtggttggtatgtgaatcttgttactactttttttgtatcatttaaacaaaatttgtatggatgaattataacttcttttatttgtatgaaccgttatttgaaagccaaagtagcagaatgcaaaaaaaagtatataattgtaattttatctctcaaaagctcatagaaaattcagtgatcatgtgtcactaaagcagaatgcaaaaggaatttgggatcatctgattcacaacccctggaaggtaaaaacattctatgtatccccgaagagggaaatcacactcaatcaaaatctctgcacaccaaatctccgttttacattccttagtataagtcttccaccgaactatcactctccttcctcaggccagggttttgtcaccgaaataagatacttagaggacggttcttcaagtcctctaatcgtgaacgtgcatatatcaccgcagactagtttcgagtttcagaaaccctcgctgtccaccatacgttattctttgactctaacaagcaaacagtagggcacaaaccaataattttctcgcgagaaaatcttccagtacattttgttggctcccaagtctgtgtctttgggtcgtaaacttctccataattctcagcagtgtcataatacttactgctgatgcctccaaacacagatcttaccgtcgataacattaaaacatgcttcttctcgagggacatgcatcttggggagttgacgcaaatgatgagttttacaaccaagtaaatatctgaaccaagtgatacaacagtcgaagaactaggatgttggtaaggaaagttaggaagtgaagggactggtatcagtttctggttgggagaaagggaatgtacgaaccagccaggttttttatttaagtttaagcaaacatagagacacttctccttttttcctataagggatcttgcggcctcgaggtcaggggaagctaggagtgatcggaaagtctttggagactagagatagggttggataatggcacacttctacaaagtattggaaatgtgtttttctttaagcctagagacaaaaggcctgagttttactctttcacaatggctaatacatccatagatttctgtctttaattgactctaatacttgtatttcttccgtggcctttacgccaaatcaatctgtggtaacatcggtaggaagaaaatattataatattcgtcttcacctgttaatctactcggtaagtatacggtatagtttctgcgtaatggttaaacttttagaagacaagtattaagcatatatagacaaagaaccaaagtaataagctagttatatacccacactcaatggttagcttaatgattcaccagagacgctttactcttcaaactcactcatctcacattcatcattactccacaactgtacagctgaagaatatcagtcacactgaacactctttttaactctattgtttgccaaaatcatgcatggtcacaaattcatagccgagggacatcctcagaggagttgattgcttcttcaaagcaatgagccccgacattgaaccttttggttagtacggtgttaccttttttgcggttttaccagcctggtaaggagctcgcagatgcaaagtgaatgaaagacctgcgcgagtcattttgatgaagtgaatgctcgcgctggcttgttaacaacccaacaacctggcttcttgatgcatttcccgggccaagtatgtgcgtatatcttgagtggaggaaacgaggcaaagaaacctggtggggtgagttgtaagatctttgggaaacggcgttcctgagatctgctgaactccggctaactggtataggccgggaaaatcggtttgatccattttggaagcttgtgtgggagcgagagtgggagagatacataggaactgtgtgtggctgcattgaggtggatggtaaagaagggtctactctgatggatattggtagctcatgagatgactgcaatggggttgtggaggatgatgataagagaaacgatgacgtcggggtcatgctaggagtccgagaaagaaagggtgtgtgctctgatgggggcttgtcggtactgatgcttcttgcatcgcgtttgcaaaccgggcaaaaggatttcctctggccaagccacaagtctacacaagcaacatgaaattctgccaagacaacaagaagaaccaattaagaatggttatgcatgaatttttttttacttcgaactgagtcaaagtacttactgtgatggcaaggtaggatccttagcttgtcccctttctcataattctcaaggcatatgcagcacaatatagatgtagttgcttcatcacaaataccgttaaatatggtagtaggcatacgtattatcatgcttttgggcatacgatgaaagtcattgccattaagagccagaatacgccgacgcctaactcgatgcctacggacaaagaagcaagtagcgagcacagccgacatggcgaggagagatatgaaagaaatagccatgattgaccatgctgaagtctcgaaacttggcatgagccacacttcaaaatcggtacgacccgcatactctttaagtacttccccagttgctttggagacaaacgtaccataaataagtacaccagaggggtttcctgccactacattagattcacaagatcattaacaactaatgtatgtaaccaaagtctcaagcaacaaatcaaaacaagaaacaatacaaagcctacgacaaaataacgaaaaaaggcgagggaaagaagtgtttacttgatactaagaacccaaaatcttcatagtcataaacaatagcagctttataaccagccttttgagcattcctaatcttatcttcgaaactacaaccaccgcggataatcaacacatacggaggagacacagtagttccatttttcacattcaccgtattcaccaaatccgaacaagcatcgagtggctctgctacatacaacacaccgccttgatccgatctcttaatcatcggagctgaaaaaacagtaaatcaatcaccattaccatcaaagccaatgaacaaaaatctgataacaacccaatttctcaaatctgatttagaacaaaccataacttgaaaaagacaacaaagtttcaaactttctctataaacgatcaaacccaaataacaaaagctgaacaaattcaaaacccaatttctcaattctaatttggaacatttcaaacaaacaataacttgaaaaaggaaacaaagtttcaaactttctctatatacaatcaaacccaaataacaaaagctgaacaaattcaaaacccaatttctcaattctaatttggaacatttcaaacaaacaataacttgaaaaaggaaacaaagtttcaaactttatatataaacgatcaaacccaaatctgctattaaggccaaagattccacaatttcgttccattacagtaatcgatggaacagtgacaaagaacttactgaaagtggcttcgacgtcgtcgaaggagagagatgtgctgttaccgatcaacagaacttttgcagaaaccaagtgtgaaattagtaacagagataaaattacaatcgaagaacggatcatgttttctaaagctttaaaggaatcgaagtaacccaaaaatgaatatttgtatcggaagagaaaagaagcaaattggaagaagaaattgaaaaagtattttagggttttaatggaagattataaacacttgagcttccatagaaggcgagttaagagaccagagactatgaagagaatatctagaattgttcagaataattattttttgtttttattttggtttacagcagttaactttggaattattgcgaaatgtacccaaaacatttgttttctgctaaaaaggaccttaaaataattttcacatgaaaaacaaaatattttgctttgcccaaacaaaaaaaaaagtattacatattgctgattttgggaaaacatttgtccagtcatgtgtgtcaaataaataaatttccgattatgaattatggatggctaattagttcaagatttaaatagtaatacagtaatctggtgaaatattacaaataagttgactaacataatagctaaatatttttttctatatgtaattgtgagcaattgtggaccacaaaatctgaaacgagaaaattatttgacgtttaatattttaatactattaataaaataaattaatatgattttcaagtttgtcaaagattcaatgttttaacaagtaaaattgaattattcttctttgaatttgtttaagattttaaggaaattactggagtaatagattattaagcatatgcatcataaaaataaacttgtccacgtccggaaggattacccgccaatccccatcccaaatttctaggaccatggtccatactccatactcatatctcttggaataattatccattgaaaacacctagtttgttttattccaatataacgaaaaacgtgttaaatataagaggatatatccaaattatccattattttatttttaattagtatatcaaattttgcaatatcaaatttcttaaaaaaaacaaatgttatcattattagtttactacccctatagtttctatggatctggtatcaaagcatattaaatggaagacaattagtatccactgcaccgacataaattgaactcagattaagtgatgcaactagttggatagagtccattgaccattctgtcaacttgaatggttatcttactaacttcgctctcctttgagaaccattgaaaaagataaaatatttgtcaatgagaccattgtctttgacaaacttatatcaaccatcttagaaagttatagccttatagtctcgtcttggcttattgtccatttgaccagtccaaatgactatttatggctttcgaagaacaatagtcttaggaagaaattttgtatagtatttattttattatatgcttttgaaataatttacgaaatgataatcatcatatatcatatatgaaaggtggctaactttctccatatgggtgacatatcatcacacaaaaaaatgacatgtatcattgaatattgattaaataaaaaatcagcaaaattaattgagagaaaatcaaaagtctcatattgtgttaaatcctccattaattcattttttaaatgattttttcaaaataaaaataaaattataaaattatttatttaaataaatcaattagtacttttattttacttttattatttcttattttttaaaaaatttaatggtcaatggtcatcactctataatgactaaatagttatttgtgttgtagtttagttgtttgctacctaatagtttatttattttaccttgattttttattattattacgttatggttcatattgtatcatatgaaattctgtcttttcatttttatatcttatggtaatttcgtaacattgacattcaacattttcaagtaatagtcttttgagacgttagacatactatgaaatttaaaataaatccatttgtcttatatggctatatgcaatagcataaaatctaaaaagtgttactaaaataactctttaatttttgcttctttctttcatacgaaaattcttgaaataaaaataccttatattcttgttgtgatatattcatgataatgaacagattttagaattttggatataaaaataatcagattatacatgaaagtatatagaaattaatatttagagtcaaaaatgaatataacaataaaaaatgcaagtacataagatgaatctaattttactaagtataaaataacaaacaaaacataaattagtaacaaaaataattaacatatttttatctaaacaattttcaaaacaaacccacgcgtaccgtgggaattcatctagtatttatgaaagttggttaacttttcatgtgaatgatacatcatcattttagcatttatcacatgttctctaaatagtaaatgtaaataatggttaattatacatattatttaattttacatatttaattgtatcaatattaatatttaaaattattttattagttttctcatgctctaggattttctgctaatttttataattttaacttaaaatatggaataaataatagtatattgaattagctaatagttcgagtaggttattcttcagaatttttaaaaagagtatgtgagtagctccactatcaaatttttgaggtttgtataattataacattataatttataaaattgctatagcacaaaaattgtttaaagattgtgtgagtgatacattgttgaaaatattgttaagaatgtattgctaaagatatttatagcaattcacgggcttggtatttggagctcaataattatctcatcaaatccagttttagaaactaagtgtctgaatgcattatttccttatttgtacatacaaaatgttataccatcctctattcattggtctatgttaatgacataatcatcacatgaaacaatttggatgcatttgaaaatattttacaaaatctagctatcagttttcacttaaagacttgggtgagtaaatattgaagaataacttacaaattgattctatcaatcacaaatcgcaaacctgaatgctttcggttgaacaaatctcgtgcagttactagtgttcctcctctaccaaaatgaccaagatgatatagcatcctacgatatgaactaagaaacccagtcttggtgggatatccgaaatcaacaagatagtacttcccactaggcggatgtgggaaaaaggttcattcctcgcacaatgattcaaaacttttgtatcatgtgctctacaagatatactgacatatgcatatatgaatttcatatcgaagttacatatagcaagaacattcattatatgttctatctttctatatttatatttttctacagattgacttagacggcgaaccgggacataagttccatcaagtgctccaacacaatctctaaaaacaggccaatatcaatcatcattcttctaaacagggtttactctcgtaaattcaccttcttgtggctttagtgtatccactacaaactttaaaagagcactcaaaacatcatcaatcttttttttttttaccgtattcaatgaccgttgatatcttgtaactatatctcaaacagttttatcctgaccaaccacctcgaaaagtattagtgatttctacctatatagtgaagaagaccgtaagtattagttccaaacatttagacccattatatagaaacagacatagaatttggaaattttgaataaaccgatcaagctgagagtaactaagagaacacaaataaataagaaactcaaaatatttaagagatttcagtcagtgaataacgaaagtacctcggagtagagattcaacgttgtattagaagtaaccaacgacgggagatctagttgagctcaagtcaccggataatatttcgcaagattgcggcggcggagagagattggtttcaaagagtttgagatcgatgagtgtaagagagaaatgatgaaaaagaagtagaagaaatagagttaggtttgtttgtagtttctcaaacataataagggtataattgtcatttatcatatataatacaacttttaagcgttgaccgcagcattatgccgcacttacttgcatctgccgctgttgcagcaacctagataatcaaacgaacatcttattaaaaaaaaacagaagctgaaagcccaagcttatttaaagatgggccaataggggcctgcataaagttccaattttatttagaaaatatctatttaacatcatttatgaataaagtgtcctccgatgctatttgggtttggttaaagatggattttggaggttttccaaatgatgtcagattttgaagatgaacaatgaaataaatatatctaaagcttatacatctaggtctcttacccaacggcgatgaaataaagaatacatgtactaaaacgacgcatgcaaaataatacctgaaattttctttctacgttggaactcattgcaaaagatgaggaatattgcatagccatggattggatagagccataaagaatcggtacacattgcttttcatattttaatatcgttaaggcgtaatgtaataagtattagaaatggatttttaaaagtatttagatagttcgggtttaaattttattttattgctgattggactttgttttacaattatagagaaataattttgtgttaaattatagtattatacgacattcacacaattacatttacattaacatgtaccacgtctattttataatattgctccaaaacgaaagagtggtcttcacgacgagcgaggtttaaaatttgtagtcgtgcattgcaaaaagctgcgaaaaccgtgtgaactctcaaccaaaccaaatatgatatgaagaaattggttcttgtccattcggtggttagtgtgcatgcatgtcggtgaattttatatgttttccatttacgaccttttctctttatatcatatagatttttaggggaaaaaaaaatcatatagatttttaaaaaatcatgttcccaattaagacataatgtttagtagccaaattgagaaccaaccttttttctgtttattaaataatttaagtggatggattttacacatatattttaatgtcttacataaataaaatatcatgttattttttttgataatatcatgttttattgataaaatccatacatacttgatacttgcaaaaaatatcatgcacaaatttatctctataaatggttatctaccttttttttttttttttttttgaacacaatttacctaataatcttaataaatataagagaaatgtaacgcatacttttgttggacattgtttttggtcgagtctgattggttttttgttcagatctatcggatttatgtatttaagatctaataaacaaattataaaaaatttgattcgatttggttatcgattttattaataatgttaatataatccgacttactttggttagaaaaattaattcaaaagtaacaacaaaaaaaaattggataacaaaaccatctaaaatcctgctaattaattcacatctaataaccgaatccgaacctaaatgaccaaaccatttgtgtaaaaatctcaagcctagtccctatatttcaatagatttttttcttttttttttggtcaagatcaatagatttttttcatcaattcaatttattgcaaatttgcaataatagttggtaaatactataaatgtaaatggtcacgggataacaaaagagcaataataatataataattgcataagacgagtcaacatgaccaagaaacattgaagggttcgtaacttcgtatcatcttcctcctcctcctttgataaacaccaaaaaaaggcagagactttcgaaatcaagaacaatggagaaaccaaaccctagaagaccctcaaacagtgttcttccatacgaaacaccaagattaagagatcactatctcctcggcaaaaagctaggccaaggccaatttggaacaacctatctctgtacagagaaatcatcatcagctaattacgcttgcaaatcaatcccaaaacgtaagcttgtatgtcgtgaagactacgaagatgtatggcgtgagattcagatcatgcatcatctctctgagcatcctaatgttgttagaatcaagggtacttatgaagactctgtttttgttcacattgttatggaagtttgtgaaggtggtgagctttttgatcggattgtttctaaagggtgttttagtgaacgtgaagctgctaagttgattaagactattcttggtgttgttgaggcttgtcattctcttggtgttatgcatagagatcttaagcctgagaatttcttgtttgatagtcccagtgatgatgctaagcttaaagctacagactttggtttgtctgtcttctacaagccaggttcgttgttgattcttctcttttgattggaatcttatggtttttgtctttgttggttggttcaaggaaatgttttgatttggtttcttgattcggatttgctgcttgagcattgttagggaaagattgaattttgttatatctggttttgacatttagttgatatatatggatgtgttgattgtgcaaggttttgttatatatgtaacatatgcttatggttatgaagcgatcttatcagattttattcgattcattgtctagattatgttgagaaatgtcttgtttggtgttgaaaatcggtttcatgatatgttatctgtagaatcatttgttgaatggtcatttccaatttgctgcttgagcattgttagagaaccaataattttctgtggctagatctttctgaatcttttcttgcaagatttacatagttttgttgtgttacttatgcttatgtaatgatgctatcagagctacattgtgtccgactaatttcagtgcttaacaaaattttcaattgtgtgggtttgcatcttcagggcagtatctgtatgatgtagttggaagtccgtattatgttgcacctgaggttctgaagaaatgttatggaccagagatagacgtgtggagcgccggtgttatcttgtacatcttactaagtggggttcctcctttttgggcaggtaagtttgtgaaagctagtaccgttgttactactgaatcaagtatattgcttatgtgatttaagcatccatgagtaatttgtttgcagaaaccgagtcaggaatctttaggcagatattgcaagggaagatagattttaaatctgatccgtggcctactatctcagaaggtgctaaagatttgatttacaaaatgctcgataggagccccaagaaacgtatttctgcacatgaagcattgtgtaagttgttacttatgattgttttcctctctgctacatgtattttgttgttcatttctgtaagatataagaattgagttttcctctgatgatattattaggtcacccttggattgttgatgaacatgctgcaccagacaagcctctcgacccagcagtcttgtcgcgacttaagcagttctcgcaaatgaataaaatcaagaaaatggccttacgagtaagaaagttgtagccctttagtctccactctcattgcttattttcaagaactgatttccctgttaggaagatcgactaagataacacattttaagaactattttcaggaaatgaataaacttaagtaaatggccttataagttggaaagctatagttctttaaactctcaatgccattgcttatattcaagaactgatttcccggtttaggtaatcgcggagagactctcggaggaagagattggtggtctgaaggaattgttcaaaatgatagatacagacaacagtggaacaatcacctttgaagagcttaaagcaggtctaaagagagttggatctgaattgatggaatcagaaatcaagtctcttatggatgcggtaattataccaaaacaaaaactctcttttagaatattgatttctccgttcttctaggaatcacaaagcttaaatggtgttttgcaggcggatatagacaacagtgggacaatagactacggtgaattcctagcagcgacattacatataaacaagatggagagagaagagaacttggtggttgcgttttcatactttgataaagatggtagcggttatatcaccattgacgagcttcaacaagcctgcacagagtttggtctctgtgacactcctcttgatgacatgatcaaagagattgatcttgataatgtaagaagccttcatgatctgtttcctttgtcttgtttcttagtgagtttggtttaaaactgatgatgaaaatatgtggttttgttaggacgggaagattgatttctcagagtttactgctatgatgaagaaaggagatggtgttgggaggagcagaactatgaggaacaacttgaacttcaatatagctgaagcttttggagttgaggacacaagcagcactgctaaatctgatgattcaccaaagtaattataatcatctatatacttggaattgagaaatgagaactcacaaaagaaaaactgaatctttcctttttgttttcgtttccacttttgtagatgagcaactttctcaattttgttataagcatggataattttgcttcatattttctgcgtatagaaccattatatgatcagaatcacccatatttggtcaaagcaatgtcttcaagcatttacataatcatgtttgttatacataagccaataggctgcagagtcagatctctgaatcaagtattcaatatacaaagccaatcatgattcagtaaactagctacacaaacacttactactacaagggggtaagagaagctctcaaatcgaagacaataaacaaatcaaagccagagttagcgattttaagctccgcgatgttgcagaaacaatcttcttcttttatcttgagctcataaacacctttgaaatgctgccatgcgactgaaaggtgctgctcatcaatatctatataaatgattatactcttcagtcttcgactcttcattcatatactctctttctctttagaagggcagggaatatggagatggatccaatgaggaacagcactgacaaggtcttgaaatcatacaaatcctttactgatctgagatctccaagagccaaaccagcctgtgtaaatgaaagtaaatgttagcctcttaaacacgaaagaacagcggaatgagattgaacaatagactcactctaactgtgatgtacgaagctggcataagaccgactagagtcgccaaaaagaagacgtgaaagggtatgtcaacgattggagaagacaaattgataaagaggtttggaagtgttggtgttatccttaagaacagcatgtagtttagcagcctatctcttcttttcgcaatctgacccattgaagatttcaagacattaatgctttcagaacaagagacattactaaatactaatcaaacacaaaagaacttacctcagcttggaaaaacctcaacttttcaggccataaccagttaaccaatggcctaccgaccaatttcgataagaagaagcaagaacatgctccagcagttgcattaaggacaacaagaacaaaacctctaaccacaccgaaaagagctccagcaagcaatgacataaagatcgttccaggtatcataaatgtctgcataaagatatacgtcgaacagtaacctaaaatgaaccgtgcttggtactcacttgcataagacccaagattctctctgcacatattcatcatatcaatatatcatcatcatatagtaagtccaagcatatcacattcaactgaaaacgcaactttcaaatcaagtcttaatgctaatgcatgtacttattttgaaattcaagtaacactactaaaagctaaacactttcagtttctacatttgcataaattcaattctcaatctataataccaaacaacaagctaatcacatacaaacaaactgagaatgctgattctagaatcatgtctttaagctaattttctgctctctaaagtctaaaccaatttatcggaatcttcgaaagattcaaactttcaatatgggtttttgaattagaattcagattcaacagatcactattaaaaagctaaacactttcaattcctacattagcttaaactcaattttttcaatcaatagaacaaacgaacaagcttatcacaaacagaaaattttccatcaattttccgaaagatttgaactttcaatttgggtttaagatttaagagataactactcaaagctaaacactttcaattgtaaaagaagaagcttttaatctcacttgagcaatcgaagatcggagatagttctaggaactttgagcttgccgtattcagcggcaggcatggtgaggtaaatacaaaagagtccggtggtgaaaacgagaaagacggtgaaaaacacggcgaattcccaccgtgagagaggaaatctctccgatttggttcgtttaccagtcggtgagtcatcgtttaagagtcctttagctgccgatgaagctgcggggctttcttcgtcttttactagctgtcttgctccaccgtcacctgttaaattccgaggagccgccattactgtgtctgtaatgctttctcaagaaaacccaattttgaaggaaactgaagaacttaacatttgttggatatgtgcaatttcagacgcaaagacttgatatttaataatatttataatttaattggaaatgggttttgctgatgcacagaattttgcgtttgcggatagtatcagggtttgattggttttccctctgccgcccgcaaacgctgcgtttgtgggtggtagcggttattagcggttgccatcaatcatagaaattgctagataccgttttggaccgcttgaaattgccagatttcaaaagctccttaccgcaagcgtttgcgtttgtgggcggtagcggttaggttaaaaaaaattaattaattaattaaaataattatgtcttccacccaaaccctatacttattcttatcagaaaaccctaatcaatgaaaccctattctctcaattatggcattcacccaaactgacgaaaatcaaagtcaaaatcaagaatcaaacgtaagtatgatctatcctttcatccattcatttgctagtgtaattctcgtaatatttcatggcatcgttgttttttttttttttttgagttttttcattgaatacatgtttttgatttgttttctcgattagaaaatcatttggtcagacgagaccacatttgcgttacttcaacgggttattgtggagaaataaacggaagaatccaaagaccccaaaatcagatttctaagtgatgttcaaaaagaaaatattcttaagaatattaacgtttgggaaaaatttgagttggagatgtgttaaaaatcgtttggatatcttgaagaatctttatcatatgtaaagaggcaatccggaaaatccgcgagttcaacgttatttacagtttatcacactacttgatgcaatttttggtgatgtaccaaatgcataaagtattaagctttttcttataaaatttatttatttttgaattttcagttttatttatggttttaattattaagcatgtttaatttttcaaatattatcaatttatatattgtatttttcttttaatagtaatatattatatttatcataataatatattgtatttttcttttaatagtaatatattatatttatcttggttattttttatttaattattatcgcacccgctggtttaccagtcataaaattcccgcaaacgcactcattaccaaacgcttaaccagtcgttcaaaacacttgataacgcttgaaaccacaaccgtccgtttccgcaaactcccgcaaccgcaactgcacccgctgcgtttaaaccagtcaggccctcagttgttagcgattgatacaaattataaaaactgttaaatatcgttttgaaccgtttgagatcggtagttaaaaacttttttctgcaagcgtttgcggttgcgagcagtagcgattagttaaaaaaaaattctttttttcttaattaattaaaataattatagctttcactcaaaccctaatcactacaattaaaataatctaatcttttatatatcttatttttattagaaaactctaatcaatatattgtaaccatattctctcaattatggcatccacccaaactgatgaaaatcaaaataaagaattgaacgtaagtatcatctcttcttttattcattcattagctagtgtaattcattgagtatttcatggcatcgttttttttttttttttgtattcttttgagtttttgattgaatacatgttcgatttgtttcctctgtcagacgagatgatatattatatttttattttttttttatcaatttttgagataatatattgtattttatttggtcagaaaatcaattttttctaatattatcaatttatcataatatattatatttttatttcttttaataataatatattatatttattttggtattttttatttaataactatcatactcgctggtttaccagtcataaaactcccgcaaactcattcattatcaaacgctcaaccagtcgttcaaaacgcatgaaacgcttgaaacagcaaccacccgtttccgcaaactcccgcaaccgcacccgcacccgctacatttaaagcagtcaggccctgagttcagaaggttcaaatgactacatacttaggaaaaaagttaaatgtacttatgactcttttttttttttttcacagaaagtgatactttttagggtcatttgcaaaactagccatatttgataacttaattaagaatatagcattatatacatataaaataagaaagtagcatataagggttgtaaaaagacaattttggtgtagaatagttggtgagagatgatttagtaactcttcatttagttttcacctatttttatgtttttgttatatatcttttccaaaaaatagattctaattctgaaatttataagataaaaatttatgtttttttctacatacaacatagtttgaatttttataatcggatttgtatttataaaatagtaaataatgtttgtaagtaaatttatattgtactatttatgatgtatagaaataaaatgttgtactatactattttcataaattattcgtaattcagttttaattttagtttagaacaaaatattttaaattaaataaagtaatagtggtggtagtggtggtgggatagtaatttaagttgaaataatagctacgataatcgtaagagataaaatattgacgatccaaatgaccgagttaaaccgatatgatcacaattaaaaaactataccctaagagatacaatattaggaacccaagcaagcgtggtaaactgttgctgtgacatagacagtagcgatggtggtgggattgacggtaacaatggtgatgatgataacgattatagtggtgataacggtaaaaatgacggtggtagtggcggcaatacgattgtagtggcgacaatacgattatagcagtgagctagtgatagggataatgatgacttggtagtagagataatagtgtaataatataggtgatagttatattataaattttattatgtataatattttttttattagaatagaatagaaagtacgtatagaaaatagaagtaagagacattaagagagagagagagggagagagagagtgagagaaagggagagagagagtaaaagagagagggagggagagagagagggagagagggagggagagagagagaacgagagagagggaaggagagagggagaataggagagaaagagaggaaggggacaaaattgtgaataatacacaaaatatagagaatatgatctcttttttgttttgatgctacttttttaattataattttttttgtgttagatttgcaaatttccctactttttataaaaaaactgagttgcaagatttacaagtgaagaaacttccacattcacaaacagttagtttaaagcttaaaggtattaaaaatggagcttcgaaacaggtagaagattccattaaacataacccaaaagattgcagcttctgatactatctcttttcctgcttgaaacttcatcaaaaaaccaactggaactaaacttcaggtatgcaattaccaaaaagaattgcttgaacataccaattattcaaaccccttaacttccttcactgagctgactgaaacatcaccaaaaagtgatgacagaaatcagtagagtggtttaccgtttctttggagatttcagaatccctccttccttaagctccaagactttctgcttttggtttcttctatctgtctctttctggcaaccttgtgtagtctttctcttggatgcatctgcttcagcttgccttgaagattctcttacttcgactcttcttgaggattctccaatctccacttttcttgagaaccttgatgtgacctcctaatcagttaatggtgatacctgagaatttgcccttcgttgttgtgaatgaattcccacctgaggacgttggaccaccaacttctgagaatttgttattgttgttgatggaaacagctcaggtcttgcagctgcaagttctgcatgatttagaggcggagtgggaactcttggaggtggtgtgatttgtggtggaaacgaatcatctgatagttgggatgagagttcatatcagacctacataattcatcatgtaaagcccttcttaccctctcagccaaaatctgaactctgtcttcatgtcttgggttaggtaatggtaaagaataggaacaatgattcctctgatgcgtaaaacgaagacagtgactgcatattcttcttaacttttcatactgaaaacgaaatacaacggtctccctagagtcaaacctaatcctttgaaagaaccttaggcgatcagttatttcaaacctaactcttactcagatgtaggctatttgattagtagtggcctcatggaagtctatatagataatatgaccaagttcttgagcagtctcactaacagtttccacacagacataaggcataggtagtaagaaaatctatggcaagaaagatttcccatctttgattaactacaaacaaattattaaagagtcaaggttctcttctttgagctaataaaagatcaagttcagattgaaagaggaattgtatacataagtaccatctaaaaccctcctatggactctttcagttaatccccaagatctaggtaaggaagctattactgagaaaaggttctaagctcgcggattcaacggtctggcaatcaggctgaatctgttcctagctgcaacatctgcatacgcttcatgtggtatgaacagttccagatcattcctccccaaccctagattctgaatttcatcccataacttttccgccagagcttgtattatgttagtaatagagaagagtttgtgcttctacaaaagactcataaataagcgctatatatagaataagacctacccatgagtattccctaactcgataaaagaaaaaaatattataagataaagataaaaataaaatataagattgaaaacttttagtcaaaagaaacagtaaaaagagaaactgaagtaaatcttatcttcacaaaagacaaaactactcaatcatttcaaaatgcaattttatgagataaccctcatctaatagaaccaacctctaatataagacaaaagtcaaactaagaattaagaacacataccccggggtttgtgttcttaggcaagtctacgaccacggggtttgtgttcttaattcttagtttgacttttgtcttatattagaggttggttctattagatgagggttatctcataaatttgctttttgaaatgattgagtagttttgtcttttgtgaagataagatttacttcagtttctctttttacggtttcttttgactaaaagttttcaatctaatcttttatttttatctttatcttataatattatttttcttttgtcgagttagggaatactcatgggtaggtcttattctatatatagcgcttatttctaagtcttttgtagaagcacaaactcctctctattactaacataatacaagctgtggcggaagagttatgggatgaaattcagaatctagagttggggaggaatgatctggagttgttcataacacatgaagcgtatgcagatgtgttcataacacatgaagcgtatgcagatgttgcagctaggaacagactcagcctaattgctagaccgttgaatccgcgagcttagaaccttttctcggtaatagcttccttacctagatcttggggattaactgaaagagtccatgggagagttttagatggtacttatgtataattcctctttcaatctgaacttgatctttattagttcaaagaagagagccttggctctttaataattggtttgtagttaatcaaagatggaaaatctttccttccatagattttcttactatcatagagttgtgggttcagattaggggtatacctatgctttatgtctgtgtggaaactgttagtgagattgctcaagaacttggtcatattatccatatagacttccatgaggccactactaatcaaatagcctacatccaagtaagagttaaggtttggaataactgatcgcctaaggttctttcaaaggattaggtttcactctggggagactgttgtacttcgttttcagtatgaaaggtcaagaagaatatgcagtcactgtcttcgttttacgcatcagaggaatcattgtccctactctttaccattaccggccctaagacatgaagacatagttcagatttcggctgagagggtaaaaagggctttacatgatgaattatgtaggtcggatatgaactctcaatcccaactatcagatgatttgttttcagcacctatcacgacctctaccgcggcctcgaccacgcccacatttcacgacctgcatcacaagccaaaaggtaaatgtaatatcttaactatttaaagacaaacaaatgatcataccagttttctaatagtttttttgacacagttactcaataaaatgataaaacatgatgagtttgtggtcgtggacgtcgtggtgggcagattgcggatacaacagtggacaaattcgagtatcggcctattgcagaggcgagtgtcttggagacgtccaaagtggataaggaggcaattccaacttttccggtgtttattcttgaatcattctcgatcgcatcgcacagaattgcgagtttggatggtgttgagaatgagacaggtatggaaggcgtgggggtgatgggatcactcgtgaatgattttgaggaggaggtagagcttatccaggcgcctatccccaattttttcatggatgatctcgtgttgatcgagtcggagctggctcacgatgggacttggtgggatgattacctagttcttcccaacaatccggactcgacactcgttggtgctgaaatagagtttgatcttgtattgttgtctgatggcgatggggatcagattgtccctagtacgccggtgatgacacccatggtcccatcattcacatacccgactttacggattgccacttacctcactgtggcgagactatggtcgtatacgaaaggtacgttttgttgagacggaggcgagagtttctgcaactctagcacccgcgttttgggaatcctattgctataacatgtgaggaattatgacactatccgaggatatgtcgctattaccagccatatggggacccagtgatacggtgccttgcatgcgacgagaaagggctctatgctagtgcatgtcttgtagtcatggcgggaccgttggagagtttgtctcatatgtttccttttactgcaactgattcagcaaccatagagggttattggcctagttgtatatgtccatgtattatgtgtagaaatatttacggttaggttaacttatagcaagtctaaggcgaaggtatgtagggtactaatccttttattgtagaatagtggcttagtctgactaatgaagtccttcgcctagttatgtaaccttaggatagtttgtacttgtaaaatctttaggataaatgtaattatatgattagaaaatgcggtatgtataacgtaacattataagatagtaatgtataaacttgatgtttaatatcatgttgtgattgcctatgttttgtgatgatttgtttatatttaagttacatttatttagtgtatgtatctgtataacgcaaacaatggaatcgacatagaaaaacctcatccattagatgttaagaattagaaatcctaagtaaaagcctgattcaaaaaaaaaaaaaaacattagaagattaggttgaaccgttatagtactattaaggttagaactcataagtttcaaggaaatagaatcattgaatagatggtgtgtaccttacccaaaccttcttgacatcgtagaacttgttcattaacgttaactcaaaggacaaagttaaccatgcccaagtaagataagacaaatagattagatttggtgaagttgaaaggaagcgagattgagtgaagaaacttaaaaagaagatagtcaatattttacacaatggaacgtgttaaatagacttaaaaaatcgaaggggaggagcgttgctaagatggatcttgaagaagaaaacccaaaagacatgagttcaaagaggttgcaagagaataaggaagatgattatagaagctagcacctcaagcaaggtgaacagacggtagccactaagtcgtaaaaattccaggacgaattttattaagaggaggagaatgtaatatcccttacctttagtaagactaagtttggtggaggtcatcgcaaaaaaaaactaaagtggcatcactcatggacgggtaacattcgggacgagaattcttaaactgggccgttgtgtttttttaaggacgagaaaaccaaccaaagacctcatccgtgaacgtcgtgtgaacgacccgtgcaggcgtgagctacgccgcggtagacgtgtgctcgacccacggtcggcgtatacggttaatgtacagccgaaagttgactacgtcaccgaccagctcatgacagcaagcaggtgggtgaactgttccaacattttgtggctgagaaactgccatgtccagccgctataaacgtatggcttctgatcggccacaaagctgcttacggttggccgacaggtgggcagtgactcagggccagctatcgccaccagggttctctttgtccgactgtcacccaacgaaccgcgcttagtgtccctgaccgtgactcggcgacacaccggttaattaaatatttcgattagtcgagtttgtaaaggaaatgttaataaataaatatctttgtgaaaaaaaaaatgctatccaaaacttaaatatatttcatatcctctaatcattttctttatttttggtgaaattctctaatcaatatatgttatccaatattttctattattagttgaatgtttaaattaaaatattaaataatattttttgtgaagaaaaaaaaatttaacttatccaaacattttatagtaatgaaaacttttgttggtaatttcaaacttttggtgaaaaaacgtcgaaaaaatcaagaattttcaaatttgggaagaaaaagcaggaactttcgaaatattattttaatcatgaatttgtttttgacttttcaataaattagctaagtttctttaactacacattttaaagcatatttttaaacttttgttaacagaacgatgacataattaacttttcgttagacttgaagaacaaattacaagatttgaaactattttgccacaataaagtttttgtattatacccacaatacaaagtttatatatattattacacaattaattgaaactaacaaaaactccattagttgcgtgacacccatagttttgaatttttctcactgacaaggttcacaaaacccattcgcattttaatttctatattgattattgtcttcatcgtttgtttttgataatcggcttggatgatagttaagtcggaatctgtaagctgtagcagaatatagttctgggaggaagtagtgtgataagaaaatcttgtcaaagatgagcttaagattgcgatctagtggatcgagattttggtagatctcctactctaggctcaccaaatccatatgaattttattctcaattccctcaattttcaccaaatccatatggaccagcaaaacgatgagtaaacttgatggaatccggattacggggagagagaatgccgactgtagccaaaagaattgatagaggagacaaatgagaattggaagaattttcatatcttattatataataactttgagttattaactttgaaaattatactttatataataagataattataaacaattaacatttattcgacaaaaggaaaattaacaaatttttctttaactaatgtaaacataagtgaaaatagaacattttgtgaaaaatagcttagcttataggatttaacttttcaattatttttaatgagaatattttcatttaacaatatatttgaaaatatataaaaaatatattttcaacaatgttttggtttctaaatatttttgtggatttctgttttttatttattattagccctaggcgtttgggtattcgggtcgggtatttcgagttatatattttcaacaatgtttggtttctaaatatttttgtggatttctgtttttttattaattattagccctaagcgtttgggtattcgggtcgggtatttcgggttcgggttttctggcttagaagtttagtacccgttaggataatttaagatttcgggtcggattcggttcgggttcgagtttatttatatattgaaatatcaaattttgtctgcaaatctattaaattacttgaaaattttaaaaattctcaaaacaacacgagtagttttgcttgaatatatctaaaaatacacaaaaataactaaaatatctaaaaaatcctaatattttctatatataagtataaatataactaatatatacttatatttgagatatgtttggatacctattcgggtttaggttcgggtttttcgggttttgaagtttagacctgttcggtatttgaaaattttaggttcgggttcggatcgggttttttggatcggtttttcgggtttaggtattatgcctaggcctattaattatgttttgttaattgttaattatttttaatactaactaggatatagatttgatatgtcataaatattattttgatatgaaaatgttatcactcaatatgaagtgtgtataatttaaatcgagtttattatgatgacatagatagttaaactgtattacaaaattgaatggtgtaagatagaaatttgtttttttctttttcttttctagatactaaattaattatagaataatggtcggttactttttagaattaaaatatcattgataagattgagtgtatataattaaaatagaatgcataagactgaaattttgtttaaaccaataattattaaattaaatatcaaaataaatatatagattgctatacaatattcaaatactatcataaaaatttatttttgtatcttacacccgcctaaataggcgggccttatctagtacaaaataaagcttagaagtcagaaattcatcagatggaaaaaaaaaaagtccgaaattcatccatcaatgacactcctaacttcctatgtgacctttttaagttttagcatttgagtttgagcaacgtcctcgacatacttgagctgcccactagtactatcccttcagacaacatcttgatgaaatctgcaataagcactaatacataagtgtaattttgaaataaaaaggcggacaaaggcacaaaactataccacttataatcatcagtatacatactaatcatagtttcactctcactctctccatcactcatacatcttctccatccatcacacgacgaagcataatggcaaagtattggaatagattcgtttcctaatcaagaaaaaggaaattcaagaaaagaagaaaatcaagcaaccaagaggattgaccaaaaaggaaatcatgaagaaaaggcaaggcacacaaggaaaagggaaattgtcacaatgtgaattagcaagttactatttttgtgttagaatgataactctataaattaggttgcttgtgttagagttcaatcatagaaaaagagaaatcccaacacaaagccgtaaatacataataccaatgacgaccaaagagtgcggaaaccacggtggtggcggtggaggaggcggaaccgcctgtagaatctgtggagcaatcatcggcttcatcatcatcgtcttgatgacaatcttcctcgtttggataatcctccaaccgaaaaacccagaattcatcctccaagacaccaccgtctacgcctttaacctctcgcagcctaacctcctcacctcaaagtttcagataacaatcgcttcacgcaaccgaaactccaacatcggaatctactacgaccatcttcacgcctacgcttcttaccggaaccagcaaatcactctagctagcgaccttcctccgacgtaccaaagacacaaagaagatagcgtttggtcacctctcttatatggaaaccaagtccctatcgctcctttcaacgccgtggctctcggggacgagcagaatagtggggttttcacgttgactatatgcgttgatggacaagtgaggtggaaggtcgggactcttactatagggaattatcatctccatgttcgttgtcaggcgttcataaaccaggctgataaagccgccggagttcatgtcggcgaaaacaccgttaagtacacgttgatcaataagtgcagtgtcaatttttaggaggtaaaaggacacaactttgacgacgtcaatgtttgcttttactctttcttcttcttttcatttttcttctactcagataatgtttttgcttctatatcgtttaattttctacctttttctgctgatcatataacatacataaaatcaaaaaatttaatatgataaattcatgttagaagaacttgccaaataaaaaccgatacagaattttcttgtaaaacattcttctttcttttttcttttttttttttaactttaaatttccacttaaattaaaataaagaggattacaaggttaaaaacccaacatggccgcaggcctaaaaaaagaaagagaaattcttcaaatttatagttacgtaaaccttcaaatttaataaatttttaaaaatcagacataattatgttgacacaggcggccctaggttctagaacggtataaccgagaaaccaacgtacgacgagagaccaaaaagtaatactaacatatacgatcttacaaaaagtactcatatatatacttttgtttgttagaattcaaaaatattattgtggctaaatggtttacaaactcgtattcgtttcatttgtcagcggttggaatcagttttttgctaaaacgatatcgttattgtaagaagtgactcagattttagttttcgggtttaagtgtgggagaaactcggtgaaagagaggattcgaagtctgttgtgattcgagctgactaaagtcataacacgtgaggcgagctgactaaagtcataacaagcttgagggcgttttggtcttttcgcatgagctctgtaactatatcttcttcttcttctctgtaattctgttagatcgggataagaatttgttgagatcaaagagagagaggagtgtagtgagagaaagcttgaaagcattgtaacagagactaagtttccaagttctagtggatttccggagaggtttctccggcgagacgtagcgttccggtttggaacgtgaactcgttaaattctctgtgttcagcttttcttttactttctttcagttctggtcaattcgattcttagtgctaagttgattcgtgtgtttgtgagattgaagtgaagttagatctttacaaattggtatcagagctcacggttgttgagcgagtgcgaatctaagatggcaggaactccgatcgcgatctttgatggatcaggagatttttctttgtggaaaacaagtattatggcacatctaagcgtcattggacttaaggatgttgtcatcggaacatcgtctccgccgctcactgcagaagaagaagaagatccggagaagaagaagaaacgagatgcagatgatgcagcaaggcttgagcgatgtgataaagcgaagaatgtgatcttccttaatgttgcagataaggtcttaagaaagatcgagctatgtcaaactgcagcagaagcttggggaactttagatcgattgttcatgattcgatctctacctcatagagtctttactcagctaagtttctatacttttaagatgcaagaaaacaagaaaatcgatgagaatattgatgatttcttaaagattgtggctgatttgaatcatttgcagattgaggtgactgatgaggttcaagcaattttgttgctaagttcattgccttcaagatatgatggtttagttgaaaccatgaagtatagtaatagccgagaaaagttgaggttagatgatgtgatggttgcagctcgagacaaagaaagagagttgtcacagagtaatcgatctgtatcagaaggaaattttgctagaggaagacaagaaggatcttccaacaataaccaaagaaataagggtaaagggagatcaagatctaagtctcgagatggtaagcgagtatgctggatatgtggtaaagagggacactttaagaaacagtgtttcaaatggcttgaaagaaacaaagataaaggatcaggatcaagttcagacaaaggagaagcgagtatagctaaagctgaatatgatccagcaatggttcttatggcagaagaagagaatctatttgtttcagggaatactgcagacgaatgggttctatatacaggctgttcttttcacatgacaccaaggagagattggttttcagattttagagaagtgaaatatggttatgttaaaatgggaaatgattctttgtctcaggtaaaaggaattggaaacataagaatcaagaactctgatgggacacagattactttaacagaagtgagatacatgccaacaatgtctaggaacctaatttctttaggaaccttagaagacaaaggatgctggttcaagtctcaagatggtattctcaaggtggttaaaggatgctctactgttcttaaaggacagaaaagagaaacgttgtatatacttcttggagaagctgagattgctgaatcaaatgtctccgagaaatccaaagatgaaactgtgttatggcacagcagacttggtcatatgagtcagaagggaatggagatattagtgaagaagggttgtttaaacaggaaagtgattcatgagttgaagttttgtgaagactgcatttatggaaaaaatcatagagtcagtttcccatctgctcagcatgttacaaaggagaagctagcttatatccattcagatttatggggatctcctcataatccagcatctttgggaaactgtcaatacttcatctccttcattgatgactattcgaggaaagtgtggatatattttctgaagaagaaagatgaagcttttgagaaatttgttgaatggaagaaaatggtggaaaatcagtctgataagaaggttaagaaactcagaactgataatggcttagagtactgtaatcattactttgagaagttttgtaaagaggaaggcattgtaaggcacaagactgttgcttacacacctcaacagaacggtgtcgctgatagactcaatcgaactataatggataaagtttgcagcatgttaagtgaaagtggtatggaaaagagattttgggcagaagctgctgctacagcagtgtatttgataaatcgatctccctctactgcaacgaactttgagctgccagaagaaagatggacaggagcgttaccggatatgagttcattgagaaggtttggttgtttggcttatgtacacgcagatcaagggaaattgaatcctagagcaaagaagggaatattcacgagctatcctgagggtgttaaaggatataaagtttggctacttgaagaaaagaaggtgtcattagtagaaacgtgatattcagagaggaaatgatgtacaaagaccttaaaactgattctcagaacagtttctatgaagaagtcatggagaacataagagaaggttctaatcagctgatatctaatatcacagatcaaagtattacagaacaagaaagcgttgagcaaggtagagttactgaagaacagattgttaatgaacagaatcaagtgcagacagaaactcatgaagaagaaggaagcagtagtgataattctactgaagaagtggatctcagtaactacctactagtaagagacagggagaaaaggactgttaagttgaacagaagatataatgagtctaatatggttgagtttgcctacaatacagaagataggggtaagtctgagcctaaaacaaaccaagaggcattaagtgatcaagattgggagttatggaatggagctatgaaagaagagatatcatccatggaaaaaaaccacacgtgggacttagtagataaaccagtaaatgcgaaaatcattggttgcagatgggtcttcacaaggaaagctggtattcccggagtggaagcacctagatttaaagctcggctggtagccaaaggttttacacagaaagaaggtgtagattataatgaaatcttctcaccagttgttaaacatgtgtctatcaggtttatgctctcaatagtggctcagtttgacatggagctacatcagatggacgttaaaacagcgttcctacatggatttcttgatgaagagatattgatggctcaacctgaaggttttgaagataagaaataccctgaaaaggtatgtttactgaaaagatccctatatggtctaaagcaatctcctagacagtggaatctgagatttgatgagtttatgaagagtattgatttcactaggagcgcttatgacagctgtgtatacttgaagcagcaaagtgataagtcatatgtgtatctactcctatacgtagatgacatgttgatagctgctaaagaaaagtcaagtatcatggagttaaaacagttactgggtaaagagtttgagatgaaggatttaggtgaagctcagaaaattttaggcatggagattgctagagatagagctgcaggtgtgttgactctgtcacaggaaggttatgtgaagaaagttttgagatctagtcagatggatcaggctaaacctgtgtcaacaccattaggaatccatttcaagctccgagcagctactgaaaaagagtatcaggaacaatttgacagaatgaagattgtaccttactcaaacactgttggaagcatcatgtattcaatgataggcacgaggccagatcttgcttatccagttggagtgatcagtcgctacatgagtagaccattaaaggatcattggcaagcggctaagtgggtcttgaggtacatgaaggggacagagaaaaagaagctttgcttcagaaagaataaagacttcttattaagaggttactgtgactctgactatggtggtgattatgataaccggaggtcaatcacaggttatgttttcactattggtggaaacaccattagctggaaatcacgtcaacagaaggtggtagctatatctactacagaggcagaatatatggcattaactgatgctgttaaagaggctttgtggctgagaggttttctgaagaacttggttttgcacaggaaagtgtagaggtgaattgtgattcagagagtgttattgctttggcaaagaactctgtacatcacgaaagaacaaagcatattgatatcaggttacatttcattcgggatatcataaatgcaggtctggttaaagtggtgaagattgcaagtgaatgcaatcctgcagatatttttacaaaggtattgcccgtggagaagtttgaaggagcattgcatatgctccgagttactgagaactgagaggtgaatctcaggtaccggaggggagatccaagaactagaacaagttgagacaaggaagacaatcagagtcaaggtggagaattgtaagaagtgactcagattttagtcttcgggtctaagtgtgggagaaactcggtgaaagagagggttcgaagtctgttgtgattcgagctgactaaagtcataacacgtgaggcgagctgactaaagtcataacacgtgaggcgagctgactaaagtcataacacgtgaggcgagctgactaaagtcataacaagcttgagggcgttttggtcttttcgcatgagctctgtaactatatcttcttcttcttctctgtaattctgttagatcgggataagaatttgttgaggtcaaaaagagagaggagtgtagtgagaaaaagcttgaaagcattgtaacagagactaagttttcaagttctagtgaatttccggagaggtttctccggcgagacgtagcgttccggtttggaacgtgaactcgttaaattctctgtattcagcttttcttttactttctttcagttctggtcaattcgattcttagtgctgaagttgattcgtgtgtttgtgagattgaagtgaagttagatatttacagttatgaacttctaaggcaactctattatcaaaaatttaacagcatatcttaaacggcctagtatacaaaacttagctaatttattgacaaatcaaccaaaatgaaaattaatttttaatcccaaatttaaaaatccacgttttttaaacatttttcatttttttttttgtaatctctaatttattaaatagggttgctaaacttacagcaaaagtggttgttcaaaagaagcacagttcatacaacttatactagttcaacatgaaccattaacttctggtttgtttatagctgctcatacatactattgtccttaaaacataaacgtacgtgtgtgctcgcggaagacatatacacacatctgtatgtgtatatgtttaagggcacttgagacggccaccacgagtggtaatggaggcgtagcaaggacaaaggtggtggttcccggcggtgcctggtggcacacagttgcagcggtaacaacagctgttgcatgctctcaaacacagatttggcctcgacgatttgctgcatctacctttgcatctcccaccgcaatcttcacatgatatatttatacacatatgactagtttttaaccgtttaaaaatcatatataaacagagatataacactttacatatatgttagcgttacataccaattttcactacgccttcaccgacttgtgaatcttcagcagcatgaacatgaagctgaagagaatgatgaattattatcattgatcaaacacatatgaattaaggataagacgaagcaaatgattcatggagaagtaaagacaaaagttatgaacctcaaaagtggtgaggcagaagaggatcagcagtaaaactagtgtacttcggaagattgccatgtctcaaaaagcatgcagtttcgtgcaagatataaaactattctctctgattctctatttagtagctacaattaagtatataaatctaacacctctttgggtttatttataatgcttattcaaatattttatttttacaagttgtatattatacattgcgaaatagaatcactaaacctagttttcatttttttttttggagctacgtacgataatgaagacatgtgtttgagatgtaagtgagtgtggtgggtgttttcacgtttacatggtgatgtggaaagatatgaacatgccacccaaagtagagtccacatgtcacccagtggaaatgacctcgttaaaagtggtatgtcctccacaattcattttaatgaaaagatttggtggcatctcgatcgaacgttaacactcatcattcgattcacgcgttttcttttacacgcgtatgttttattctctatacaagaaagacgtctcagagttaaattgccagcctaattcatgatatggttttgttccttgaggagtttagtggtagtttctgaggattctgaaaagaaaaataaacaatgcatcttgtcatattagtgaatattttttgatggctcattaatggtttcctttgatttttttttccttttaaagcattctccaatctcaagtttaggttgtgctttagaaccaatttcaggttcagagtatatggtttatggtttaacgcacacttaaattaattaataggtaaaatttcaggttcagggtaaatcatcatcatttaaagcacactcaaaagatactaaagccatgtctatgacattgatgtccttctaagactcatcttgcttttgtctatgaaaaagaagatgcaaaaacacaaaacatgcatatgtttttaaccattaatataaagagagatcctagtgaggatttaacgttttcaaaataaaaggctttgataaatcaaacgaaagggttcattttcgtattgagatctcaactctactttttgagaccatttccagaatagatccgaatcatatccattacaaaaccactttttttttgtcggcccattacaaaaccgcttctgcataataatattacagttcaaaaaatataaaaacgtaacgagatttcatcgttttcaatgtctattaacgagtagtctccaatcattttgaatttttattttagggttgccaaacttggaacaaaccgaaattggttgttcagaagtaacacggtttgataatacgcataaccatcaacttctaattagtttatagcttctcatacatatacttttgtcctccaaaacatagcagtacttgtatacatacacacgtacacacacatgtacatatattcgaaatagaagtagaaacagaaacagacacagaagaaattttaagggcacttgaggcggccaccgtgagtggtaatggaggcgtagcaaggacaaaggtgggtgtttccagaagtaccaggtggcacacagttgcagcgggaacaacagctgttgcacgctctcaagcatagcttcgttctcgaagatttgctgcatctatctttgcatctcccaccacaatctacaatcatacatacattcatcaaacacatgtaactaatttaatccgtttaaacccatcaaaagtttatatttgttgcaaaggaatccaaagcttttagttcatagtttccttctccgagatataacatctcattaaaagcttgagacattctccataacaaagatatatataagttgggaagagagtgcacccatcagaaatattaagttatataccaacgtgttatatataagttagggttacataccgattttcactacgccttcaccgacctttgcaccatcagcagcgtggacgtgaagctgaagagaatgatcagtcattatcatataaacatgaattgagtataatattgctaggtgttcttggggaactataaagaccaaaaatattataaacctcataagtggtgagacagacgatgattagtaacagaaccagtgtacttcggaagactgccatgttcgaaactcatgcaatttctgtgagttgtacaaaatattagaactatttctatctgatactctctttggtattacggctatatgtataatccaacctctttggtatatttatagtggctatcgcctatcggctatccaaatgttttttattttgtatcatattataacactaaaaataataatccatgtatataattgggtgcatgcatgtccgtagtttttctttgtgtgagctatagataagatttaatgagaaaacattacgagtttttgaaacgtttggttctaaaatgaatttattttggttaataaaaaaaaaatgagagatcaatagttaaatgttaagtgttaaataatatgttaaccccaattaaaagtttagctatttacgattaactaccatatgaacttctctgcgtctttagtatgtatggttaaagaggtagaattacaccaaaatgctaaaccgagtttaacattatggtgttaaactgttaatgacgacaagtgtttgaagatgaaaggtgtagttgtgtgtgcttcttccacgagtagaagacgatgtggaaggatatgaacatgccagcgaactagagtccgcatggctcccaatggcaatgaccatctcgttaaaatggtaatgtccaaaatataatacgaagatttggtggcagcaaaagagcaaaaactttccaaatttgttaacacacatcatacgattcatgcgttttgcttttacacgcgtatatttacatggtattacacgtatattccattatgcaaaatttgcatagagacaagttaattaacgcgtgcaaacttgtgtatctttgttattatgttaacacctttaggtgtgacagtgaatagttacgtagtggggaaggtacatgcccggattaaatggataaagagtgtacctagagccgacgaaatcagatgaagtcgaacggtggtatgcaatagagtgaattgactttaaattgtgaaaaacgaatagtagatagtactggtatgaactataccgctttaaacagttacaaatcacaaaatcgatattacaagcgttactaaacatattatttagagtcgacgaaatcagatgaattcgaacggtggtatgcaatagagtgaatttgactttaaattgtgaaaaacgaacagtagatagtaccggtatgaattataccgctttaaacagttacaaatcacaaaaacgatattataagcgttactaaacatattatcatcagttaaagataaatgaaagatgtttttgttacattgtcttttcactttctctctagtctttttctttcttaatggaatgattttctttgtatgatattttcaaatgtgatagtttccaccgagacctacacaacggtccttaaatcatgatcgattgtttattcaagtagctgtgatgaaacaagaagatggaggactagatacaaatcagctcttgctctatttctaagctacactcaaatatgtaaaatatcaacgatcattcagaatggtgaatagacgaactagtaaaggactaaaaccgaacccaacaccgagtgcattgagcaacacaatctcctttacaatccacattatatcccaacactttcggattccgaagcaacagatttcgtagttgcttacccgtaatcccccattggttttccaaaatcccaatgtttggtttcatctcctcttcaagactgcaaccaagtacttccgggaatttcttcatcaccttatgaagatcttcgtctgataaaccaagacttctaaggaactctagtatttgattcaaagtttccacctttggattctctttcactcgttcttcggtccagtacggagagtggatatgaccaaacgctttccctagtatcttgtctttctcctcaacactgaaatcaaaacaagacaaagcttctttgcattcttcccatatatttggatcttcattagaggtttccacttgtgttgttgaacaaaacactatccacttgcttcgcgaatatgaagatgtccttacgcctccattaacaccatgatacgacgagttcaatcttaatggtaaaacattagtgtatgttacaagatcaacctgcaaaacaaaagcaatgcatgtcccatgagatttttcagaaaagaccatgagaaatataacttttggtcagggataaattacatactgcagagtggcggaagcatttggctgaacccaatgttgccaaaggtgaagccaacgagtttcccaccatctcctgtttcagtaacaaaccacaaagtaaccattgaggagagaaactataatgcagaagaaatcagcaattccatccaaaccaatgtgtgtatcaattagcaaacaagactatcgcatagtcaagctctagatccatgacttaatctgaatcgaacgaaaatttcgcaaattgaagagaaaagagagagagagagagagagatttagttctttaatactatactacagtttgttaatctgtaaaactcatttcattagctgtgtaaacatgtacaaatgtgtctatacacaggcgattaaacgaagtaatgatccgagactagagctctctatctaactcatttgcatatacatatcatacccatatccatcagtgaagctaatagtaactaaagaagtaatagtgtttagaatcacaaatgggcattgaacaaaccaatacaatctaagtacaaatcatacgagaatattataaaggataaaacttttgtgcaaatttctgcatatggaagagaaaagagagagattggttcgctgtggttctctaatactatataagagtttgtacaaatgtgtaacatacgcgatcaaacgaagtactgatccgatactaacaagtaacacctctctaaaccctctaactaactaatttacagatacattcataccaatcaagaagagtaaagctaatagtaagtgaagaagtaatagtgttctgaatcacaaatgagcattgaacaaccaatagaatctaagtacaaatcatagagaacatcataaaggacaaaactttgtgtgaatttgttaaggaacttgacaggaacagaagcataagcttgatatgttcaaatttcgatccaaatcagagagatttgatgaacaaaatcataatggaaatataaatcgacaatgacttgtcctaaaccaattcagaatccccttttaataaaaatccaaactttttgtgtaaccctaatcgaattcgagaatctaacttaaggtaaatcacaaattgtgaacagagaagcattgaaacaacgattgagagaataccattgacgcaagtggagaaaagatgcctagagtgtgcgaggatactcttaactcgttcaccgatgaactcaaatcactgagtcagataagcaaccgagtcaacaaagtagaaagattctgagaaaccctgatcagaagatttgttgaggtgagagatttaggaaccaaccattgtctcgttgagagatagagaggcaaaaacaaaaagtcgctttcagaaaaaattgcgtctttacgttgtttccaatagtcacggtttagtgtttttcaaaattaaaccggactggctatttaaaccggtttgaacttacagtgttgtgaaaagagaactggtccacttttagtagctggagacctcctacactatgaatctaccgtgagtgttcttgatgtttcaacatcccacacaagaatctcttatttccacaatgatgaagctgagtttttatggtctttacactataaattaattattttttgtgaacttaattgttttgtacatactacaaaaaaaattatttagtgcatgcacaacattttatttgacaattccagtcaaacaaatcttatcaccttacgatttatgtatccattgttttctattatttgtgtattcatttgtcgataataatacagaacacgtgaaattttaaaattaataattaaaatatatttatataattttaaatactaaacaaaataaacaaaattaacaaaataaatataatttaatttgttttttaaaacgtatctcgattcttttgtataaacatttaaactttatacttttgttgcagttttagaattgacggatttgagtcgatattaataaaatatggtatattatggatgaatcctacaattaacaatcaaactacaattatacaatctttgtaacaatccgcacacgtggccactctctgccacgtggcatcctgctggctctgcagcgcatcgaccctaacctctcttcttgttgttagtcctccttcgacaacgttctcctgttgatggaaaccgggtttcttgatttctccccggtttagttgtggtatccggcagtaagactatcaattgtcttatctcatcaggaataatccaaactgatgaatgcgggactggataaatggttctgtggtatgccaatatccacgtattcatatggtaataatgcgaagttaggtcttccatttcgagactatctgatatccattcggtccccacaaagtttcgggcagcggcaatcgcatgtacacacaggtacttgtcaacatcaaaacgttggcaagaacaagttttccttaccaagtcaacagaataagacataccaccttcgccaatgacgctgtattgacgttcgaagctgttaagctcggtcaccggcatcgttttcccaattgggcataaggagtgtatttcgttctccacaaccggcacaagaccccttgtttcagaatatttaacagactccttcctatgtttgttaaaccattctgaaattttctcaattatcgcatcaagcaaaggtaaaaggaagtatttccttgcacgcttaaacgtactgttcaatgattcacacgcattgctcgtgtctatattatacctatccccttcaaaatagcacctagcccaattttccacaggagcccatctatccaaatacgtaccgacattaggaaatcttctcctaaatcgagcatactctctcgtgatctcaaaatgagtataaacatgtgcgcatgcaatgaagttagccgccgcttcttccttctcagttccactcgtactttaacgttttgagacaaatgccaaacacaatggccatgtctcgcgtttggaaacacatgcatgattgatttgatgatgctctgatgtctatcactcacaaaaaccaaacctggttcatctggtataactgttttcagcttgttaaagaaccacgaccaactagcattgttctccctatcaattacagcagacgcaatgatataattgtgatgattaggatcttgggctgttgcgaaaactagcataccgccgtatacggtcttaagaaaagtggcatccacaataacaactttcctcataactttgaacccttcaatgcaagcacccaaagcaacgaataagtacttgaacttttgttgtgcatccacttccacatatgatattgtcccgggattcacctcctttaatacgtacagataagagtacaagtcggtgtagcttttttcaggactaccacgcacatcattaacgtgttgtcttttccctctccatgcggtagcatacgagcaatgcaaacccattcttccccgaacaatactcattatgcttttaggtggtggagtttgaaactcacctggataatcctcatgcaaaatatacgcgattaatcgtggtgtgctggtatgtttacaattgcctgagttcttattagaccgcttgcatgtgtgcatcttcctgtgaactttaacactaaaacaatctgaactctttacttttgcacatcgtaaatactattgacaacctgttgttttatattgccgacatcgtaacatgagtcgctttggatctgacgctatagttgcggtcgcaaaacaatacttatttgcagctctgttaaccaaatcttgcacggcctccttagaaacaaattcttggtgcaattcaatccccgttccatcttcccattccgtaacactctgacttttctcgctactctgacttccttcaccaacacatgaaagctcataatactcaattctaccatcaacaccattatcttcagcaacatccatccggctatccacatgctccctatcttcaataactacattctccatagcctcttcaaaaacccggttatccgcattctcaatagcctcttctacactattagcctcttcaataatcggttcatcattcacacaattacctcctgcagtttctcctctaaaaatcgtcactactccaccattctccatatcaaatgcattcaactcctcagaattaataccaactgaacttcttccctctacccttgaattttgttccaccctctcagattctttatttactacctccacgttcaaagttggtctaattcctttagcattcactaccgttagataacctaaaaagtcatcatcatctacaatagatgtatctctctgagatgtgcatagaatataactcaatttcaccttccttgaggtttcatctattccaatcttcttgcatatcttttctactaacatagagtatgttacctttaacgttctcaacaatacaccgcttaaagaattgtttgaaatccactcatgctcttttgaataatacccattgtcaaattgtatgaatgtgtgcttgttcttcatcgtctcctgtaattacaaataaattataaaaacacaattacgtaatcattcagatttagacataattgtacctatattataactcactaataccattcacctgtcctaattataaaacactattcttttttttttactaaatcactaatgacataattataaaacactattcttttttttctgtgtggagtagtgactattgaaaacaataattaatatacaattaacgggtttaaatcaatattaatatattatgatatattacaggtaaaattctaaaattaacaattaatatacaattatacaatcttaaacaataaacaaaataaataatattaactaaacaaatacaattaaaatttcagttataaaaatattgtaccatatatttaaattaaacaaaataatacgatatactatagatcatccttataaaaaaatcaattttcttatgaatgtacaactcaatgatgtaacattatgaaaaacaataattaacgagtctactaaattaaaaaataattttgactaatttttgatcatgtttaattctacaaacaccaatatttgaacaatcaaaacccattattaataatctgcacatgaatcgttgaccatatatacacacataataatcaatgtgcatataaagaataaagtaaatgtatgtattcaataatttaaaaacctggaacacagaattcatagtttctactagtttttcagtgtttaaattaaatgatgttgataaaacattttagttaattttctgaaacaacttctttaaaaatagagaaacctccagcataaatttagtttgaataaatttaaattttatgattttatttactccatttgtgtttgacgaacagtccaagtctagtataacacagactgatatataatttggttatctacaacttataatatgcatctactttgaagtaattaatcatatgtcaacacatactctctccatattattttaaatgatattttagagaaaaaatttagtttcatttaaagtgattttttttaatttttaaatgtatataatattttttgaccaataatattttatgatatattttaattattgattgaattagttataattaataatactttatatgaaggagataaaattaaatgaaaattttgtaatttctaaataaatgcgcacaaacaataaatttgtcaaaaaacaaacattggggaaaatggtacccacacccaccataagagagtaaatgggtcggatccaaaggacagtctcgtaactgacaaattcacgccacgtcataccaacaaactgttgctgatccaaacacacgccgtcatttagcccggaagcgcgtgacatttcacgcgccttctctctatctcacccaatcagatcgttttaatggttgtttgtttaatcgatcttcttcttcgtcaagtatctcaaaatcaaaaacaagtttgcttcattcatacttcaaattctctcttcacattctccactctctgcttatgttaacgtagagagagacggcgacgtagaaggagtaggaggaggaggcttcgtcgacaatgcgagaatggctcagtatagacaatcaggaacagagaggtttttgggaggtcgaagcggttacaatccttatgtcaacggtggagcttcgtcagatcacgtagcgatcgggatccgtaacggcggtggtagtaatttcggagttgtaactcagcacgggaaagctagtcgatggcggcgatctactcgattagataggaatcgtcgttgtggtgttggctctttggtgtttgttctttgtgttgtgctcgttgtttgtgtctcagcttactattatttctctggttatactaatttcggcaaagatgataaaggtcagtgttcgatttctctcgagctagatccttgatttgagtatgaatgtttagctgataggaattggattcgagaaattgatggttggaataggataaagaagctgatgcgttgttttacgttttatgttgcaggaattgatacagctgaaggtgattttcttacgaatgtgtcaagaactgatcctttgaaaatacttaagtttggtcatggttcagtgttacatggaagagattcgagagattgggataaggatgatagaagaagggatgaagattataatgaggatgatgtagaggataaatctgttgttgaggagaggtcagtgtctgaagtgaaaaaggatgtatcgcttcggaatcctttgaagggttcggattggaagggggttggtttttacaatgaagctggacgtgatgagctgaagaagtatgaagtggagtatcaggcttctcttgtaaaaggtggtcaatcgttgaaagagaatgatgggcatcatcagccatttgatacagaatctaatgaagatgattcgattgattctcatgatactcaaggggatgaatatgttgacatggggcatgatggggatgaaaatgaagaatcacacaaagataatcataagcacaatgaggatggtgctgaagaatcacacaaagatagtcataggcacaatgaggatggtgctgaagaatctcacaaagagactgcatctgtgtttcttcattccacgaccaagcatcagaaaattgaaaaggttcatggagctacttcaaaaaggtcacgtgggaagtcttctcttcttagtggtaagtcggggaaaacatcgcaaactgatgcaaaaagaagagctcgaagtcacagattttcaggtaatgtgttataattagctgagttaaagaacatattctgggtacttgctactcagaatactcttgttgtttaaatcttataggcgtatcttgtgagatgaagctgttgaattccagtcaacaaatacaagagcctttgaaaactcaaaattttgctgcaccctccttacaatacatacagatggaggataaacctgatggagaagaacagtgggagcctaaatttgcaggtcaccagagtttacaggaacgagaagactctttcttggttcaagagcagaaaatccattgtggctttgtcaaagctcctgaaggattgccaagcactggatttgacctgacagaagatgatgctaactatatcagtaaatgtcacattgctgtgatatcctgtatctttggaaactctgatcgcttgaggcatcctgctaataaaatggtatgataatgtaagcccttgatgtattttcatgttgtagttttcttcttatttccacctctagaatttgaaattcctaaccactattctctgttagcatcgggttaggtacatggaaatagtccatcttacatacatggagactgaagacattttgtagcacttagatactcactagctaagttagatcaactgttgaacctgaactgagtgaggagtaaactagtttttggcaactagatgagatgagtagttgacagttgtatttgagtgcaaaatatcaaaacaaaatattggttgcggaagaatatcccgtgatgtatttatagttgccataaccagacttgcaaatactgagttatgaatagttgaatgccaggcatttgaaaaaattgtttgatgggtgtttctgtaatcatgaattcaaccatctcttaagctctatgcccatcaggacactaccttctggttccagtgacttgttagtagcttaaaatgcgttcattttggcgggatcattatagtgcaataacagccttcacatattttaaggatccgcaatagatgtatatcccttttgtatgtggttttctttgtttacacgcttatatcaccaaaactatattcattacttttgctaacctaggatttctctcttcgtttaggtaagtagtttgtcaagaaaagatgtttgcttcgttgtgtttgtggacgagattaccatgcaaacactttctgccgaaggccaagtacccgacggagctggattcgttggtctgtggaagttggttgtggtgaggaatcttccttacacagatatgcggagggtagggaaaataccaaaactgttaccacacagacttttcacttcggcaaggtgagactcatgtcgtaggaataggtttcaataggtctaactagcacaacattctcccgcagatacaattagccaaagttagatcgactagttgtcttgtattaatgagaatctactggagaggatattagttgtctagcatatgtatagtttccatactaagctacaaaatgcaagagtcaaaatctgaatacgttaaagtttcgatgttggaagttgttttcctaaagctctacaatttaaaacagaaactcatccgatgtgtgtgttctttaggtactcaatctggttggacagcaagttacgtctccagttggaccccctagtcattttggaatactttctgtggcgtgaagggcacgagtatgctatctccaatcactatgaccgccattgcctatgggaagaagttgcacaaaacaagaagctgaacaagtacaatcacactgtcattgatcagcagtttgagttttaccagtctgacgggctgacgagattcaatgcttcagatccccacaagcttcttcccagcagtaagttcttttcgataactgctataagacatgattacaaccctgcttagggagcgtgttctgtagtatgtggcatagctgcctgtgtttgctcataacatggacggtgaatgagattagaaagaaactggtaaacaataaacaaataccagtgtgagttgaaaagtaacaaaatcgtatcaagcatgataaagaggttgaattttttttgctaacgatttgcatctgaaactaggctgatgagtgcatgtggaatttaacattgaaaatttgccgatggtgtgcatttgtctgaaactcatgtgaaaattggtcacacgtatctgattgcagtcatctgttattccagtctgtgggttaaatgcttattatgcctccaagctatgcaatggtcgacgaatagatgttttcaatacattcatgtttttcttttctcactttgtgactataatcctcctgtgtctgctgtttgcagatgttccagaagggtctttcattgtacgggaacatacccccatgtcaaacctattctcctgtctttggttcaacgaagttgagcgcttcactccccgagatcagctaagctttgcatacacttaccagaaattaacaaggatgaatcctgacactccatttaatcttcacatgttcaaggtaagattcatgttccaataaccctccatgaaactgttacgattccacattggcctgcctgatgcttatagatatcattcgatttatcttcataaggtttataacataatcctgaatgaaacgcctatcaagaagaaaaattcatgtcttttttccttctgtgaaactttcaggattgcgagaggagaaaaatcaccaaattgtttcgtcacagatcagaggagaagcgaaaccttatacaagcagcaacaacacaataacagaccactttttgaatgctgtatagtatcacggctgtacttactgtgagtaagagtaaaacaccacagttatttttctctgagaccaacattgttgtgagaagatcgacacacacatttcaggtgagaacccggtttaagggtatacgaatgtgatggtgattttacgaaacgagagagagggacaggtgtttcaattgaaaaaaagaaagaaagtccgattcaattcattaacagtcgtctcaatgttttattcaattcattgcttctgtaggcttgtagtttgtatcagtatgattgctcataaagttctgattgattatctcgaaagtaatttcagctttgggttcctcttctcccttggtcagcgttgccaccgctagtttggttctgacttagttacgatatgatattgggtataatcagggttcaatcacatatacgtgtataaaaacagtttctccaaacaagtgacacatgaaatttctgaagaacccaacaaaagatattgtggaaaaatggctcggccacctataagaatgccgcctctcttcagccgatgataccaaacgcaatgctcttaggcgctagattttatatatatacacgttcgtatgtggccaaacaatgttatgaacgtaatgaactctcttgtcttcggagtggtacagcttcaagatcatcttccagttgcttgttttgccgagcaggccgtggtgactttgcagactcttggcgtcttagactgagaatgatgccatcctgcacaaacccgttactgtcttctgaatgttttggaattcgcagaagcagatgactatcctcctctgatgataaatctgcattttggttgctgttaattatcgaattatgaacaaagcttgaaatgatcatatcctgcaaacaaccaagaaacggaatgtatgcttacttcctttagactctccatcaaccatgtctgttgttgtgtgaagaagaaaagttccagataggattgtgacgaacccacacaactctgtcatgatctgtgttccgctctgccgatcccaatcctgtttaggcattgcaataatcagacaaacaaacagatcttatccttgtttatggcctcaattgttttgtttgcacggtgtttcttttagaatataaggagtatagaagaaaaagaaacaagtaataccttaaacatgatgacactagccaagatcgtcaacgacgtgaacataacataatatatgggtgaaaccactgctgtgttgaacgtatcaagcgcctgccagttacaaaaagcgagaacccgaaatgaattttcctaaacctgcatttcatcccataacattacaggagacaaaaaatgtgtagaattggcactttcacttaccttgtttaaatagttcatttgtgttatcacgcagaaaagaactatcacggtgaagacccatgtttgcgggtaccctaactgattcgttccagaaaatgtgagtttcaacgctattccaagcgccttcacgctcataacctgtttgcaatcagtcacgcatattgtcactctaacacggtagatgtatgtatcaacgtgtaagattatagagtgatcacgtaccgataatgatcctataagagagcaaacaccgatatataccatgacatgggattgcccgtaaagtggtataaattgaactataagtacaatagctgctcctaccacagccgcagcgtagaagagaaaagctgttaaaagaaaacacaatgtgtcacgaaaactatcatataagtcttagttaccagattgagctttgagctttgaaagagagagagagagagagagagagagaggtttgtaccaggttctgttgcaagattccaaacttctaaaacggaaacaatatcttgttcttgtggagcatgtaacacgattgtaaccgaaccaacgatacataaagcacaaccaaggatcccgaaagtgtgcaacttttcttgtaagatgatatgtgctagagaagcgctgcaaaaacacaataaaaacctctatgactcaatatacaacttggatcattaggactacctaatgtaaaagagtacctagcctagaaaacacatttgttatgcgaaacttacgagtttgttcacacctgataataatgctaagcgcaccaagaggagtaactagaatggcaggtgcaaacgcatacgcagcaaagtttgcaatttcccccacaatcactacaaaacaaaagacaaacattgtgtctaccataaatgccaccacaatcttccaagaaacaataatgccaacaccacattgcacagctaaacctcaggtaagaaaagtcttaaacgaaacatgtaagaatcaaagaaactcacttgttatcattcctatccaccagagaggctcaagcaagtaagaatagcctccagaccctacacaaatgtcaccaccaaatttagagaccattgcaaagaagattttgccagattaaacagcaaaaaagcttcaatttttgctacttaaatctcataagtctccatttcaacacacatttcaggagaagctcacacagattgatccataaacattcataaacccaaattcctaagagaaaagatgatacagcaactaaaaagcagagataaacctgccctgagaccagaagcaccagctttcttaagtcctttcttcttaacaatgaagctagctccaatgaatatacttgaagatagagccaacactaaaccctttacattatcagacgacattcctttatacgcatctctccaacttccactagaatacaccattgcttctacagaacaaaacttaaccctaaacccctaaatttttaacccacaaggccaaagacctgagctttggctactgggtattctcaattcggcgaattacagtgaaaagtcgaaagctttcagatcttaaacccaagtcggtggctttgggtaaggagatgaattaggggttcgagagcaaatgttgtagatcacaacaaaaagagacaatgggagagaaggaagaagaaagtgaagtgatgaagaatctaagaagacgcgtaacaacccaagaatccaataagaagagaaaggtagataagcgtttgcgtgtgtttgcaattgcatagtgaagtggtgagaaaaagtaactcctttggaagctctctctttttaatttgtcttccactttacacgtcttcgatattagtgaagatcctatctttttatacgaagccaatcttaaaacccaaaaatttacattagagaaaagtcacacttggtgctcttgtcactcttgctaggtgatcagtacaaatacttcttaatgaagaatagacataaaaatgtaaggaggtgatttctcttgtcaatttttctccttttggaaatgagatcattcccatttatttgttcttttcagggtggtttgcaacctgtcaacggttagcttgccaccaaattgagtggtctacctttgcggtgagttttgccactttaaatatcttttaatccttttttttatcttatagtattaagcttgtgtttcgttgtaacgatttctaggttgcatgtttatttagagagacgaaaacctatactttttttcttcatgaaagtttactgtttctgtttggctttccgtggatttaataaaatagattttttgttgtaaaacaaaaaataaaaagaataaaagaaagttaaaatagttgttgaaaaaaaaatattgtatatttacatagaatgtatccttttttccataaaagttcactcgtttggctctctatagaaatttttatatatatccgtttaacttaatgaaatgaagtctttgttctaaaaaaaatatagaatagaagaaggctacaatagttgttgaaacaattaataagaaaaaggctaaaaagagtcctaaaatgtaaaatcttaaagcaaatgtaaatagggtttgaatttcaattcgatacagtccaagtccaattgatttttggttttatcaaaccaatattcattgtttttgttcaagtgaatatgttttaaggattaattagatttggttttattcgattgtgtgttaatacaaatcttctttttgcatccattgttccgtgacaatatcgaattgaaattctctctatgagtgtttgcgacatcgatcattctcattttataggtttagggtttttctcgttcactagggtttgtgttgtttgatcaatcgcatacctaggcctcgtgttgtaatattacgactgtatccctcctagatttagaggtttattagatcttgttttgattcataattcatgtggatggttttcactttcaggccaaatcatcataaatcataatcaatggggttcaaatttgctccacatgatgagtcgtctatgaatgtttctcacaagtctgttgctgtttcggctcatgttatttcccttcatcagaatagtttctttgacaagtagcgctggagagctatgcgaacaaggatgtaagaattttaagctactttaacatatgatgtgtcttgatagtggcttgttcttattttgatttgctaaaccctaattcaggatttgtaagaattttaagctactttaacatatgctagcttactacacaagcttcctgttgcaaggactgatgatgccaacaaaaagattcttcatcttgcaaccttgcttgaggattgactgatgaagtctgctaaatcattggaggattactcaaattcagtagatattgaaaacagtgtagagattcttttgatacaacttagaaaaatctattatgaacggcgtgctgcttctactccaagttctgttggcgtgaattgaggggttgataagctttaagcatatcctggagactggcctctctcactcttgtccatgttattggttaatttactactctctattatttgtttatttattactattttggaatgatgaattgatggtttatctctgatcatcggctctcgatcttttacttttctagttgagaaatatttttgctattgattttgcttatttttttatgctattgatttttacaagtgccaccatcaaaattttataaaccttcattctaatgtaattttgagaaataataaaaacaactgtttacattttctccttttgcccccaacatcttaaaattaatcaactttgcccctaacaaaagtttggtctagatccgccactggggttcggtaactccattatcactcatttttctatataagaaaatactgatggaaatttagttaaaattttaatctttttttaaatcttgataaattagaatcagaccgcaaaagcggacgattaagtttcatgttgttttaactcaaaattaattgacaatacaatcagtgaattacccatatcccttagatatatgtgttggttccttcaattttccaatgtagaatcttaacacatcccatgagatgataaatcctactttaggaccggtaatcgatccttttttaggccattctacttagactaacaaacgaggctctaatattttgtttccacctaataagttttcttttatttttcataaaatcataaattttttaatttttcatattctttttaatcataaactacgagaccaaaaatttccaaaaataaatattctattaacaaattgatttaaccttattaaaatattcataattgaacttttaaaaactaaaactaaaaacttcattgacctagtgtccaatcattttatcttggtgacgatgatttgatcaacttcctctcggtcaccatcgaaactcaacatttataattgcatatgcatgcaggaatgaaggaaagggcgtcctcattattgcaaataccttgcccattcctcttctttttacatgcaccgcacatctggctacgacgcaaggtttaaaccattcgctttttttttaaatattttcgtgacaatcttttgcttcaaccactgttcctattgaagcaaaacatttaagacctaatgtatcagtttcacatttttaataaaaagaaaataatactttcttctttctttatttttattacgatgaatggtttaaaaaaaaaaaaaagagatgtatggtttaaaaaagtttttgcgcatataagtgaaaaaatgaaactatcagatacgtaatcatctattaattcttgacaattatgtcgtcattacataatatcaataatcaaaattcttttatcttttaaaaaaaaattattttatttttccataaaaatagcattatattggatttatgaaatcaatatatacgtgttgtttaagccatataggcagatttatagaaccaaaattcgtttatcaatgatattaattgcatagagactgtacaaaacatttatcttgatgaggaaaaatatagtgcaaaaatgtatatatttatgaatatataatgacaaaatgtataatgaaaaaataaaaactttaacaccctaaaacctaaagacattattgaattgaataataaaataaaatattatattatattttgattggccagaaaccaacttaaatgaacaaatgtctatcttccaaatcagcaaaaacaaacttctcgaactatttatgtcattgtgaaataaatcattattcttgtaaactattttattctttttcattcaaaatatagtaaaataaaaataaatcattcagtttgactattcatttggtatttgaattgatataagaagacttttcttttaatcaattaaatcattcaacgaacatctctttgcaatcatttaggaaataaagagttctttgtaattttctttggtaaaacatataaaactatgactgagatgcaccataattttaaaatccaaatcatccacactctatacaaccatatgctatattaattagatctagattttggggcttaggcatatcctgtttagagaatcaatatgttaccgatgatcaacttttaaaacctgattatttagaatacattagtgtaaatacaaacctgcaacaagaatgatgaggatagttagcatggccagcgaaagttgaaagggtttactcatcctttatgacacaaatgagtaaatgatgttttaaaacttagataatatgaacaaagtgtgggcaagtatctatataagaaaatagatgtgaatcactgtgatacatatctaatttaaggtatccatctcctttaattttggtgtcaaggaccagttctatagtgatttttgtttattacctaactaacccaaggaagaccaagttatttttttctgatttattgtaattataattgaaataaacctattttcacatcaatacaatgcttgtctcggcagcctaaacctattgaaataaacctattttaaattgtgtgatacatatccttttgcccaattgtatgtttgcccttatttgatcattcatatttaattgttatgtcataattaatggcatactcgtatgttgtaataatcaaagaaacgctaaagactgaggaagccaatggtcttccacttggcttcattaagcttaaaagtatcgatgacgcaagataattgtcatttttattgtttgtcaactcgagaaccaaacaaggattagttagatgtttgagttcatgtgattacaagttattcattataactctcaaaattaggcaaaataatgagtttacaccgatttgtacttgatcgtacgtggttacgatttatcaagtggttagtttctttttcaagtcgtttactcgtaaattcataaggttacctactcgtgaaggttatgatgaatacgtagttatcacatgcactgcaacattcaatatgtgttaggttttcggctttgtcaagatcaatagaggcaaattaaaaaatgtggcatagtatattcagtttttgtagacaagattttttttcataatatatagaaaaaagaaatgttacctttttataaatattttcactaaaaacaagatgtagtgagttaatgttacaaaaagaaaaaaaaaatcataaatgttaatgttttgatattttcttcaaagaaaaagttcttaaaacactatttaaaagcaactaactaagcctaatttattttaaatgtggccttttatttttctatttttgtgtggcttagggcaaatgccctttttctccttaagtaagcacggctctaggttttcaggtagacaaacatcaaaaacgataattttcttgtcgccatcaaccattttaagcttggtgaagtcaagtgaaagaatactctcttcttgagacaatattcatgtattcaaaacacgaccggtcctcaccagaagctagaagacaaccattaatattggtatgattctcttattttgtgattgatcttgatggagaagaagacaaagcaagctaaggatgagaaacagacgtcttctgaatatcggatgcatatatcaatagaagaggaagaggaagaaagaaggagaagaagaagctgctaaaggtaagtcaccaacaaagtaaaaattgtatgatgataaaatgaacaatatgtcaaatggtttaatagctcgaagtctcaaactacatatccataattctgtttattttttagaaaattagattaattccattataaagatttttttaaatacaagtttagaaaatatatactatataactaagttgacaacaaagaaaaaaaaaagacaagtaaaagaaattaaaataaatatttcatctctttcaaaaaatccaactaacatacgtggatgaaaaaccaccagcttataaaaacttctcctttttgtgatttctcacaacaacttttatgccatagcttttttttttttttgtaggaagatattaaggatcatgagcatgttcgattcattctctcttccatcatctaaactcaacatttatataagcataagcattgagcactcacagaaaagacgtccccattgcaaataccttccccattcctcttttttttacatgcagcaacacattctttcgtgtcgcaatattcataacatctatttctaccattacaaaattgcaatactatcttttcatcacattttcttctttgtgcttcaaccactattcctgttaaagtaaaacatttaaaacataatgtgtcagttttctatttttaataataagaaatattactttcttctttcttttattttgtcaaaactttctttttcttcatttttcgttcttttttggattcatttgattgtataccttatattttatttcattgaggatgttttaagaaagattttgggcatatcaaggaaaagtttaaaatatcagatatgtagtcatttattaattcttgaaaattttgtaatcataacataatatcaataatcaaacttattttctgtttttttccatcaaagtagcattatattggatttatgaaatcaatatataagtggtcttcaagccatatatccacattttaaatttacagaatcaaaattcaaaacattaatcttgattagaatgaaatcttgcgcaaaactgtatatctttatgaaatgatagggagtaaatatataatgacaaaatacaacttttaacaccctaaaatcgaaagacattactaaaactgaataaatataacaaaataaaatattatagtttgtttggcgagaaaccaactgaaatgagtaatttctatcttccaatcaacaaaaacaatgttcttgaattgttcatatcattgtgaaataacgtttttattcctgtaattgttttttcattttcatgcaaaatatagtaaaataaaaataaatcattcagctatactaggcatttgaaatttgaattggtaaacgaagactttgtctttattttattgaatcattcaacaaaaaatatattttgcaatcattcaacaagttaaagggttctttgtaattttcttttgtaaaaacatataaaactatgactagatgcaccatgacttgaaatgccaaatcatgtacctattacgcttgacacccatttagagaagcaacatgttattcatgatcaacttataaagactgattatttataatatattaaaatgagtgttaatataaatgcaaacatgtaacaagaattaggaaaatagttagcatgacaatcgaaggttgaaaggttttactcatcctttgtgatacaaatgagtagcatctgtagatgatgttttagaatttagaaaatgtgaacaaactacaaagcgtgtgcaagtatatatataagaaattagatgtaaatcactctgatacatatctaatttaagctacccatctcctttaatgttggttttgaggaccaagtctatagcgatttctaattattttttatttttatttatattagatatgtaaactaaggaagacccagtttttctcatttattgtaattataaaaatgtaattgaaataaacgtattttcacatcaatataatgctcgtctcggcgacgtaaacatgtgacatccgtaaaatgtgtgataaatccttttgcccaatttttaggccttattgatcattcgtttaattgcttggtcataattaattgagtactcgttggttgcgttgttctatttttttctttgggttgcctcgatagagcttgaaaagcaaaataacaatatacatttacttaagcttaatttagtatattggtttattttgtttggaaagggccaagcaaacatttttcctttgttcttattgataaacaactctcatacaggattatattatctcgaaaattacttcacctattctacttgaatgattaaacccgattaagaacaatctaagcgtaattctctcctctagttcttatcacatacttgtgaagagaaaaaaaattaacaacactcactttttaagctctttttgctagctttgaagtttacaaccatatgacaatattctagagtacttaggcggctctagccaacttctagaatacttatactaatctcctaaaccctaatctctaggatcttcaagaatcaggatcttccttaatctacaagcttatcccttttccatatttgacgagaaggaaattcaccatatcttctcgaccgacattcgtctttgatcaccatgccaagtcagcaactttacttggcttctcacatcaaccgctacatccctgccacgttagctcacacgtccatatcagtagtctctgccgtttagtgtgatctgatgcaacttcttgatttccgacagctccttgatatccatcagctcactattgtcagaatctacatcttcagaaatatgtttagatttttaattaacttaatcagcactaatacaaaaaagctattctcgaaaaaaaaagaagagttgattaatcttttaaaaactaaaaagagggaataaattataaagcagtttcccttgttgtgtgcttgtaaaatttttttttttcataaaaaggtattagtgttggtggtaatgacagagtaatttagtaaacatatattattttaagattaatttattaaaaaaattattgatttaacaaaatatttatggaacttaattttatcactttcttagaaagttttttggacagtcttatctctttatcataactcttcgttatgtattttgtcaatgataaatatttctaccttcataaaaaatgtttcaaataatcatgtttttaatcatcattcttttttacatttttactccttaagtttttagcaatctttaaaaaatatttacaatataaccttaacacatgtagatttatgtaataattcaaatatttgatataaccttaacacatgtagatttatgtaataattcaaatatctgaatatatatatatatatatatatatatatagtcaaaaatattttggttatttaatacaaaaataaaaaaaattgttaaaaatcatgagttctcccacgacatcgcgggagtccataacctagtatataaaatcattgaaaatcagttacaatctcttgttattcaatttataatatatgaaaatattcaaaatcaagtgctcttcaaaaattaacaagtattttgttgaaaacatcgaaattgttgtaaacgattaggttttaaggattgtttctctctgttattgatcacatgcccggctcaaacatggcctagactcagtgctactatatccaaaatccttaatgtgtattaaaaagaacaaaaaaaaaacttaacatgtaaaaaaaaaaaattgggtctttggatcctatgccccagcatctctgacacatgctctaagccggcactgattgatcaattgtacaaaatacgatatatatatatatatatatatatatatattatatggatacaacagtagatattaagtctcctaaaacctactaatgtgtcatataatagacatccataacataaattaattttagagatttttaacactcgtttagttgaaaaataggactaataagaggtataatttgaagaggtttaagaaaaaaaaaatgttcacataaaatattgtaagaaataatatctcattattgatccttttattatagaagattttagtttagcaaaactctattttagcagaacacataaaaggaacaaggatcaaatcctttatgttatggatataactaatataaatttgtgacataaaaattaggataacaagaatgaaatcctttaaactcaataaggaacacagatatcacaccaatcaaacaactccacgtgtcgattcctcactccttctcaaaccacagcctaatccttctgaaaactccacacaagataaaccttctaatctccaccgtccatctaaccacaatccaaaatctccaccgtccattctcatctcccccaaaaaaccttaccttcttcttcttcttcctctcctctatcgtcttcgagaaaccacaaatctctctttctctcaaactctctcaacaacaacaatggcgtctcttcaacaaactctattctctcttcaatccaaactcccaccatcctccttccaaatcgccagatctctcccactccgaaaaaccttcccaatccgaatcaacaacggtggaaacgccgccggagcaagaatgtcagccaccgcagcatcaagctacgcgatggcattagcagacgtcgcgaaaagaaacgacacaatggaattaacagtcacagacatcgagaagctcgaacaagtcttctcagatccacaagtactaaacttcttcgcgaatccaacaatcaccgtcgagaagaaacgtcaagtcatcgacgacatagtgaaatcgtcgtctcttcaatctcacacatctaacttcctcaacgtcctcgtcgacgcgaatcggatcaatatcgtgacggagatcgttaaggagtttgagttggtttacaataagctaacggatacacaattggcggaggttaggtcggtggtgaaattggaagcgccgcaattagctcagattgcgaaacaggttcagaagttaaccggagctaagaatgttcgggttaagacggttattgatgcgagtcttgtggctggttttacgattcggtatggtgaatccggttcgaagcttattgatatgagtgtgaagaaacagcttgaagatattgcttctcagcttgaacttggtgagattcaattagctacttgagatttgggaaaaattgtataagagaaaaatttgagaatcttttttttttgtgcaagtttaattttttttctcctcatcttctttctctattaatcaatcatataatatacagtactgatgatataataatgattctgagtttattatctttgtaattgttaaatttagtgaattcgaaaacgaattcgaatagtatgtttgcggattatgcgttttggggaatggttttactgttaaattgcggttaatctcggttgaatagagtagtggcaatgtcaacttattgcattgatgaaggaacatgaatgaagaagaactttgaactgttacattgtgaagaaagtgtaaatctatgtatgaatgtttggtttgttgattgatgttggactggattggtaggatatacgtgcaagccgaaatatgaaatttatacaaattttgagaccaaaacattttaatgatcttatgaaaacactagaacccccatctcacatacttgtacgatctacaccaacgatctctttgatcttgcatatacggcaagtcggcaaacaataactcttaccatacattacaaaggaggtgtgatcatttagttttggggattgctttgattagcctgggtaaaatacccgaacccgaagaaccaaaccgaactcaacccgaaaaaacctgatccgaatctaaacctaaaattttaaaatactcaaacagatcttaaacttcaaaacccgaacccgaacccatccgaacctgaacccgatcaaatatccgaacatattcgaaatatatatatatatacatagaaataatttattagtaagaatcatttttacatcaacttaagtgtctaaaatattaggattttaggatattttgtatagttttagatattttacctacttttcgatagattcggataaaaaatactcgtttaagaattttttgtgtattttcaagtaatttgaatttattttgatacaaaattttgaattttggatactccgagtaaacccaaatctcaacccaaaaaatccgattcaaacccgacccaaatccgaaatcttaaaatacctgaacggatcttagatttctaaatctgaatatccaaacccgaaaaactcgatccgaacccaattcaaataccggtacacctaagcctagttttgatagtcaaagttccatttggtttacattccattagttattttaatctaaactaaaaccattaattgtaaccgtataaaggattttcagcaaaacaataaataaatataaaaaacctgtctccaagtcatttttcttactgaaattcatttttctatagttaactaaaagggggtgctattcaatcatggatttgaggaaattcatttttcagtgttaattgttatcctatttttcagtgttaattgaatgaggtaaagaaagaaaacaaaaatttattttgtgatttgaatttttttaaaaaccaaatgttcggacatattttaagactgaacaagctttgattttacaaaaacgacgtgtccaacaacaaaatcatgatcaagaaactccttttccatctacttcatttagacaatattttaactattttggcagatttacaaacagtttaccaaaatattaaattattaatttatgttatagttttattattcctttcaaatttagtactttgtttgcttgttaattttataaaactacttttccattttcgtaataataatatatgttttcggttaatccgatgaacgttacattacatacttctagttttctatatatcatacacattcatcgtagtacccatactattagatcaatagaataaatacgtcgattctaattcgacatacgttacataccatgcaaaataatctcatttaatattgagaaagtgtcttttgtggaaaagaaaaaaccaacttttaaacgattgtattttgtgttgtagttgttgttcgtaaaataataatatgtattaaataaaaattaaatttaaaggagtaaagtataaataaaaagtgaaattctaaagtgtaaaaaagttagatttactcctctattttaaagtcgagtatagagtagagttgaaaatgtttttagagcttttacaaatagagtaaggttagagatgtcctcactaaagttacgaggtgtgggagggacggagccaatgaagaattataggggtcaaatgatcccagtgaacttttaaaaaataattgaatttttattaaaaaatatttattgaccccagtcaaacaaaagtattgtcccctatgaatgatttgttgaggtacaagtaaaacaaagtccaatataattttgtgaattataaatacaaaagctcaataattttattgaattatactaatgttaggtccaataaaaatctgtcaaaattaagaaagtaaaaacctaaataattgaacatgtatcgtggtagcctaaaacagttgagcttcttcctcttttgttttttttcatacaatcatcacatctttgaaaatcagattaaggctcgagactatagatttcaaggtaaactcttttatatatatatatatttttttatataaagtttaatttactatcaaccaatttcaatttgatcacttaagcaaaattcgtttgtgattaatttagtttttggtgttgttattctgtcattgaaaactcaattcgtcattatttcatgagttttctttgtaacgttagtcgtcaatatactcttttcttcttaatttttgatgtaatttgttttagtttctaatttaatctcacagtaatttttactaatgacaaaaattaaagttgtcatgaatcatgataaggccacggagaaaacaatttttatgtttgatttaagtttcaactcatgatttttatattgtttcttatttttgtatgtaggcaaggcaacaacaaaaataatgtatcggtttatgaaaagaaaatctccgccaccacctgatattaattttaataaattgccaagtgatcccgcaaagagaaaaagcattctaagttatcatcttaatcaaagagatgaggtacgacgtgaatatttgattaggggaccttgtcaacctcgtggtcataagtttaaacaaatagtaattggaaaggtgttacgccgttttaatccaaaatggtttgatttgtatggtgattggttggagtatagtgtggagaaagaaaaagctttttgcttgtattgttacttattcagagatcaagctggaaatcaaggagggagtgatagctttctatcaactggtttttgtagttggaataaggctgataggttggaccaacatgtgggattggatgtgaatagttttcataataatgccaaaagaaaatgtgaggatttgatgagacaaggtcagtccatcaagtatgctctccataagcaaaccgatgttgtgaagaatgattattgaatccggttgaatgcttccattgatgtttctcgacacttgttacatcaaggattatcatttcgtggtcatgatgaatcagaagagtcaacaaataagggtaattttttagagcttttgaagtatacagctggtcagaatgaagttgtaaagaaagttgtgttgaaaaatgctcctaaaaataaccagatgacatctccaccaattcaaaaagatattgtccattgcttttcagaagaggtaactagatctattattgaagagatggataatgatgtctttggcttgcttgtagatgaatcggctgatgcttcaaataaagagcaaatgacagtagtttttcgcttcgttgataagtatggggtagttaaagaaagatttattggtgttattcatgtgaaagagacatcttctttatctctgaaaagtgctattgattctttgtttgctaaatatggattgagtttgaaaaagctgagaggacagggatatgatggagctagcaacatgaaaggagagttcaatggactgagatcattgattttgaaagaaagtagctctgcatactatgtgcattgcttcgctcatcaactaagttggttgtcatggcagttgcaaaaaaacatgttgaagttggagagttttttgatatgatttctgttttactaaatgttgttggagcttcttgcacaagaaaagataagatccgggaaatccatcggcaaaaagtggaagaaaagattagcaatggtgaaattaagacaggaactaggttgaaccaagaactttcccttcaaagacctggaaatactcgttggggttcacattataagactttgttgcgtcttgaggagttgttttcatctatagttatagttctcgagtatatccaggatgaaggcaccgacaccaccaaaagacaacaagcatatggtattctcaagtattttcacacctttgattttgttttctatctggagttgatgttgcttgttatgggactcactgatagcttatcaaaggctttgcaaagaaaagatcaagatatcttaaatgttatttcattggtgaaaactactaaatgtcagttgcaaaaggttagagacgatggatgggatgcttttatggctgaagttagttcttttagcgagaaaaataacactgcaatgcttaaaatggaggaagaatttgttgattctagaagaccaaggaaaaaatccggtataaccaacttgcatcactataaggtggattgtttctacactgtcttagatatgcaacttcaagagtttaatgaccgctttgatgaggtgaattctgaactacttatttgcatgtcatctttgagtccgatagattctttttgtcagtttgataagtccatgctcgtgagattgaccgagttttatccagatgaatttagttttgtggagcgtagatctcttgatcatcaacttgagatctaccttgataatgtgaaaaacgatgaaaggtttacagatttaaagtgttttggtgatcttgctcgtgtgatggtagagacaagaaagcatctttcacatcctttggtatatcgtcttctaaagctatctttgattcttcctgttgcaacggcaaccgtcgaaagatgtttttccgcgatgatgtgttgactacattgcgtaaccgtatcggtgatgtgttcttaagtgattgtcttgtttgttttattgaaaagcaagtacttgacactgttacaaacgaatcggtgataaaacgattccaagatatgagtgaacgtagagttcatctttaaaaattttatttgtgatgacattgttatgtttatagtaaagtttatcgtttcgtttaaattttttttgaccccagtgagtcattgttctggctccgccactgtgtggcttttgactatggcaacaatatggggattgtccatagtggttccccttgataagttcaatattagatatttgaataataagataaagagaattggatatagctcattcctattataaatgctattatctgagtacactaatcgtcgagcaacgtataaagaactagaaccgattgaataaaagatttgtaccattaatagcaaaagaataaaggtagactttggaattgcttatggcttaaatgatggcttaaatgggagttgagtatggtcgttttttccatcgttgattttgataccaaaacatacgatttttataaactgtaacttttagtattgacttacttagtaattgaaggctagtaattggagtctaaaacaattaacatacatacaggcggacacagcagaagacagaacatattggtaagtggtaacaaacacttaaacggttgatcgaagtttgaacatagagagcgagagaggagagaacacacgacaacatttatagtctgagtcctttccttcaacgaccagagagactaatctgttgatagtttttatcaacagactctttaacagcatcaaccactagctgcgtctttcggctaatactaggccagtacccatcaggctttgcaccattgttcttgatttctccaaccaatcgagcaaactctctcaccatacatgcctcttgtggaagctctgtcttaaccgtatgctcactcgggggactaacccacgcagtcacaaggtcattgaaccaagctttagtgctcgtggtaaacgacgcctcagtctccttatacgggataatgaagtcgtgtacacggagtgtgcctttcgttccaatggcagttatctccattgttaagttagccaagaatgaacaatatatagttgcagttcgtccatcttcccaactcaaagatgctccacaggaaagtatcactcctgcttcattcaacacagcaccggggaaagcagtcacagttttcggaagctcaaagttattagctaaaagagttgctctgatcgcgtaccaccccgcatctcctagcgcaccaagcccgtcaagaccaggtttcacacggatatcgtttttaagaaaatcttcatctccagcaaatgagaaacaactctgtacctacagattcaaacatcaagtagaaattaagactttcaagaaacatctcttgacactatctaatctttaagaaactaaactattttatgttgttcactatcaaacatacacaagccagaccaaacatatagactgagaacatctactctataaagctaatctgagaaccattaaccaaagcttttaactttgaagaaccacaaatccaattccaattcactgagaaccaaagctactaaatttaaagaaacccaaaacaaactccaatctattcaaatgaaaaaaaatctgtacctacagattcaaacatcaagcctttcaagaacactatgaactatctaatcatcaagaattcaagatactataaaccaaaaattgagagaaactacacaagccagaaacttgatcaaacctatacactgagaaccaaagctactaactttaaagaaacccaaaaaacatctactctataaagctaatctgagaactaaagcttttaacttcagagaaacccaaaacgtcaaatccaattccaactcaaaacatttcaaaaagccataaactttcatgaaaacttacagttttaagctgaccaaaacgttcagaatcagaaagaaactctttaagcaaagcagttctaggattatgaacccacatagtaccatccataatctgaacaccattagcttcacaagcatcaacaatcttatcaaactcagttacgttcatagcaacaggcttctccaaaaggatatgtttccctttctcagctgctttaatagcccactcaacgtggagactagtggggagaggaacatagagcgcatcgatctctggatcttcgagaagagattcgtaagagccgtggattttggttgattctgggtagttattggcggtggcaaaggctttggctttttctaaagaccggcttgctacgccggagattgtggcgttgggagcgaggtggattgctcgagagacttttcgagcgatatcggcgcaacccattactccgattcggatttgggtttcggtggccattgttgtggttatgggtttttccggcgagagatgaaagaaagtgttgatagagaagagagagagtgttgttgataaagaacgaatgaaataggtgaagttgttacaacaagacgagataaattgttaatgggagattttgaaaactacctgtttttgagttttcatttggaaaatacatctttttctattttaaataaaaattgtaattcttaatatataagatgataaatttatccagattataaacgttgttttattaataaattaaaataaaattcgaaatttagaaaaacaaaattcaagtaaaataaattcgaattcttaattatgttttcaactattttttgagataaaaagttatttgttttagatattataaaatttaacaaaataatacggaaaaatattctaaagtctatcacctaataaaacttatttgcttatttttttggacgaaaatttgtttaaaatatttaagataaaaattaaatttgaattcatataaagtctatcattttatttattttttatattaaaattttatgaaacaatatttacaaatatttctataaaagtctatcagttgataaagtttaattttactttttggacaacattttgtttaaaactatttaagataataattatctttaaaattattagttacatcaaatttgtatttatgatttttttttgttttaagtttttttttttgttattccctaattttactgaagctgttttagtattttatatattgaaaattaattgtttaaaaaaagaaaaaataataaggtatttttcaaatgaaaacccaaaaataggtcatttttccaaatttactcatttttaaataactttttttcttatatatcaagaagttataatattcaatctatttttagaaaaactaaggaaaaaaacattaggctaattgttttaaaactgaagaaatgccataacttttatggtttagagttttagagttttaacatttggcttttagagcttaaattaatatttttgattttgattaaaagtgtaggttttatgatttagaaaataataagaattcgaggtttgatttccagtttaaagtttaggcattgggagcgagatggatggcacgggagaccttcctagcgatttcggcgcatcccgtcacaccaatttgtattggcttatcgatggccattggtgtggctgtctatggtgatagatgagtgaggctggcgagatataagagaaccaaaaaaagatagggaatttaatgaaaaaaaacctcaactttggtcagatccatttttaaaccctgaactatgtttttagtaaaacaaacgctgaactaaaacctgttaataaacttaaccccacagtaataaacttaaacatgttaataaacttaacattgatataattatggtaaaatagagaacaatgaattatgtttcataagatcttccttttcaaattatttaatttaatctttgcatatttagacttgcagcaactgtcaacaagtcggacacaacaaacgttcatgcaagcgtaaagcagtgccaaaaccacccaagaaacctcaaggacgaccaaagaaaaaacagaaaacaatggatgaagagaaccctatcactcaaccaatacaatcttctcttcaaagtgaatgcttgacaagtctttactttaaaatatcttgtccctctgaaacgattgtttttttttgtgacaaatattgttgtgttgcaacagcttcgatagttatgttggttggatttatttaagcatgactctttggattattttaagttgttgtgtctttctttcagcttctaaaatccaaactaattaagcaattcaaaatcatttagaacactaaacgttttttttgtaataaattcaaaacagttttaaagaacatcatgtggtttttgcgctaaatacaaatgtctcgttgttgttttttttggaaattaatatcccattaatatttaatactgtggggttaagtttattaacaggttttagttcagagtttgttttactaaaaacatagtttagggtttaaaaatggatctggccaaagttgaggttttttttcattaaattcccaaaaagataaataaggtagaaaaaagattacttcgagtcgaagaccaaaattttgaaaaaaaaaatctttctgataatatcatttctatgtagaaattttttaaaaaattatttggtactctctctctttctgaatatttgtaatttaaggtttttgcacacaaattaagaaaatatataaatttcatttaatttatctctttcctataaatatatcattaattacaactaatccaaccaaaaaaaaatatgatgtaaaatataattggttaaaaactattaaatacatttaatatttgcatacaaaagtgaaaacaacacttacggggaaaactaaaaaacctttaaactacacttaattagaaacagagagtactattaattgtttaatttacctatctattctctttaccatagtcatttacattttacaacctttatgttttgaatcaaaaatgagtattttttcatcgatatccttcaccgtaattcatttttctgatgtctctactcgtagtttaaaattttaaaataataataagctcataatgctaacattcagcgtgtcctatttgcttttgtgtttgtattgtatattatgtcgattggaattggaaggtaattgtctcgtccatttaacataaaattaaaaaatcttggtaactatagctttaattcagcttgaatgtacagtttaactacattttgcatctttgtaaccctaacaatgttttttttcctttgatgattctttgtacccttcatcatcagtcatcacctactatttcaatcctaggtacaatcaattttcgcgtctctttaaacaacattctttcttctaactaatttcaccatcttattctttaattacatatctattctaccataagctttatttcttttatattactcatctcattatacttgtccgagttagttgcttgtcaagaagacgattattctataacaacattcaaatgatgagtatacttagaacataaactgatatctataacctctttcacatgtattattagatcattgaccatcacattcactcaataaccttgtttaataacctcttttctttaattattttgtcttataaggtgatttaagatttgggaacacttagtctagcatatgggagggtaaaaatatcaaaaacaaaaacatataagaaaagtaaatgaaaccaaaaaaatcattgggcaatatatatcgagaaacttaatatgatttttcaactacaaaaatatccctagatgcttacatgatccatacggtaattagtgggattagtatagatgtgtatgtcatgaaagtctatatattgagaataagtcaccaaatgttgtatgtcacaaaataatttgtaatccttaaaaaccagtaattaagcacaaagcaggttatatgtgtatatatatgttacaaacctgagcaacagtagctaaaaattgctaagatggtgatcgacaaacttgtagttgccacttagtatgctgctttccgatagcaagaccaatatctcccttaaataaggatattgaagatgatattttcaaaattttggtaaatgaaagaacgtttcattaaaaagaaattgtatacatattacacaaacgaatatagaagagagttggaacataatcaatggacaggtccaatgggagtccaattctctagttttggttttacttaacgttatactaataaatacttcgtatcaagaacagatatatcttcaggtacgatctttgcagtaatgtgaacaatcaataacggataaatttttactaaaaatatagccaaatcagaaaagacgccttatcccgtaaattaaactacaaccactaatagataaatcctcgaataaatcaaccatctatttcatgcaacgttaagtaaaaccaaaactagagaattggactcccattacttgaggtagaactcgagaatcggacccccattgcatcttctcgtccacttcatgtgacctgaaagagtgatgaatcgtgaatttttgatcgtcgggaattgatcttctcttctagttcatgtgacacgaaagagaatgaacgtaactctgatcgtcagcaattgataaatatattggagaagcataccgtatcgaggagaatttgaaatgtgtaagtgttggtcattgtaatcgttttctaattgtccattaattatcattaattaagtaattaaatttatcgttatagagattctgattggtgtctatagaaaattgttttaacgcaaataaaatacataagtgtgttgacatggcatcttgaaaaaactttatagaaaatctgatgtagatggtttgagaggcctcaatgaacttcttagagatatccaccaacagtaattattgaattcaataatagcttaacgaatgccaaaaaatccttcaccatgaggtttcaaatgcttcatttgcttctagctaactatggttttgagaggcggcacgaaaaaaagtgagaaataatatttagctatttacttgatacgtaacgacggtgcaaaatgaagagattttaatctctttggccccttttggttgaatcaatttttgaaaaacccccacttattctcactaccccctctccatcctaacctatttgaaatacaattttacccttctcttttatcctttttaattttctatttaatttttgctaccaaacaatctattaaaatcaaccaatcatatgcattctctttcttatatcattaatcacttaaacctacaaaaaacgctggacaactgaaaccaataggtacaactatgttgatggacttctacgaaaaacatataattacatatcgttttctttttctctttcattttcaagttataataaaaaagacttcagtcatacgtgttgcttataatggatactattaattttcttgtcgtatttatacaaattaatatgttttgtattggtacaactaagtacaacccgcacaactaaggtctattcacttggctagttttcagaatattataaaatatgaaaatttaaaaccaaactaagaaaacttaaataatgcatacacaattgtaatgaaattacataattagtttttgacaaaaatcatattttctaaattaatgaaactcttatcacaaaatctaacattcatacattaacaaccttatactttcatggttactttgtatattttaacaaaacaaattaaaaaatttaaatacttgtaattagataaatataaatacactgatacaaagtaatggtattttgatgggggaataccatatgttccatccataaaatttaattttgagttgataacaactagatttattatattctcgatattgtacaactatgacaaaaaatgtgcaaccgaatacaactgtacaactatgggcaatatatttttcagatatttatagatattttttagatatttgtagatattttataataaaaattagctttattcttttgtgataaaaatatttatttattttttgtcatcaaaaatatttaattttatagttaaataaactattttgttccctttcaaactttttttttccttttcaaaacactgttgtttaataaaataaaatactaacattcataattttttgtgttttgttttggatcaaaatacgttgatgtgttgattcatatttattttggagttttttttgacaaaaaatcttagattcatacataaacccagatacatagttgtacatgagcgtaccagttgtacctaaacgcttagatctattatcttagaaaccgaaagacagccgaacaattgtatctaaaccaaaaacccaacataattatatctaaaaatttagccacaattatacctaaaaccaaaaacacaatactatctaaagactcaaacacgaagtcttattgttctcgttgtcattctccttctcaatttctttctccttagctttctccttcttcccttttcttctagtttttatcattcaaaagcaatctcataatattttgttttaatgcatttcacaaactatctctaaggaacaaaattcaaattcattcgaatcccaattgtaatcctaaaaactaagtcataacagctattacaagaggcttttaagggacaatttcgattttaaatcgataattaactcaaatttgaatctatatatacatttttgcagcaattttgtgaaataaatgttatagttggaacttatttacaatggctgccactggattttaatgtttgtttttgataattagaaaaaaaatcttcaaattaaatatttgacttttaacaatcttccctaaatctctccacattaactacacgattagttactgaaataaaacttccaaaatatttaatatcatttatttactacaaaattatcattttttatattgtttttctccatgactataacaatttaattataatcgtcaaaccgcagagatatttgatagcatttaattattacaaaattacaaaatatttagacaataattcataaacatatcataaataagattaacattaataaaataaatgttttttttatgggacgggttggcgggacgggtttggcaggacgttacttaataacaattgtaaactataaaataaaaatatttatagatagatacaatttgcaaacttttatgtatactaactttaaaaaataaattgtttccgcggtgtaccgcggattaaaatctagttgtactcataaaaatccaaattataatcgaaattttatccaaaatccatcatttttaaacaaaatcaaagagaaaaagagatcaaactatcaaatctaataagaaataaaaccctaattaaacacaacaccatcaatcatcatatatggaatagagatggatctttggattgatagaaacaaatgaaaaggtaaaaaagatggatctttggattgatagaaagaatgaaaaggcaaaaagaagacgaaagattatacatggaatagagagaagagagtaaagagaagaagaagaagaaacaaatcaaaagttttgtttttgttgaattgagagaaaaataaattgaagatgaaaaaaatttgatatgagaaattagatttttttttgttgagaataaaagatccaaaattgttatggatctagatccaacatagaggttgggttgtaaataagtaaaaaactctagttttacttgtcttttactattattctgaattaaaataaataaataaacatatgttttttataaaggggctaactagagaatctttgaagctaagggggtggactagataaaaatccaaaatgaagcaaatgacctaactgctgtttgcaacatcatttggttcatttgctgttagctaaccttagtttttgataaccatagtccataggctaaatatcacagaatggtaaagtgtaagccatttcgtcaacgctacacctaaacggcatgaagttggagcttctaattaagaagaacccggtcgggtcaaaattcgggtcactcttctcgggttccccctctaattcaccctctttttttcattcactccacaattacaattacagtcgatggacgacagagccaccgaaccatcacggcgagtctaaaaatactcagagctcctataaatggagaacaccacaattctcacggttaaggaccttgtcaacgaaggaatagccgtcaccggtgcatcgtcgctattctcttccgctgcttctcactcgtcttccgaatcaaccagtacgaaccctaaatcacatcccggtgccgtcgattcagactttagccgtaagtttctcacaccgttgaactacccaacggttatcttcgggacggtagctcttccttccgaaaccctaaaatgtccgaatcgctactgctttcgattcacagacggtgatttgacaatctgctgtgatatccttggattcgaattccgcgcgattgggagtaagatttgtgttctatcttggaattttcttcctatgaatcattctggtggatttttggagataatcaactggaaatttgtggatagtggtagtttgctatctcggtgttctggaattagttcgtttccattgattccttctttgtattcatcgcaaaacggtgaccggaagtcacggtacagcgtttgtggtgtgttagagtctatcagccctgtgtctgttgttccttgtatggatggggtttcaagtgattctgtaaatcttcctgggttcttagtacatgtcatggcttgtgagtgtaaagtgtatagccgggatgcgattgattgcggtcacgcttttgagaggtctgtatttgtttacttctgtggtttagaggctgcgagttggcatcctgtggtgatgaagttagttggaagaaatgttgctctttccgggttgaaaaggaagttggtttatgtaagaggtgattctctgttggtgtttgtgactactgagaattctgttcttcatccaccttggttatctaagaaagggacagtttcgaaaactgttgttgataggagaggtaactgtggttcctaccgtggatatgttagaggtttgtatttgaaaggaaagcttgttgagatggatgaagatgtctggcttttattgacggatcagatactcaatagatcacacagtatccgtactggttcccttgtaagatttcccctcttacttcggcttggtgtgtattaagatggttcatctatcttttatctttgctagtttgagatctttgattgttttgactaattttagtgcagatttttatcagaaatgttcattttgtgaataccaaatttccttggggagaagtgcttatacttggggcatgctttaagactagcatcacagttgagtttttttcaccttttgaaacgaggtaaggttttgctctaaatcagtgtatcctggttactttctgtaatgtctgaagattcatccagctggtgcttcagttgtcttgtagattcatgtcggcagacttctttgagtctatacgttgagtctttgtcatttcctgcaagattatggtactctttctttctgattgattttagctttgctctagtgatttcattgtattttttggctcgtgacagatttagctgcaatacaatgctttgcaggacattactagttcgtatcagcttcgagaaatttaatagaatgccatcagacaaagaaatattaagatcctgtcaggtaactgaaagcaggtttgactctttgttttgatcctggggattccttttttctctcacattaagttctatgttcctcttcatttttgtgaggtgttatcagaaggatgaactgacaaagatgtatgcagagtcacgaataccgccatccatgtttcaacctagggtaaagtggtaaaattcaaagttcattaaaatatgcagctttatctcttcttaggttattatcaatgctcatcagtttgaatatttttattaaacttttaaattcgcagggtgggatctttactgaattctgcatgcatgagtcatgcggatgcaatagtgaagctcgtgattgcaacctaaaactggtaggtcaattgtttggttagattagaacgagtttcatctagatcttatggtattaattccacccgttcttttctgcaaacaggtaatgcccatctcaagttttgtccaccacgtcaaggttatgctgaatgaattgctttctcagattaagaaagactttagtgctagtgattgcttaagtcattcatcgtcaacatggaaaagatacaataatacaaacccgaagactcttagaagtgaggatactggtgtcatcttgcttggaagattgaaggtacattagaattttaaatatcgtcactccatatctgtgttatgcctccatatcgctccaagatatctgaagtcttacattagtacaatgtaccatcaaataacttattaaacatgtttttcttaaattgttgagatgtcagtgtcatcatgtcagcttgatagggtatatatctttacttgatatctggaacatatctttagctttggtacataacaaggtttatatttttctagattcatacccttatgtagctgtgacattattcttctattacagatctcatcttctggaagactacaattgcatgacagaactagcagtattgatgttctgactccagaccttctaagtgatagaaatgcgagcaggatatgtgaggttaatttttatttctgactgtattttcttcatttatccggtggcattgtggaggataccaaactcgtcctattgactctttagtttatcctcttttgttcattgtaggttcctgattactatcttattatagaaggaatacctgaatcgatgcttcacatgccatttcttaaaaatccctttcgctgtagtagtgtgcttaatcccactccattggccataaaaaacaccttgacagtgcctttttctttatcgcttggtactgcaagttgcaaacatcttctcaagcaccatccttttgactggaggcatgatttcaatgagttcaaagagggattttttcatctatttagggtgacccacaaatttccaatattaaaaaatgtatggtttcatctttcaactagcaatctccaagtctaattattgtttatttagtttgcttaaagaaatcaatgttgttgtttatgctacaaggtcttaactgttatggttattaatcttgtaccagggtcacccaggaatgcctgactgtactagtgtattcatcgaggctttagtccttccgtgggatctcatttgcactgtgaccgaagaagaggcagctgctcccaattttgaagaacatgatacttcccaagaaatacgtccacataagagatgtaaaactaataatgggctacagagtcaaagctttctatctgtgccacatgaaatttcttgccagatgaccatcagatgtgctagtagtcactgcttggttgcaacagcaactctttctaatttgacggagaacaaaagtggtaaaatgcatagtgctatgcgtgtgctgttagaattcatacctgaatgcagtaactattatgtaagtatgaatttcttattaacattggattcccaggaaacatctatgctgcacaaagactaatagtttaaactaaatgatgattttgcattttaatatggcaggggttacagattggcggttgctatttgatgaagcatggctctgatgattccttttgtgttggacggtctggcatatctaacaatgataaaatcaattttagaccagaaacacgtttatggagtctggaattttctttcgacgaagttctcacccatgatggatctatggatgtacatcctctggtgtcttctcaaccatcttttgcggtggaacagcaaaatgtttctagtcgacaaccttgttcagatgtttcgcttcttctcccttatgatgcaaaaggactcttttcagtatttctcaacgacttggaagggcttaataagccattggcagctgggaaggacaataataatatatcatgctgtactcagtcggagacaataatgcatgcagagccgtctcgactacttccttccaacagcttgtttcctgaaggaaatcttgctactttcagaggtgacgtagtagcagttgacgctgttacctcttctgtcgttgatgtttcaagcagctattgcattaatgttctagtcaatcatcaaatggtgagtgcatattatactcttttctctctgctatctgtattcttgtacctctgatctcctcaagaatgtgtttcaggtgaagatatttggtccacttagaaggcattcatatctcactggatttggctttgggacgaatgcaacattctaccggattcttggaacggggtataatatttaaacaacaactattgcttaattagcttgtcattaagtgacaaactcatcttcaatcccttgctttattgtttcttagagagcaaaacagctttgtgttgacatcagcatcgtttatcaaaataaactctcgaaaggcattggatagtccgccgttagagaaaccgactcacggagctgctttgtgtctgcccaaaattacacctcaggaattcgtaccttgcattcttgctggtcctgcttgtaattcgttctcaggaaacgaggataatcagcaaataaagtttgcctgcaaggtaatattcgtggattagcaaagttgttaaattcttccatttatgtgtactgatttgttcaagcaacaggttctttcagtttatcttctggttctccaaactagatctgatgatccctcagaaaacgaatgtaggaacaatattgatataccacttgcaggatttgtggtaggtaagtcactatcttctattctagggcaatctctaacagggcatagaataagggataatttagagcatgtcgagagaaagagaagttttagccgaatttacagagacattgacgttttgttttatcttctatagttggaaatggccttagaatgttaatatatccaactagtaagattgatcgtgttatactgttactatttctcaaaattgctgtcctattcagtcttcgttaaagtgactaacatccccttaagagcttcctgttaagcgttgtgtatgaatgtaatgccacaaggcagaagaaaacatataaagatgtgtacgagtctattagtttatgtttgcataatttttggtgttactgaacggatgttaatttagactcatttattgctcctgagtagtctttcttcagtttccagtggcatatagaaaactcacttgtccattgataaattggttaataatatgtgacatccattctctctcttttcatgagtttcattttcctggtttagatgacggatcatcaacttatctttgctggacgagtggggaaagagcgtttacaattcttaggctgcacgaagagttacctgaagaaaccattgatgtggtacagtggactagaagatacagcaactggggcaccacagcttaccatcttgaccaaattgttcgggttcacaagagaatagtgatgaagtgcaatggatcacagattgacgtactctttcaagacatcaccattgctgttacttcagatcaacttctcaccaaatcagaggataagttcctcaagtggttgatcctaaatgccattagcggccccatatgggtatatgccccaacctcttttatcatctcttaagtttattggacttttattattccagaacattaaacggtcctacctgaagaattaaccgacagaacttactgatggttctctcaggtctcagattgtcttactgtgtgagaatagatagaaaacagaggatatgttgctacgtgttattaattttagtaggctatttagcgggtggacaggactggaatcgagtagactaatcattttaatgagaggataagactattacaacagttgtctcgcgcatcaaaataaggcggcatgcttttctaaacccaatgactatgtcttgtcagtttaatatttcattagttgcacaactgggtgttttaataccaagttagtagtactcggtttccacttgtgatcttggaattgatcttcattgttttggtttaagcaggaagttgccgcgagctcaatggacatgaaaatgattgagcatttggagagggaacagtgtgtggagatggagacatcaagatataatctgcagagtgtttggggtaatgaagtatgccaagtggatccgttggtccgagcttggagcttactccaaggtttgctaaatagctgatcatgtagtagtcaaaaacattcatccaccagtcggcgattcttcgtgtccatacatcaggagagaacgacaatttgtcgaccctaagaaggatgcgctgagatgaagcaagtacttgatcttacttatattaatgtcatgagtgtagacaactacaaaatcattcacaattttgagcttttaggcattctttagtatatcccaaaacaaaacttcatatgtacggatccacataaacgatttaaagtaatataagatggtaatgtgttaaaatctattcattagttaattttgaatttaaaactcatgattacttaacatgtttcaaacttcagagtatggttattgacccaaagaggttgacaatgagtcgtaagaattattagagaaagtgtgatctaatttcgaaaaatataataaacacgactcaatctagttatcgttatttggttttgaactagaaaggctatgaaacttaacattgtatctagatacaatttgttgacttgactatgatagtttggtcatgatttctcaaaaataagaaggattaaaactagaaaaaaaatcgataattctttagtcgaaatggtaacatttaatatttggtgggaaaactgcattaagtattattgtaattttaaccacaaccaattagaggttagtaattgggaaaaatgttgtttaatacgtgaactttcaaaacgtggtcatttaatatgtgaaccttttatatagtcagttaatacgtagaaaaatgtaattactctaaatggatattttctctaagtaacttatcagtataacgccttcgtaaatccgttagtaaattaccgatgacttaccgatgaattttttttactgacgttctagaactgattgacaaacctttgaactatttttttttgcagcttttaagctggtatcttgtagatttctcctttttatcctatatgttttatcagactggttaactgataactaatatttatggttaagtgagttggagcaaaacatctcagaaacacttcaaacgaatgtatttttcattttttaaatctaaacaataaaatgattaaatgattgtaaaacttttacaatcatttaatcattttattgttttagtatttgtttgacgattattttatgcgttagtgaaataaatagatttatatataactaagaaataaccatagttactacttaagtaaaagatatggatcatgaagtatgaatttatacataatcgtataaaactaaccaaaattatttaaatcatctagttgccaatagaacaacaatcagtggcggctgagatgggagggtgagcggtgcgaccgccccgaatcaaatcccatattcaataattaaggggtcgattttcgaaaatatttttataaataataataataattcaattaataaaatgaaaataagattgaaaaatgtcatgattatttatatgtatgttgtttttagtaaccatttcttactaaaaatatcataaatttgtttttatatagttaaaagtttaaatcccaaaaaacatttggcattggcattttttttttttgccgtggggtctacgatagtgttgagccggccttgcctacatttttatatctgacaattaaatggtttcgtcaactaaccttatgaacgtgatctattctgtcattgaaccatccataacaattatatttgaagttttaaagaaagactagcaaaagtctgatatgtcaccgacgacttttgagaaaagagagaaagagattttgaaaggagcacatcttgaaatctcagatccaacttatttcttcttttttcttctgcttctttttctttttcttcttcttcttccctttcttcttatacaataatgagttctgagggagtgtcactaccgttgatccacgagcatcttatgataccttggaatgacctgaggaaaggtgattgttgtggacgcttggaagctatcagtgatggctactattgcaaaagctgtgatttctttgtccacaagaaatgtggcgatgagtgctccgagtttatcgaacacccatgtcactccattcacactctcacccttgtacgtggagagaggataaaacgaggtacttattgcgatttatgtggaaagagtataaacgtgaatctctattatagctgcaagatctgtgacttcgacgtggacctatattgtgccaagtacccaccaccagaggttattgatatttctgagacgcataaccacaagctcacccttatcaagaagcagatcgagtttgattgtgatgctaaatgtggcaatgatggttatgggtttcgttacaaatgccatgaatgtgaagtatcattccatgtggattgcgtttggaatccgtcggaggtaaaacatctgttagagttaaaccactcccaccactccttacaccctcttaagctcctcacgggtctattaccgatctatattgatgaaaaatgtcgtctttgtggaagagagattgaagataaattatttaatcattgttcttcttgtaacttcagcgtggatgtacgttgtcttttaaacccaccaccgctatatttgctggatttgaaagctcatgatcaccaactcactcttttcccaagactcggttattttatatgtaacgcttgcgggatgaggggagatcgaagcccttacgtatgttttccgtgtattttattgacatacacttagcctgcagtcaccatttgcaaacacaatattattctttagatgtatatctctttcattatacattgatgagtatttattaggccaaaattagaattaaatcaaacaaaacaaatgtattactatacagtattttttttttcttgggataagaaaataaaagtaaaatctagagttgggcaaaaaagaccggaactgattatccaaatcggaaccgattatccaaatcggaaccgattatccaaatcggaaccgattatccaaattggaaccgatccgaacgttggacccaaaaccgtatctgaacccgatgatttgccctattggaacctaaattcctctacccgaaaaacgaacccgaacccgactcgaatctgaacccaaaaatactcgaatatttttttcgaaaatctaaattttattcgaaacctgatatactacccaaaaatccagatatttatccgaaaaatctgggtatttacccgaaaattcgaatatatattccaaaaaaagtgctattagaagctaagaaagttttaaaaaacagatctcagctactttttattgctttttttaggaaagttttagcttgttttcctttttccgaccacctttgttgggcgttagcgccgccggttcctggtgagccgtccccctagctctccctccggtgctgggacggtttttctgaagacctgaagcttcttgaatttgttcttcatgtggttccccactaacagctctgctcaaattgtttctcggagctctctagtctttggtttgggaagaacctggactatggtgtgcccctctcttctgtagtgcaattgtagttctttacttactcccctggtgcagcctttagctttggtggtgtttattgtgtgggagtttcccttttttacctcaggttgaggtctctggtgttttacttttggttccccttgtgtacctctgtttgagggctctagagttttttattgcttttggaggttaagtttgttttattcacagttcccctcctatctcagcatggctcagcgatactcaaaacaagaaaaggcgaagtggttggacagtagcagcaaacctaagcgtaggtcacctctcagaattctggagagtgaaaactctgcacttattgctgaaaacaagtttactctgctgggtagagttacaaacccccagatccaacgacctagagctcttgtggagtacatggttcaatactggaacctagaaaatagagttataggtcgtgagctaggaccggagcgcttcttcttcagatttgagactgaagcagacctccaacttgttctgaaaaaagctccctatcacttcaagaagtggatgttcatccttcaacgctgggagccaattgtttcagaggctttcccagcttttatccccttttggataaaagtcaatgatatacccatgcatcattgtacggaactgacactgaataccattggacaggctttgggtccggtgattgataaggatctctcagatgggagaatccgggttaacataaatggtttagaaccgcttgagatgaagattccaattcgtctcccaacaggagaagtaactactgtttttttggaatatgagaaactagagaaacattgcttctcctgtttttctctgtcccatgaagagaaagctt

SEQ ID NO: 559 - DNA, 128071 bp, Arabidopsis thaliana
gaattcgaatagtatgtttgcggattatgcgttttggggaatggttttactgttaaattgcggttaatctcggttgaatagagtagtggcaatgtcaacttattgcattgatgaaggaacatgaatgaagaagaactttgaactgttacattgtgaagaaagtgtaaatctatgtatgaatgtttggtttgttgattgatgttggactggattggtaggatatacgtgcaagccgaaatatgaaatttatacaaattttgagaccaaaacattttaatgatcttatgaaaacactagaacccccatctcacatacttgtacgatctacaccaacgatctctttgatcttgcatatacggcaagtcggcaaacaataactcttaccatacattacaaaggaggtgtgatcatttagttttggggattgctttgattagcctgggtaaaatacccgaacccgaagaaccaaaccgaactcaacccgaaaaaacctgatccgaatctaaacctaaaattttaaaatactcaaacagatcttaaacttcaaaacccgaacccgaacccatccgaacctgaacccgatcaaatatccgaacatattcgaaatatatatatatatacatagaaataatttattagtaagaatcatttttacatcaacttaagtgtctaaaatattaggattttaggatattttgtatagttttagatattttacctacttttcgatagattcggataaaaaatactcgtttaagaattttttgtgtattttcaagtaatttgaatttattttgatacaaaattttgaattttggatactccgagtaaacccaaatctcaacccaaaaaatccgattcaaacccgacccaaatccgaaatcttaaaatacctgaacggatcttagatttctaaatctgaatatccaaacccgaaaaactcgatccgaacccaattcaaataccggtacacctaagcctagttttgatagtcaaagttccatttggtttacattccattagttattttaatctaaactaaaaccattaattgtaaccgtataaaggattttcagcaaaacaataaataaatataaaaaacctgtctccaagtcatttttcttactgaaattcatttttctatagttaactaaaagggggtgctattcaatcatggatttgaggaaattcatttttcagtgttaattgttatcctatttttcagtgttaattgaatgaggtaaagaaagaaaacaaaaatttattttgtgatttgaatttttttaaaaaccaaatgttcggacatattttaagactgaacaagctttgattttacaaaaacgacgtgtccaacaacaaaatcatgatcaagaaactccttttccatctacttcatttagacaatattttaactattttggcagatttacaaacagtttaccaaaatattaaattattaatttatgttatagttttattattcctttcaaatttagtactttgtttgcttgttaattttataaaactacttttccattttcgtaataataatatatgttttcggttaatccgatgaacgttacattacatacttctagttttctatatatcatacacattcatcgtagtacccatactattagatcaatagaataaatacgtcgattctaattcgacatacgttacataccatgcaaaataatctcatttaatattgagaaagtgtcttttgtggaaaagaaaaaaccaacttttaaacgattgtattttgtgttgtagttgttgttcgtaaaataataatatgtattaaataaaaattaaatttaaaggagtaaagtataaataaaaagtgaaattctaaagtgtaaaaaagttagatttactcctctattttaaagtcgagtatagagtagagttgaaaatgtttttagagcttttacaaatagagtaaggttagagatgtcctcactaaagttacgaggtgtgggagggacggagccaatgaagaattataggggtcaaatgatcccagtgaacttttaaaaaataattgaatttttattaaaaaatatttattgaccccagtcaaacaaaagtattgtcccctatgaatgatttgttgaggtacaagtaaaacaaagtccaatataattttgtgaattataaatacaaaagctcaataattttattgaattatactaatgttaggtccaataaaaatctgtcaaaattaagaaagtaaaaacctaaataattgaacatgtatcgtggtagcctaaaacagttgagcttcttcctcttttgttttttttcatacaatcatcacatctttgaaaatcagattaaggctcgagactatagatttcaaggtaaactcttttatatatatatatatttttttatataaagtttaatttactatcaaccaatttcaatttgatcacttaagcaaaattcgtttgtgattaatttagtttttggtgttgttattctgtcattgaaaactcaattcgtcattatttcatgagttttctttgtaacgttagtcgtcaatatactcttttcttcttaatttttgatgtaatttgttttagtttctaatttaatctcacagtaatttttactaatgacaaaaattaaagttgtcatgaatcatgataaggccacggagaaaacaatttttatgtttgatttaagtttcaactcatgatttttatattgtttcttatttttgtatgtaggcaaggcaacaacaaaaataatgtatcggtttatgaaaagaaaatctccgccaccacctgatattaattttaataaattgccaagtgatcccgcaaagagaaaaagcattctaagttatcatcttaatcaaagagatgaggtacgacgtgaatatttgattaggggaccttgtcaacctcgtggtcataagtttaaacaaatagtaattggaaaggtgttacgccgttttaatccaaaatggtttgatttgtatggtgattggttggagtatagtgtggagaaagaaaaagctttttgcttgtattgttacttattcagagatcaagctggaaatcaaggagggagtgatagctttctatcaactggtttttgtagttggaataaggctgataggttggaccaacatgtgggattggatgtgaatagttttcataataatgccaaaagaaaatgtgaggatttgatgagacaaggtcagtccatcaagtatgctctccataagcaaaccgatgttgtgaagaatgattattgaatccggttgaatgcttccattgatgtttctcgacacttgttacatcaaggattatcatttcgtggtcatgatgaatcagaagagtcaacaaataagggtaattttttagagcttttgaagtatacagctggtcagaatgaagttgtaaagaaagttgtgttgaaaaatgctcctaaaaataaccagatgacatctccaccaattcaaaaagatattgtccattgcttttcagaagaggtaactagatctattattgaagagatggataatgatgtctttggcttgcttgtagatgaatcggctgatgcttcaaataaagagcaaatgacagtagtttttcgcttcgttgataagtatggggtagttaaagaaagatttattggtgttattcatgtgaaagagacatcttctttatctctgaaaagtgctattgattctttgtttgctaaatatggattgagtttgaaaaagctgagaggacagggatatgatggagctagcaacatgaaaggagagttcaatggactgagatcattgattttgaaagaaagtagctctgcatactatgtgcattgcttcgctcatcaactaagttggttgtcatggcagttgcaaaaaaacatgttgaagttggagagttttttgatatgatttctgttttactaaatgttgttggagcttcttgcacaagaaaagataagatccgggaaatccatcggcaaaaagtggaagaaaagattagcaatggtgaaattaagacaggaactaggttgaaccaagaactttcccttcaaagacctggaaatactcgttggggttcacattataagactttgttgcgtcttgaggagttgttttcatctatagttatagttctcgagtatatccaggatgaaggcaccgacaccaccaaaagacaacaagcatatggtattctcaagtattttcacacctttgattttgttttctatctggagttgatgttgcttgttatgggactcactgatagcttatcaaaggctttgcaaagaaaagatcaagatatcttaaatgttatttcattggtgaaaactactaaatgtcagttgcaaaaggttagagacgatggatgggatgcttttatggctgaagttagttcttttagcgagaaaaataacactgcaatgcttaaaatggaggaagaatttgttgattctagaagaccaaggaaaaaatccggtataaccaacttgcatcactataaggtggattgtttctacactgtcttagatatgcaacttcaagagtttaatgaccgctttgatgaggtgaattctgaactacttatttgcatgtcatctttgagtccgatagattctttttgtcagtttgataagtccatgctcgtgagattgaccgagttttatccagatgaatttagttttgtggagcgtagatctcttgatcatcaacttgagatctaccttgataatgtgaaaaacgatgaaaggtttacagatttaaagtgttttggtgatcttgctcgtgtgatggtagagacaagaaagcatctttcacatcctttggtatatcgtcttctaaagctatctttgattcttcctgttgcaacggcaaccgtcgaaagatgtttttccgcgatgatgtgttgactacattgcgtaaccgtatcggtgatgtgttcttaagtgattgtcttgtttgttttattgaaaagcaagtacttgacactgttacaaacgaatcggtgataaaacgattccaagatatgagtgaacgtagagttcatctttaaaaattttatttgtgatgacattgttatgtttatagtaaagtttatcgtttcgtttaaattttttttgaccccagtgagtcattgttctggctccgccactgtgtggcttttgactatggcaacaatatggggattgtccatagtggttccccttgataagttcaatattagatatttgaataataagataaagagaattggatatagctcattcctattataaatgctattatctgagtacactaatcgtcgagcaacgtataaagaactagaaccgattgaataaaagatttgtaccattaatagcaaaagaataaaggtagactttggaattgcttatggcttaaatgatggcttaaatgggagttgagtatggtcgttttttccatcgttgattttgataccaaaacatacgatttttataaactgtaacttttagtattgacttacttagtaattgaaggctagtaattggagtctaaaacaattaacatacatacaggcggacacagcagaagacagaacatattggtaagtggtaacaaacacttaaacggttgatcgaagtttgaacatagagagcgagagaggagagaacacacgacaacatttatagtctgagtcctttccttcaacgaccagagagactaatctgttgatagtttttatcaacagactctttaacagcatcaaccactagctgcgtctttcggctaatactaggccagtacccatcaggctttgcaccattgttcttgatttctccaaccaatcgagcaaactctctcaccatacatgcctcttgtggaagctctgtcttaaccgtatgctcactcgggggactaacccacgcagtcacaaggtcattgaaccaagctttagtgctcgtggtaaacgacgcctcagtctccttatacgggataatgaagtcgtgtacacggagtgtgcctttcgttccaatggcagttatctccattgttaagttagccaagaatgaacaatatatagttgcagttcgtccatcttcccaactcaaagatgctccacaggaaagtatcactcctgcttcattcaacacagcaccggggaaagcagtcacagttttcggaagctcaaagttattagctaaaagagttgctctgatcgcgtaccaccccgcatctcctagcgcaccaagcccgtcaagaccaggtttcacacggatatcgtttttaagaaaatcttcatctccagcaaatgagaaacaactctgtacctacagattcaaacatcaagtagaaattaagactttcaagaaacatctcttgacactatctaatctttaagaaactaaactattttatgttgttcactatcaaacatacacaagccagaccaaacatatagactgagaacatctactctataaagctaatctgagaaccattaaccaaagcttttaactttgaagaaccacaaatccaattccaattcactgagaaccaaagctactaaatttaaagaaacccaaaacaaactccaatctattcaaatgaaaaaaaatctgtacctacagattcaaacatcaagcctttcaagaacactatgaactatctaatcatcaagaattcaagatactataaaccaaaaattgagagaaactacacaagccagaaacttgatcaaacctatacactgagaaccaaagctactaactttaaagaaacccaaaaaacatctactctataaagctaatctgagaactaaagcttttaacttcagagaaacccaaaacgtcaaatccaattccaactcaaaacatttcaaaaagccataaactttcatgaaaacttacagttttaagctgaccaaaacgttcagaatcagaaagaaactctttaagcaaagcagttctaggattatgaacccacatagtaccatccataatctgaacaccattagcttcacaagcatcaacaatcttatcaaactcagttacgttcatagcaacaggcttctccaaaaggatatgtttccctttctcagctgctttaatagcccactcaacgtggagactagtggggagaggaacatagagcgcatcgatctctggatcttcgagaagagattcgtaagagccgtggattttggttgattctgggtagttattggcggtggcaaaggctttggctttttctaaagaccggcttgctacgccggagattgtggcgttgggagcgaggtggattgctcgagagacttttcgagcgatatcggcgcaacccattactccgattcggatttgggtttcggtggccattgttgtggttatgggtttttccggcgagagatgaaagaaagtgttgatagagaagagagagagtgttgttgataaagaacgaatgaaataggtgaagttgttacaacaagacgagataaattgttaatgggagattttgaaaactacctgtttttgagttttcatttggaaaatacatctttttctattttaaataaaaattgtaattcttaatatataagatgataaatttatccagattataaacgttgttttattaataaattaaaataaaattcgaaatttagaaaaacaaaattcaagtaaaataaattcgaattcttaattatgttttcaactattttttgagataaaaagttatttgttttagatattataaaatttaacaaaataatacggaaaaatattctaaagtctatcacctaataaaacttatttgcttatttttttggacgaaaatttgtttaaaatatttaagataaaaattaaatttgaattcatataaagtctatcattttatttattttttatattaaaattttatgaaacaatatttacaaatatttctataaaagtctatcagttgataaagtttaattttactttttggacaacattttgtttaaaactatttaagataataattatctttaaaattattagttacatcaaatttgtatttatgatttttttttgttttaagtttttttttttgttattccctaattttactgaagctgttttagtattttatatattgaaaattaattgtttaaaaaaagaaaaaataataaggtatttttcaaatgaaaacccaaaaataggtcatttttccaaatttactcatttttaaataactttttttcttatatatcaagaagttataatattcaatctatttttagaaaaactaaggaaaaaaacattaggctaattgttttaaaactgaagaaatgccataacttttatggtttagagttttagagttttaacatttggcttttagagcttaaattaatatttttgattttgattaaaagtgtaggttttatgatttagaaaataataagaattcgaggtttgatttccagtttaaagtttaggcattgggagcgagatggatggcacgggagaccttcctagcgatttcggcgcatcccgtcacaccaatttgtattggcttatcgatggccattggtgtggctgtctatggtgatagatgagtgaggctggcgagatataagagaaccaaaaaaagatagggaatttaatgaaaaaaaacctcaactttggtcagatccatttttaaaccctgaactatgtttttagtaaaacaaacgctgaactaaaacctgttaataaacttaaccccacagtaataaacttaaacatgttaataaacttaacattgatataattatggtaaaatagagaacaatgaattatgtttcataagatcttccttttcaaattatttaatttaatctttgcatatttagacttgcagcaactgtcaacaagtcggacacaacaaacgttcatgcaagcgtaaagcagtgccaaaaccacccaagaaacctcaaggacgaccaaagaaaaaacagaaaacaatggatgaagagaaccctatcactcaaccaatacaatcttctcttcaaagtgaatgcttgacaagtctttactttaaaatatcttgtccctctgaaacgattgtttttttttgtgacaaatattgttgtgttgcaacagcttcgatagttatgttggttggatttatttaagcatgactctttggattattttaagttgttgtgtctttctttcagcttctaaaatccaaactaattaagcaattcaaaatcatttagaacactaaacgttttttttgtaataaattcaaaacagttttaaagaacatcatgtggtttttgcgctaaatacaaatgtctcgttgttgttttttttggaaattaatatcccattaatatttaatactgtggggttaagtttattaacaggttttagttcagagtttgttttactaaaaacatagtttagggtttaaaaatggatctggccaaagttgaggttttttttcattaaattcccaaaaagataaataaggtagaaaaaagattacttcgagtcgaagaccaaaattttgaaaaaaaaaatctttctgataatatcatttctatgtagaaattttttaaaaaattatttggtactctctctctttctgaatatttgtaatttaaggtttttgcacacaaattaagaaaatatataaatttcatttaatttatctctttcctataaatatatcattaattacaactaatccaaccaaaaaaaaatatgatgtaaaatataattggttaaaaactattaaatacatttaatatttgcatacaaaagtgaaaacaacacttacggggaaaactaaaaaacctttaaactacacttaattagaaacagagagtactattaattgtttaatttacctatctattctctttaccatagtcatttacattttacaacctttatgttttgaatcaaaaatgagtattttttcatcgatatccttcaccgtaattcatttttctgatgtctctactcgtagtttaaaattttaaaataataataagctcataatgctaacattcagcgtgtcctatttgcttttgtgtttgtattgtatattatgtcgattggaattggaaggtaattgtctcgtccatttaacataaaattaaaaaatcttggtaactatagctttaattcagcttgaatgtacagtttaactacattttgcatctttgtaaccctaacaatgttttttttcctttgatgattctttgtacccttcatcatcagtcatcacctactatttcaatcctaggtacaatcaattttcgcgtctctttaaacaacattctttcttctaactaatttcaccatcttattctttaattacatatctattctaccataagctttatttcttttatattactcatctcattatacttgtccgagttagttgcttgtcaagaagacgattattctataacaacattcaaatgatgagtatacttagaacataaactgatatctataacctctttcacatgtattattagatcattgaccatcacattcactcaataaccttgtttaataacctcttttctttaattattttgtcttataaggtgatttaagatttgggaacacttagtctagcatatgggagggtaaaaatatcaaaaacaaaaacatataagaaaagtaaatgaaaccaaaaaaatcattgggcaatatatatcgagaaacttaatatgatttttcaactacaaaaatatccctagatgcttacatgatccatacggtaattagtgggattagtatagatgtgtatgtcatgaaagtctatatattgagaataagtcaccaaatgttgtatgtcacaaaataatttgtaatccttaaaaaccagtaattaagcacaaagcaggttatatgtgtatatatatgttacaaacctgagcaacagtagctaaaaattgctaagatggtgatcgacaaacttgtagttgccacttagtatgctgctttccgatagcaagaccaatatctcccttaaataaggatattgaagatgatattttcaaaattttggtaaatgaaagaacgtttcattaaaaagaaattgtatacatattacacaaacgaatatagaagagagttggaacataatcaatggacaggtccaatgggagtccaattctctagttttggttttacttaacgttatactaataaatacttcgtatcaagaacagatatatcttcaggtacgatctttgcagtaatgtgaacaatcaataacggataaatttttactaaaaatatagccaaatcagaaaagacgccttatcccgtaaattaaactacaaccactaatagataaatcctcgaataaatcaaccatctatttcatgcaacgttaagtaaaaccaaaactagagaattggactcccattacttgaggtagaactcgagaatcggacccccattgcatcttctcgtccacttcatgtgacctgaaagagtgatgaatcgtgaatttttgatcgtcgggaattgatcttctcttctagttcatgtgacacgaaagagaatgaacgtaactctgatcgtcagcaattgataaatatattggagaagcataccgtatcgaggagaatttgaaatgtgtaagtgttggtcattgtaatcgttttctaattgtccattaattatcattaattaagtaattaaatttatcgttatagagattctgattggtgtctatagaaaattgttttaacgcaaataaaatacataagtgtgttgacatggcatcttgaaaaaactttatagaaaatctgatgtagatggtttgagaggcctcaatgaacttcttagagatatccaccaacagtaattattgaattcaataatagcttaacgaatgccaaaaaatccttcaccatgaggtttcaaatgcttcatttgcttctagctaactatggttttgagaggcggcacgaaaaaaagtgagaaataatatttagctatttacttgatacgtaacgacggtgcaaaatgaagagattttaatctctttggccccttttggttgaatcaatttttgaaaaacccccacttattctcactaccccctctccatcctaacctatttgaaatacaattttacccttctcttttatcctttttaattttctatttaatttttgctaccaaacaatctattaaaatcaaccaatcatatgcattctctttcttatatcattaatcacttaaacctacaaaaaacgctggacaactgaaaccaataggtacaactatgttgatggacttctacgaaaaacatataattacatatcgttttctttttctctttcattttcaagttataataaaaaagacttcagtcatacgtgttgcttataatggatactattaattttcttgtcgtatttatacaaattaatatgttttgtattggtacaactaagtacaacccgcacaactaaggtctattcacttggctagttttcagaatattataaaatatgaaaatttaaaaccaaactaagaaaacttaaataatgcatacacaattgtaatgaaattacataattagtttttgacaaaaatcatattttctaaattaatgaaactcttatcacaaaatctaacattcatacattaacaaccttatactttcatggttactttgtatattttaacaaaacaaattaaaaaatttaaatacttgtaattagataaatataaatacactgatacaaagtaatggtattttgatgggggaataccatatgttccatccataaaatttaattttgagttgataacaactagatttattatattctcgatattgtacaactatgacaaaaaatgtgcaaccgaatacaactgtacaactatgggcaatatatttttcagatatttatagatattttttagatatttgtagatattttataataaaaattagctttattcttttgtgataaaaatatttatttattttttgtcatcaaaaatatttaattttatagttaaataaactattttgttccctttcaaactttttttttccttttcaaaacactgttgtttaataaaataaaatactaacattcataattttttgtgttttgttttggatcaaaatacgttgatgtgttgattcatatttattttggagttttttttgacaaaaaatcttagattcatacataaacccagatacatagttgtacatgagcgtaccagttgtacctaaacgcttagatctattatcttagaaaccgaaagacagccgaacaattgtatctaaaccaaaaacccaacataattatatctaaaaatttagccacaattatacctaaaaccaaaaacacaatactatctaaagactcaaacacgaagtcttattgttctcgttgtcattctccttctcaatttctttctccttagctttctccttcttcccttttcttctagtttttatcattcaaaagcaatctcataatattttgttttaatgcatttcacaaactatctctaaggaacaaaattcaaattcattcgaatcccaattgtaatcctaaaaactaagtcataacagctattacaagaggcttttaagggacaatttcgattttaaatcgataattaactcaaatttgaatctatatatacatttttgcagcaattttgtgaaataaatgttatagttggaacttatttacaatggctgccactggattttaatgtttgtttttgataattagaaaaaaaatcttcaaattaaatatttgacttttaacaatcttccctaaatctctccacattaactacacgattagttactgaaataaaacttccaaaatatttaatatcatttatttactacaaaattatcattttttatattgtttttctccatgactataacaatttaattataatcgtcaaaccgcagagatatttgatagcatttaattattacaaaattacaaaatatttagacaataattcataaacatatcataaataagattaacattaataaaataaatgttttttttatgggacgggttggcgggacgggtttggcaggacgttacttaataacaattgtaaactataaaataaaaatatttatagatagatacaatttgcaaacttttatgtatactaactttaaaaaataaattgtttccgcggtgtaccgcggattaaaatctagttgtactcataaaaatccaaattataatcgaaattttatccaaaatccatcatttttaaacaaaatcaaagagaaaaagagatcaaactatcaaatctaataagaaataaaaccctaattaaacacaacaccatcaatcatcatatatggaatagagatggatctttggattgatagaaacaaatgaaaaggtaaaaaagatggatctttggattgatagaaagaatgaaaaggcaaaaagaagacgaaagattatacatggaatagagagaagagagtaaagagaagaagaagaagaaacaaatcaaaagttttgtttttgttgaattgagagaaaaataaattgaagatgaaaaaaatttgatatgagaaattagatttttttttgttgagaataaaagatccaaaattgttatggatctagatccaacatagaggttgggttgtaaataagtaaaaaactctagttttacttgtcttttactattattctgaattaaaataaataaataaacatatgttttttataaaggggctaactagagaatctttgaagctaagggggtggactagataaaaatccaaaatgaagcaaatgacctaactgctgtttgcaacatcatttggttcatttgctgttagctaaccttagtttttgataaccatagtccataggctaaatatcacagaatggtaaagtgtaagccatttcgtcaacgctacacctaaacggcatgaagttggagcttctaattaagaagaacccggtcgggtcaaaattcgggtcactcttctcgggttccccctctaattcaccctctttttttcattcactccacaattacaattacagtcgatggacgacagagccaccgaaccatcacggcgagtctaaaaatactcagagctcctataaatggagaacaccacaattctcacggttaaggaccttgtcaacgaaggaatagccgtcaccggtgcatcgtcgctattctcttccgctgcttctcactcgtcttccgaatcaaccagtacgaaccctaaatcacatcccggtgccgtcgattcagactttagccgtaagtttctcacaccgttgaactacccaacggttatcttcgggacggtagctcttccttccgaaaccctaaaatgtccgaatcgctactgctttcgattcacagacggtgatttgacaatctgctgtgatatccttggattcgaattccgcgcgattgggagtaagatttgtgttctatcttggaattttcttcctatgaatcattctggtggatttttggagataatcaactggaaatttgtggatagtggtagtttgctatctcggtgttctggaattagttcgtttccattgattccttctttgtattcatcgcaaaacggtgaccggaagtcacggtacagcgtttgtggtgtgttagagtctatcagccctgtgtctgttgttccttgtatggatggggtttcaagtgattctgtaaatcttcctgggttcttagtacatgtcatggcttgtgagtgtaaagtgtatagccgggatgcgattgattgcggtcacgcttttgagaggtctgtatttgtttacttctgtggtttagaggctgcgagttggcatcctgtggtgatgaagttagttggaagaaatgttgctctttccgggttgaaaaggaagttggtttatgtaagaggtgattctctgttggtgtttgtgactactgagaattctgttcttcatccaccttggttatctaagaaagggacagtttcgaaaactgttgttgataggagaggtaactgtggttcctaccgtggatatgttagaggtttgtatttgaaaggaaagcttgttgagatggatgaagatgtctggcttttattgacggatcagatactcaatagatcacacagtatccgtactggttcccttgtaagatttcccctcttacttcggcttggtgtgtattaagatggttcatctatcttttatctttgctagtttgagatctttgattgttttgactaattttagtgcagatttttatcagaaatgttcattttgtgaataccaaatttccttggggagaagtgcttatacttggggcatgctttaagactagcatcacagttgagtttttttcaccttttgaaacgaggtaaggttttgctctaaatcagtgtatcctggttactttctgtaatgtctgaagattcatccagctggtgcttcagttgtcttgtagattcatgtcggcagacttctttgagtctatacgttgagtctttgtcatttcctgcaagattatggtactctttctttctgattgattttagctttgctctagtgatttcattgtattttttggctcgtgacagatttagctgcaatacaatgctttgcaggacattactagttcgtatcagcttcgagaaatttaatagaatgccatcagacaaagaaatattaagatcctgtcaggtaactgaaagcaggtttgactctttgttttgatcctggggattccttttttctctcacattaagttctatgttcctcttcatttttgtgaggtgttatcagaaggatgaactgacaaagatgtatgcagagtcacgaataccgccatccatgtttcaacctagggtaaagtggtaaaattcaaagttcattaaaatatgcagctttatctcttcttaggttattatcaatgctcatcagtttgaatatttttattaaacttttaaattcgcagggtgggatctttactgaattctgcatgcatgagtcatgcggatgcaatagtgaagctcgtgattgcaacctaaaactggtaggtcaattgtttggttagattagaacgagtttcatctagatcttatggtattaattccacccgttcttttctgcaaacaggtaatgcccatctcaagttttgtccaccacgtcaaggttatgctgaatgaattgctttctcagattaagaaagactttagtgctagtgattgcttaagtcattcatcgtcaacatggaaaagatacaataatacaaacccgaagactcttagaagtgaggatactggtgtcatcttgcttggaagattgaaggtacattagaattttaaatatcgtcactccatatctgtgttatgcctccatatcgctccaagatatctgaagtcttacattagtacaatgtaccatcaaataacttattaaacatgtttttcttaaattgttgagatgtcagtgtcatcatgtcagcttgatagggtatatatctttacttgatatctggaacatatctttagctttggtacataacaaggtttatatttttctagattcatacccttatgtagctgtgacattattcttctattacagatctcatcttctggaagactacaattgcatgacagaactagcagtattgatgttctgactccagaccttctaagtgatagaaatgcgagcaggatatgtgaggttaatttttatttctgactgtattttcttcatttatccggtggcattgtggaggataccaaactcgtcctattgactctttagtttatcctcttttgttcattgtaggttcctgattactatcttattatagaaggaatacctgaatcgatgcttcacatgccatttcttaaaaatccctttcgctgtagtagtgtgcttaatcccactccattggccataaaaaacaccttgacagtgcctttttctttatcgcttggtactgcaagttgcaaacatcttctcaagcaccatccttttgactggaggcatgatttcaatgagttcaaagagggattttttcatctatttagggtgacccacaaatttccaatattaaaaaatgtatggtttcatctttcaactagcaatctccaagtctaattattgtttatttagtttgcttaaagaaatcaatgttgttgtttatgctacaaggtcttaactgttatggttattaatcttgtaccagggtcacccaggaatgcctgactgtactagtgtattcatcgaggctttagtccttccgtgggatctcatttgcactgtgaccgaagaagaggcagctgctcccaattttgaagaacatgatacttcccaagaaatacgtccacataagagatgtaaaactaataatgggctacagagtcaaagctttctatctgtgccacatgaaatttcttgccagatgaccatcagatgtgctagtagtcactgcttggttgcaacagcaactctttctaatttgacggagaacaaaagtggtaaaatgcatagtgctatgcgtgtgctgttagaattcatacctgaatgcagtaactattatgtaagtatgaatttcttattaacattggattcccaggaaacatctatgctgcacaaagactaatagtttaaactaaatgatgattttgcattttaatatggcaggggttacagattggcggttgctatttgatgaagcatggctctgatgattccttttgtgttggacggtctggcatatctaacaatgataaaatcaattttagaccagaaacacgtttatggagtctggaattttctttcgacgaagttctcacccatgatggatctatggatgtacatcctctggtgtcttctcaaccatcttttgcggtggaacagcaaaatgtttctagtcgacaaccttgttcagatgtttcgcttcttctcccttatgatgcaaaaggactcttttcagtatttctcaacgacttggaagggcttaataagccattggcagctgggaaggacaataataatatatcatgctgtactcagtcggagacaataatgcatgcagagccgtctcgactacttccttccaacagcttgtttcctgaaggaaatcttgctactttcagaggtgacgtagtagcagttgacgctgttacctcttctgtcgttgatgtttcaagcagctattgcattaatgttctagtcaatcatcaaatggtgagtgcatattatactcttttctctctgctatctgtattcttgtacctctgatctcctcaagaatgtgtttcaggtgaagatatttggtccacttagaaggcattcatatctcactggatttggctttgggacgaatgcaacattctaccggattcttggaacggggtataatatttaaacaacaactattgcttaattagcttgtcattaagtgacaaactcatcttcaatcccttgctttattgtttcttagagagcaaaacagctttgtgttgacatcagcatcgtttatcaaaataaactctcgaaaggcattggatagtccgccgttagagaaaccgactcacggagctgctttgtgtctgcccaaaattacacctcaggaattcgtaccttgcattcttgctggtcctgcttgtaattcgttctcaggaaacgaggataatcagcaaataaagtttgcctgcaaggtaatattcgtggattagcaaagttgttaaattcttccatttatgtgtactgatttgttcaagcaacaggttctttcagtttatcttctggttctccaaactagatctgatgatccctcagaaaacgaatgtaggaacaatattgatataccacttgcaggatttgtggtaggtaagtcactatcttctattctagggcaatctctaacagggcatagaataagggataatttagagcatgtcgagagaaagagaagttttagccgaatttacagagacattgacgttttgttttatcttctatagttggaaatggccttagaatgttaatatatccaactagtaagattgatcgtgttatactgttactatttctcaaaattgctgtcctattcagtcttcgttaaagtgactaacatccccttaagagcttcctgttaagcgttgtgtatgaatgtaatgccacaaggcagaagaaaacatataaagatgtgtacgagtctattagtttatgtttgcataatttttggtgttactgaacggatgttaatttagactcatttattgctcctgagtagtctttcttcagtttccagtggcatatagaaaactcacttgtccattgataaattggttaataatatgtgacatccattctctctcttttcatgagtttcattttcctggtttagatgacggatcatcaacttatctttgctggacgagtggggaaagagcgtttacaattcttaggctgcacgaagagttacctgaagaaaccattgatgtggtacagtggactagaagatacagcaactggggcaccacagcttaccatcttgaccaaattgttcgggttcacaagagaatagtgatgaagtgcaatggatcacagattgacgtactctttcaagacatcaccattgctgttacttcagatcaacttctcaccaaatcagaggataagttcctcaagtggttgatcctaaatgccattagcggccccatatgggtatatgccccaacctcttttatcatctcttaagtttattggacttttattattccagaacattaaacggtcctacctgaagaattaaccgacagaacttactgatggttctctcaggtctcagattgtcttactgtgtgagaatagatagaaaacagaggatatgttgctacgtgttattaattttagtaggctatttagcgggtggacaggactggaatcgagtagactaatcattttaatgagaggataagactattacaacagttgtctcgcgcatcaaaataaggcggcatgcttttctaaacccaatgactatgtcttgtcagtttaatatttcattagttgcacaactgggtgttttaataccaagttagtagtactcggtttccacttgtgatcttggaattgatcttcattgttttggtttaagcaggaagttgccgcgagctcaatggacatgaaaatgattgagcatttggagagggaacagtgtgtggagatggagacatcaagatataatctgcagagtgtttggggtaatgaagtatgccaagtggatccgttggtccgagcttggagcttactccaaggtttgctaaatagctgatcatgtagtagtcaaaaacattcatccaccagtcggcgattcttcgtgtccatacatcaggagagaacgacaatttgtcgaccctaagaaggatgcgctgagatgaagcaagtacttgatcttacttatattaatgtcatgagtgtagacaactacaaaatcattcacaattttgagcttttaggcattctttagtatatcccaaaacaaaacttcatatgtacggatccacataaacgatttaaagtaatataagatggtaatgtgttaaaatctattcattagttaattttgaatttaaaactcatgattacttaacatgtttcaaacttcagagtatggttattgacccaaagaggttgacaatgagtcgtaagaattattagagaaagtgtgatctaatttcgaaaaatataataaacacgactcaatctagttatcgttatttggttttgaactagaaaggctatgaaacttaacattgtatctagatacaatttgttgacttgactatgatagtttggtcatgatttctcaaaaataagaaggattaaaactagaaaaaaaatcgataattctttagtcgaaatggtaacatttaatatttggtgggaaaactgcattaagtattattgtaattttaaccacaaccaattagaggttagtaattgggaaaaatgttgtttaatacgtgaactttcaaaacgtggtcatttaatatgtgaaccttttatatagtcagttaatacgtagaaaaatgtaattactctaaatggatattttctctaagtaacttatcagtataacgccttcgtaaatccgttagtaaattaccgatgacttaccgatgaattttttttactgacgttctagaactgattgacaaacctttgaactatttttttttgcagcttttaagctggtatcttgtagatttctcctttttatcctatatgttttatcagactggttaactgataactaatatttatggttaagtgagttggagcaaaacatctcagaaacacttcaaacgaatgtatttttcattttttaaatctaaacaataaaatgattaaatgattgtaaaacttttacaatcatttaatcattttattgttttagtatttgtttgacgattattttatgcgttagtgaaataaatagatttatatataactaagaaataaccatagttactacttaagtaaaagatatggatcatgaagtatgaatttatacataatcgtataaaactaaccaaaattatttaaatcatctagttgccaatagaacaacaatcagtggcggctgagatgggagggtgagcggtgcgaccgccccgaatcaaatcccatattcaataattaaggggtcgattttcgaaaatatttttataaataataataataattcaattaataaaatgaaaataagattgaaaaatgtcatgattatttatatgtatgttgtttttagtaaccatttcttactaaaaatatcataaatttgtttttatatagttaaaagtttaaatcccaaaaaacatttggcattggcattttttttttttgccgtggggtctacgatagtgttgagccggccttgcctacatttttatatctgacaattaaatggtttcgtcaactaaccttatgaacgtgatctattctgtcattgaaccatccataacaattatatttgaagttttaaagaaagactagcaaaagtctgatatgtcaccgacgacttttgagaaaagagagaaagagattttgaaaggagcacatcttgaaatctcagatccaacttatttcttcttttttcttctgcttctttttctttttcttcttcttcttccctttcttcttatacaataatgagttctgagggagtgtcactaccgttgatccacgagcatcttatgataccttggaatgacctgaggaaaggtgattgttgtggacgcttggaagctatcagtgatggctactattgcaaaagctgtgatttctttgtccacaagaaatgtggcgatgagtgctccgagtttatcgaacacccatgtcactccattcacactctcacccttgtacgtggagagaggataaaacgaggtacttattgcgatttatgtggaaagagtataaacgtgaatctctattatagctgcaagatctgtgacttcgacgtggacctatattgtgccaagtacccaccaccagaggttattgatatttctgagacgcataaccacaagctcacccttatcaagaagcagatcgagtttgattgtgatgctaaatgtggcaatgatggttatgggtttcgttacaaatgccatgaatgtgaagtatcattccatgtggattgcgtttggaatccgtcggaggtaaaacatctgttagagttaaaccactcccaccactccttacaccctcttaagctcctcacgggtctattaccgatctatattgatgaaaaatgtcgtctttgtggaagagagattgaagataaattatttaatcattgttcttcttgtaacttcagcgtggatgtacgttgtcttttaaacccaccaccgctatatttgctggatttgaaagctcatgatcaccaactcactcttttcccaagactcggttattttatatgtaacgcttgcgggatgaggggagatcgaagcccttacgtatgttttccgtgtattttattgacatacacttagcctgcagtcaccatttgcaaacacaatattattctttagatgtatatctctttcattatacattgatgagtatttattaggccaaaattagaattaaatcaaacaaaacaaatgtattactatacagtattttttttttcttgggataagaaaataaaagtaaaatctagagttgggcaaaaaagaccggaactgattatccaaatcggaaccgattatccaaatcggaaccgattatccaaatcggaaccgattatccaaattggaaccgatccgaacgttggacccaaaaccgtatctgaacccgatgatttgccctattggaacctaaattcctctacccgaaaaacgaacccgaacccgactcgaatctgaacccaaaaatactcgaatatttttttcgaaaatctaaattttattcgaaacctgatatactacccaaaaatccagatatttatccgaaaaatctgggtatttacccgaaaattcgaatatatattccaaaaaaagtgctattagaagctaagaaagttttaaaaaacagatctcagctactttttattgctttttttaggaaagttttagcttgttttcctttttccgaccacctttgttgggcgttagcgccgccggttcctggtgagccgtccccctagctctccctccggtgctgggacggtttttctgaagacctgaagcttcttgaatttgttcttcatgtggttccccactaacagctctgctcaaattgtttctcggagctctctagtctttggtttgggaagaacctggactatggtgtgcccctctcttctgtagtgcaattgtagttctttacttactcccctggtgcagcctttagctttggtggtgtttattgtgtgggagtttcccttttttacctcaggttgaggtctctggtgttttacttttggttccccttgtgtacctctgtttgagggctctagagttttttattgcttttggaggttaagtttgttttattcacagttcccctcctatctcagcatggctcagcgatactcaaaacaagaaaaggcgaagtggttggacagtagcagcaaacctaagcgtaggtcacctctcagaattctggagagtgaaaactctgcacttattgctgaaaacaagtttactctgctgggtagagttacaaacccccagatccaacgacctagagctcttgtggagtacatggttcaatactggaacctagaaaatagagttataggtcgtgagctaggaccggagcgcttcttcttcagatttgagactgaagcagacctccaacttgttctgaaaaaagctccctatcacttcaagaagtggatgttcatccttcaacgctgggagccaattgtttcagaggctttcccagcttttatccccttttggataaaagtcaatgatatacccatgcatcattgtacggaactgacactgaataccattggacaggctttgggtccggtgattgataaggatctctcagatgggagaatccgggttaacataaatggtttagaaccgcttgagatgaagattccaattcgtctcccaacaggagaagtaactactgtttttttggaatatgagaaactagagaaacattgcttctcctgtttttctctgtcccatgaagagaaagcttgcccgctaaagccgctagtatcaaacaaggagtcaagaattcctggaatcaatcaggaaaaaacgttacaaaacctagaagatggtaagcgtagacaagatgctaggagaagtaattggccagcaaggagagaggaagtgcctaaatccgttgagggtccaagagggaaagagcatttcaactccaggcggtcagaccatagggagaagagtgattatccctcagcttactctcaccggcatagggaacctcgcagggatttcagtccccaagattgttctagaagagattacagtaggcctgcttcttataacttcaggagagactcagtaagatcagggtttgatttgcatcctcatgatcgttctcaccctaggagaatagcttgtgatgaggaaattcagtccagctctcataacttagtctctgggagaagaagtcaacatttaccctcgtctagggatcttctgtagggaaacagagtgactcaaagttcagtctctagagctgacctctatatgcaacctcccatgcaacctcctctcttagctactgatgcaagatcaaggctcttcgggtctaaggatagaggagaaaccagtactcctaggtctagaagacctgctttagagagaattggtcactccctcccggagcttttaccaccccctcctcctactaatacctctttgtcggatcgtcttcaagatgttgagattcaatacttaggtgatccggatcatgattgctctagacaggtggtccacgagtttgggagtagcagtggtaaagggcagttggatgatggggagagagtacacgcttctttaaggttaagtgtacctctggaatctgttacagttactcttcccactcaaatgccagtgtccaaggcgcctaggaaaaggaaagtaccagcccgagcacctaagccaaagccctcctttagttcaagagtagctcgcatccctcttcagggtgccagtctaaggaaacaaaaagtggtgagccgtaagcctgcttctcgtaaaaagctcagagttgacaatttacctgagtctcaggagtcaccagttcaaccactgcttagtaaccctcctcgcccagcgttggttccagcaatggttaagaagaagatggattttcaggatccatccaatcctcttccttagtagtgacttcgtggaactgtcagggcatagggagcccccttacagttcgtcggctccgggagataagacttggcttatttcctgatatgctcttccttatggagactaaaaaccaagatgaattcatctctaaaacctttgattggatgggttatgctcacagattcaccattccaccagagggattgagtgggggtttagcgctttattggaaggagaatgtggaagtggagattttagaagcagctcctaacttcattgatgttaaagtcaagttcaagaaggacacttcacacattactttcatttatggtgctcccaagttgagaatcgttctgttttctgggataagatctcatccttaggggctcagagatcgtcggcttggctactcacaggggattttaatgatatcctcgataattctgagaaacaaggaggtcccctgcgttgggaaggttttttcctggctttccgcagctttgtttcgcagaatggtttatgggatattaatcatacggggaactcgctctcctggagaggtactagatactctcatttcatcaagtcaagattggatagggctctaggcaattgttcatggtcggagttgttcccgatgagtaaatgtgagtatctgcgttttgaaggttctgaccaccgtccactggtgacttactttggagcgccaccactgaagagatcgaagcctttcaggtttgatagacggttaagagagaaggaagaaattcgtgcactggttaaagaagtctgggaactggctcgtcaggattctgttctttacaagattagtcgttgccgtcaaagtataattaaatggactaaagagcaaaattctaacagtgcaaaagcgattaaaaaagctcaacaagcgctggaatcagctctttctgcggatatccctgatccttctcttattgggtctattactcaagagcttgaggctgcttataggcaagaagaattgttttggaaacagtggagtagggttcaatggttgaacagtggagaccgtaataaaggttattttcatgctactacaagaaccagaagaatgttaaacaacctctcagtcatagaggatggaagtgggcaggaatttcatgaggaagagcagattgcttcaacaatctcaagctatttccaaaatatcttcactactagcaataactcggatcttcaagttgttcaggaagccttaagtccaattatctcctctcactgtaacgaggaattaatcaaaatttcttctctgctagagattaaagaggccctcttctctattagtgcggataaggccccggggcccgatggtttttcggcttctttctttcatgcatattgggatatcattgaagccgatgtttcccgggatatccggtccttttttgtggattcctgcttatcacctcgactaaatgaaactcatgtaaccctcatccccaagatttcagctcctcgaaaagtctcagactaccgtcctatcgcgttgtgtaatgtacagtacaaaattgtggctaagatcctaactagacgtttgcaaccttggttgtcagagttgatctctttgcaccaatctgcttttgtaccaggccgagcaatagccgataatgtgttgattacacatgagattcttcactttcttcgtgtttcgggtgctaaaaagtattgttctatggccataaagaccgacatgagtaaggcgtatgatcgcattaaatggaattttctccaagaggtccttatgaggctgggttttcatgataaatggataaggtgggtgatgcaatgtgtttgcactgtctcatattcattcctcattaatggatcgcctcagggaagtgtagtgccatctcgaggactgcggcaaggtgatcccctctccccgtatttgttcattctatgtacggaagttctttcgggattatgtcggaaagctcaagaaaaaggagtaatggtgggcattcgcgttgctcgaggaagtcctcaagttaatcaccttctatttgcggatgatacaatgtttttttgtaaaacaaatcccacgtgctgtggtgctcttagcaacatcctaaagaagtatgaattagcttcgggtcagagcataaacctagcaaagtcagctataaccttctcttctaaaacccctcaagatatcaaacgcagagtgaagctttcgctgcgtatagacaatgaagggggaatagggaaatacctcgggttaccagaacactttgggaggcggaagcgagatatcttctcgtcaattgtggatagaattaggcaacgctctcatagttggagtatacgctttctgtcaagtgctggaaaacaaatcctgctcaaggctgttctctcgtcaatgccatcttatgctatgatgtgctttaagctgcctgcctctttgtgtaaacagatccaatcagttctcacccgtttctggtgggattcgaaaccagataaaaggaagatggcgtgggtctcttgggacaaacttactttgcctataaatgaaggaggactaggtttcagagaaattgaggagttcaacgatgctctctaggcgaaacttagttggcggatacttaaagaaccacattcccttctctctcgtgtcttgttggggaagtattgtaatacatcctctttcatggactgctctgcttctccttcctttgcctctcatgggtggagaggaatccttgcagggagggacttactacgaaaaggccttgggtggtctatcggacagggtgatagcatcaatgtttggactgaagcgtggctatcaccgtcctctccgcaaactcccataggacctcccacagagacgaataaagacctttctgtccatgatcttatctgtcatgatgtgaagagttggaatgttgaagctattaggaaacacctacctcagtatgaggatcagattcgaaaaattaccatcaatgccttgcccttgcaggatagtttggtttggttacctgtgaaatcaggggagtataccaccaagacgggttatgctcttgcaaagttaaactcattcccagcgtctcagttggatttcaactggcaaaagaatatctggaaaatccatacttcccctaaagtgaagcacttcctctggaaagcaatgaaaggagccctacccgtgggagaagcgctttcacggagaaacattgaggcagaggtgacctgcaaaagatgtggtcagactgaatcttcgctacatctgatgctcctctgtccatacgctaagaaggtctgggaacttgctcctgttttgttcaatccttctgaggctacccactcttctgtagcactcctcttggtggatgctaagcgaatggttgctctcccaccaacaggattgggttctgctcccctgtatccgtggttgctttggcatctatggaaagcacgtaaccggttgatctttgataatcatagctgttcggaagaaggtcttgttctaaaggccattttggatgctcgtgcttggatggaagcccagttgctgatacatcacccttccccgatttcagattacccttctcccactccaaatctgaaagttacaagttgttttgttgatgcagcttggactacttcaggttattgtggtatgggttggtttttgcaggatccatacaaagtgaagattaaggagaaccaatcttcgagtagctttgtcggctctgcgcttatggctgagactctcgctgtgcatttggctttggtggatgcgttatctaccggtgtgcgacagctgaacgtcttctcggactgtaaagagttaatctctcttctcaactcaggaaaaagtatcgttgaactgcgaggactgcttcatgacattagagaattgagtgtttcctttactcacctttgttttttctttatccctcgtttaagtaatgttgtggctgattctttagctaaatcagccttgtctgttattctctcttcctccgttagtggtgggtaaaactcgtttgcattttttataatgaagtttgataaaaaaaaaaaaaaacatattccaaaaaaatttaaaaaatctatacccaaaccgatccgaattcgattagatctaaatcaaaaccgaaccgatattttagatttactttttgatcctaaacttttctacccaaaagattcgtaccggatcgggtttaatcctaactcttccaacttacccgaatacccactcctaaattctgattctgttttttttttttttttaacacggcaaatcaaaattctgattctgttattgtagtaaaatcagattcatctctttggaaaaaaacgataagggatctctctctaattggcgctcctttactaattgccctttaattccatccatcttcggattcttttcaaatcaacaaaaaaagtacaaatcggatccctacaatatcctctccactcttcacaaatccttctccgagatctacaaacgctgtttcattcttccgattacaatggcgacgagaagacgtactttgctcaaggtcattgtcctcggtgacagtgggtatggaagattccgatctctaacttctttcaatctttacgcgttttgttcgattttgattttgatttctgattttcgattttcgatttctagggttggaaaaacctccttgatgaatcagtatccttttcaattgaacaattcattcgatttggggttaattggctacagattcgttttcgtgtattgattatgtgattatgtgaagtctttaattggtgaattttagatatgtgcataagaagtttagtatgcagtataaagcaacgattggtgctgattttgtaaccaaggagcttcagattggggaaaagcttgttactttacaggtttggggcctttttcttttggttttgaaattacttttcttcgagatttgtgtgttttactttttttttttttttttttgtggtttttagatttgggatactgctggacaagagagattccagagtcttggtgctgctttttatagaggagctgattgttgtgctttggtttatgatgttaatgtgttgaggtcttttgataatctcgaaacttggcatgaggagtttcttaaacaggttcgtatgacaatttccttctttctgtcacactttgttttggtatgatccatttgttatatgttttgctttgtgtgttatgttataggcatggaacataggaatgtggtagtttttgttttaataggaattgttagcttttgagtatttagagtcacaatcttcagatttttggttaacatttcgtttaaacaaaacccagagtcaaactctcttttttgatgatgttgtgggaagagtttttgattatcgtcgtatgtcttttggttctcaggactatagctgaagttttgttttcccgtgagtaacaagatgattgagcaatggaacatgttttttatgtttgaatgatcatttgcgtttttttacctagcggtttactggttaagccaagtatattactaacttgctttcgtgttcataacagttttagaattcatgactctataaaccctgttctctaatcagtgtgttttcctgcactcacactttcaatccttttaacaatgtataacatgctaacttgtattgactcccttttccatggcatcgttttgggactgtccaggcaagtccatcagatccaaagacatttccgtttatagtgcttggaaacaagattgacgtagatggagggagcagtagagtggtaagaggaagatcaagatatgtcttccatcgtgctttaactcttttactcagtcttgtttaattcctctctaactacaggtctctgataagaaagcagctgactggtgtgcttcaaatggtaacataccctatttcgagacatcagcaaaagatgacttcaatgtcgatgaggcattcttaaccattgccaaaaccgcccttgctaacgaacatgaacaggatatgtaagttttctttttggtttagctctactaaatgagagctcgaaagtgtctaattgttaaaccggagagtctgaatattgtagaatctcaatctaaatctgaatatgacgtttaaatgtagaaggcagatagtgtagcttaaagacagtgacattcttacatgtctatctgcgatttgtctacttctgaattccaaactcttgtgtgatccgaattggaaactaagaatgcattaaaaataaccgctgaatacttatacagtatgtacctcatacacaatggcttgggttaattgcagatacttccaaggcataccagatgcagtgactgaaaacgagccaaaaggcggtggttgcgcttgctgaaccacagatttgaggattcaatgacattcgtttttttgatgcattcatttgaaggttggtgtactcttgagttgcagaacgataagcttgtagaagcaattttttgtcattccatcatatattaattgattggagaagtctgtgtatgatcaatcgattctgctggatacaaattttatttttgtaagaagaaccattattgctcttaatccctatggcgatataaagttgcatgctacactatttcagtttggtttgactcaactgtcggatatgttactacatctatagttagaccatatgttcattttgcatgtatagtttttttcatagaaatattgtaaaactttgaagtcaaactttaacctagatcatgtgatattttaaaaaactttgtgaatgtaatacactcgaatagctattcaggtgacaaaacctaaacagagattgtcttaaacaattcagagaggatatagcatggtcgtctattttctttagttctcaggctgtattattacccggacgtgatctgattctagctgctacagtgtactatctccaacctggaggctacatccctgcagaagaaggtggtggactcagtgaatctgcaattatactttcaatgcaatcattacagctttgaagaactaagagagatatcattgtccttgcttttcttttgctatagcctaagtggttattgcctattggtcatgttggtgggtattgtactattgggtattgtactattgttcactcaagtatatgtatatgaccataaaaaaaaaaaaatggttattgcctattggtcagttttttcttttaagtttgacccaaatctttccataaattgtgataaaacttaattcataaaatatataaaatatattttatatgtcttttaaatagaagtattattagttaatcatgcagtgtatcattcatccagtgtattatatgttttttaaataaaagtattattaaaaaaaatgtcattttacgagacatggttatatggtaggacgggtttcgatcgatattaatacacaacgatatactagagataaaattgttgaattaacaatcgaaatacaattatacgatcttaaatactaaacaaaaaattaaaatttaaaaattagtttaaaaaatcgaccggtatatccaaattcaaacataagttttaccttaatgggccaacatatgggccttaaaaggctttggatctgttactattacactccacttgcaaaaacctatcttcttcttcttcttcgctgaacaacaaacaacgcttcacaaaaccttccgataaacctcacaaccctcttcctcctcacactacagtaagaaaaacacgcgcgaaagctatggtaggagcttcaagaacaatcctatccctatctctatcatcttccctcttcaccttctccaaaatccctcacgtttttccatttctccgcctccacaaacccagattccaccacgcgtttcgtcctctttactccgccgccgcaacaacttcttctccgacgacggagactaatgttacagatccggatcaattgaaacatacgatcttactagagaggcttaggcttcgacatttgaaagaatcagcgaaaccaccacaacagagaccaagtagtgttgttggtgtagaggaagagagtagtattaggaagaagagtaagaagttagttgagaattttcaggaattgggtttaagtgaagaagttatgggagctttacaagagttgaatattgaggttcctactgagattcagtgtatcggaatacctgcggttatggaacgtaagagcgttgtattgggttcgcataccggttctggcaagactcttgcttacttgttgcctattgttcaggtgcttagtgaggttttatagttgaatgttgcagtttacattagtctttggctcttgaattgcttgtttgctagtgatacattttgattctataagaaagtgaaacaatttagtactaattctattgattatatgcatccatgttgatatcaagagcacttgatttggtttgttttataatgtgtatagctcacttggtttgttttgttcattctttcgagtaatgtatgacatggcggtttaagttgtgttgatttgatttttgcagctgatgagagaagatgaagcaaaccttggtaaaaaaacaaagcctagacgtcccaggactgttgttctttgtcctacaagagaactatctgagcaggtttgtcttcaccaagattagtttcgttgtttagttcgactatagtaacaatatgactctgctgtttcggggaaaaggaaaagttggaatctttactttagcataaagttttggttactttcttataggatgatgataaaattggagaatgttttaatatgtgattatagaattttttaccagtttgttatatcataaatgtttgtagacagagaaatggcgaaagaaaaactaattaaggaatctgcattaggtttaccgtgtggcgaagtccataagtcatcacgcgaggtttagatctatattggttagtggtggttctcggataagaccccaggaggattctttgaacaatgcaatagatatggttgttggaacccctggtaggattcttcagcatatcgaagaaggaaacatggtgtatggagatatcgcatatttggtacgcactactttgggatcttgactttatgttccatgattcttatggttttaggatcaacattaaattaagggcaatgcgaatctctttactcaggtattggatgaggcagatactatgtttgatcgtggctttggtcccgaaattcgtaaattccttgccccactgaatcaacgtgcgttgaaaacaaatgaccaaggatttcaaaccgtcttagtgactgctactatgacaatggtatgcacatgttcattgggctcaatattacacacttgcaccattctttgctattatcatgatttataaatttgttgctccatgcatcttgaacttcagatattaaggtagtgaatgaaattgtgagttttcaggctgttcagaagttagtcgatgaggagtttcaagggatagagcatttgcgtacatcaacactgcataaaaagatagcaaacgctcgccatgacttcatcaagctttcaggtggtgaagataagctagaagcacttctacaggtaaactacatcattcagtctctgatttttgaaggcaatcagaaatgttagggttcctgtttgggtgcaaacatgtccgagttacatgcacattctttctggtatgctcctgctgtacttatacattatttttgcttggatgagaatgcaggttcttgaacctagcctagccaaagggagcaaggtgatggtcttctgtaacactttgaactccagtcgcgctgttgatcactatctttctgaaaaccagatctccactgtaaattatcacggtgaagttccagcagaacaaaggtgggattaaaacagcttagccttaaacgtgatccatttcttgaggaatgcagtgcttagtattaacgtgtaaaattggtttgcactcatctatccagggttgagaatttgaaaaagttcaaggacgaagaaggagactgtcccacgctagtgtgcacggatttggctgcaaggggtctggacctcgacgttgatcatgtagtcatgtttgatttcccaaagaactcggtaagtatcttggtcaaatgttcctgcctataatctttattctttcttctcttaactcgttgatccactcttcttgacaccttaattttatttaaacttgaattccttagattgactaccttcatcgcactggaagaacagctcggatgggtgctaaaggtttgtttcatacctctagattatcacttgttaagttctcgtatttcagatggtttcggctagggtggcgtaccaagttttcagatttttttgtttatggactatagaaacagaatgacattaatattgtccgcttttggttatactcattgcttcggttatggtttgaggcgctgaaagtgctgacattgcctctttacaggaaaagtgacaagtctagtgagcaggaaggaccaaatgttagcagcacgaatcgaagaagcaatgagaaacaacgagagcttagaatcactcacgactgataatgtgaggagagacgccgcaagaacccatatcactcaagagaaaggaagaagcgttaagcagatcagagaagtgagcaagcaacgaaactccagagacaaaccatcatcatcatctcctcctgcaagatcgacaggtgggaagacacccgtgagaaagtcaagttcaagttcgttttcgaaaccaagaaaagcatcatctcctccagagaaatcttcaaagccaaaaagaaaaatattaaaaacggttggatccagatcgattgctgcgagggggaagacgggttcagatagaagaccaggaaagaaactaagtgttgttggtttccggggcaagtcttcttcggcaagagcctcttgatttacattttggcaagttaacgtcagtggtgaaagtgaattatgttcgggttatgattacagaagcgttagtaatgatagaagaagttcacttttgaaactcataaactatcagaaaagtctgtatatgacatctatggttatggagtggagaaataatttgtttatctgtttaaattaatgctgtgaagtgttcaatggtaagacatgattaggggagagtttgttaagtgtcctcgagttataggggacagtccctggaccctagtggatgtgaggcataaccatacgatcagaggggtggttgacggctacggcactcttagagtttctggaggttgaggattgtctatgccgctctatttgatgtacaatataattaatggagaaccgtctactttgattgggtaagtagtttctaccagcttctaattgcattgctgcagtttggatcatattagagaaatatttctaccagtttctggaggttgagcattccaaactcatctagtagattagagaaagtggctattaatgcaccatcaagactaactctacatagtcagtttcaaacgcctcacaatcaatccttcttgtaatgataatcttcatagcccaaattatttcatcttcgagtgaaagggggtgggagacctccaaagacactttgaaccaagaagtaccgtttgttcatttccgtgaaaacaccaccttccatagaaatcttagagaatgagttggacttaccaaagtttccctaataacaccggattcagtggatctcttcgcttatgaattgctcacttgttgtgttgtaattttgatatcatattgtggttttcatccaaaattaaactctattctgcctcattttttttattatcatcattttagtaattttcacctcaaaacaaaaacaaaaaataaaaatagataatcatatatatgaaagttggccaactctcttcataagattgacacatcatcactttagcatttgctatgtctctattaaataattaatgtaagctcttcaacttttaatttataggttaatgattttttttgtaatccaaactcaaaatatgagtgtataatagtcgtggattacttaatgatttgagtaaattattctcttaaatagatatttatataataaatctctgagggtgaaaaatacgtaaagagttccatcatcaaatttttaggtttctagaatccaacactaccctctcttaaattggtttaagacaaacattatttatgaattatatgtatgatgcattgttgagaatgttattaggaaaaaatatttttaatactaaaagtaattgtttattgcatgagtgaacgattagataaataaaatttatatttaaattaaacaatacaaaaaaatccaaaaaaaacgcggcgtagcgcgggtgatcatctagttatttataaaaactaaaaactaaaaaaatgtcgttcaaggttttgcaaaaaataaaatctacaccaaaaaacaaaacaaattccaaaaaactaaaaatcaatgaatcattcatggccttagttagcatttataagagaatccaatttttactcatctctacattatatttttcgggagttttgggcttgtgccggcccaatatgaaagtatttttcttaacctttttgtgttgttgtgacaaaatctaaactttattttattttattttctcaaagctttctagtctcgttagatctgcaaaaaatcacccgctccaagaaagagaaaatgatctgaattgaatgctcttaatcctccaaaaaatcctcctcaagaaagagaaaatattgtttgaatctagtgaaatagagaatgtaagtgtttattttcttcgaaaagaatcaaaataaccgagaaattgatttctaattgttatttttgttttgttttgttctagagatcaaaataataaaacaatttaagagatattatcaaagaatcagagtgattagagattacaaaaatgcccctattctccctcatggttttgacgttaatactctactgatcccaatgtttcaaagtcatctccaatctaattgctactagggagaaattttggttgagtttattgtatcggatggaacatatcccgctaagattaactctgatacctacaacaacttagaggctgacaatgatagagaccgacgactctttcttaccgatttaaaaatgggtgagttggaggttttgtacatttttaaaacttagaacttgattgaagacctttagatttgcgtatttcaagagtgttttggaaaaccgcaaaatatcaccaatcacacatttgttttgtaaattgtatttttttaagaaaacaaataaaagtctatttgcgttttctttatcagataataactcttgaaacgcgcttcttaaactatttaataattaattgtttttctacttttgtacagtaaaagatctacaaattaataatgtttgtaccgtgaaattttctcaatttatagaagtattgatttatcgataaattaataattattaattcatagagagatttggttaattttgtaaaattttaatacttttatgtgtggaaagaatttttttcattataatcaacatattttttagaaccagttacaagtaaaagaaaatattttgtttaaaaacaacaaatatgttttttaaatagtgaaatatcgaaaatgaatacttatcaaaaatattttaatgtaaatattagaaaataacagttctaaagtcatatttcactaattctttcttacacatatgggtaagtaaggtaaaagttttcctcaaaaataataatttgtagatatatatatatatatatatatatatatatatataaatatagatttatattcaaactaatataacgtaaaggttcagtcaaaatgaaaattaatctcatatagtactaaatacatagaagggaagtactagagtctagcttgaaaacataattaagtagttttcattttagctaagctatacaattcaactatatgtagtgtgtgtatgtatgtatacataaataaaatgtatttaaagcaaatgatacatccccgattgtttattcaaattcatagtcttgagagttgttgatgaatagtcattcttcctttgctaatatttgtttctccacaaccaaatctaaacgtagctttgttaggaagaactgatcagagcagcgactgacccaataaaggcggcattgatgtaagttgtgggctctgcatgagaataatctgttcttttgtcgctatactggtcggatgaatttggtccgcccacaattgcgccggtatgcacattcgggtttggtgtatcaaaattgtagtatgaaaatcctccattacagtcgattttctctggtttagattggattgacggtaatgacgagcctctatgatgaggttgtgtaggatactttgttccaaatccaaccatgtaagacattttcaatggattatttccaagaatgtaatcaacctgaatatcaaaccggttggttaaaaacatggtattggtatatagaaccagactagcgggataatttaatttctttacctgtgacttggcaaaatttcgaatttgagatacggtgaactgagtcgacccacactggattgaaccaaccccggctttggttagagtttttgagtaatagaataatatagttgtagccgttgttacatactgtaagttgctactgtctctaataaacaaaatgccacctgaataaacaaaaatcacaaacaaatgttaaccataaaaccaacaccaaagagaacagaaaaaaaaaaactcaaaacaatttaactagtgaatatttaccaggagttggcttaatttgttgagagctacttcctggcatcaatgcacagacgaatgattcaacatcggtcttaaatttttccaagtcatttgccccgttgtaaaactccttaattaaaataagaaaataacaagaaatatgaatttagatcaacttgatgttatagattaaaaacataatgtataatttagcgaaattggtttagttataatgctatatatactaaccgatgcgagtaaagcttgaacgccggcgaatttgttgtcccaactaaattcattgatggctttgctccaatctttgttgcttataacataatttaagtaactcttttcccctgttgctttgtataaccaagccgcagcccacaaaagttcatcctatttttatcccaaaatattttaaaacataaaatgtcttgttaagtaactcatttacgtcaacgtgaaaatatatctatgtatatcagtttgattacctggtagcctgagtgtgagcagtagaaggggcaagaagcttggtaagaacctctgtacttatcagcaaattcaaatagctaccacaaaatagataatttatacgttaccttatgattgaactgatgtaatgatatttatagacttaattaattaatatgaatttacactcacggatttagcattgtttagtaatttggatgaatatgtagaatcaaccagtttgaaaacaagtgaggccgcggcaagagcggctgcggcttcacctgcggcttcggaaccgggggaagaggaagagatactatagagagttctaggtgtgtccatatcttctggtctctcccaacaactatgatctgaatttccatctcctacctatttacatccattaccaaaacagaaccaaaaataattaattgaatttcgatagtgaatttgttgaatattgtagaagtatatagtatataagatacgagatatatactatttgggacatttaacatgaaatgaaatatttgaataattctctatactagtatacctcaaaacaaaccaaaatgtgacagttcggcttggtttagacgtgtaaaccgaggggaaaagttagtttacctgtgtatatagcatgttggtcgacgtatgagcacggaggataaaattagttccccatttgatagtagaccggagataaccaagctggttaacgaaagtaatctcattctggtattcaagtgcagcccaactcaacaaggttgtggtaaatgacattggccacacaaattttacattgtcaccagcatcgtaatatcctccaatcaaattcacctgagaaatcaaacacccgaaaatttggttaagtctataagagataacataatgccaaaacttatgaaataaggttccatttcggaagacatatatgcatagatatagagatgtttatgaatatagtcggtttacattagctgatgcaccgtcagacaggccagaatcagctcgccatttaaccctttgattagtcgggagtttaccagatctttggccttcaaagaacaaaattgatttgttcagtgcatctccatagtcaagagcttccaagctttcgaaagccaagaacatcccaattaacattacaaccaagagtttgcccattttttattactagactgtttttagaaatgtttctctttcgaaatgggtttttaagtgttgcttgattttgcatgaaatgtgttttagagggtatttatagataccccatgcaagtaaagttgggtacgtaaattcattgcatgagatgtttcacgtaattttagggtaactttggatgtactgttattatgttctctaacaaaaattaagtttagatgataacggaattacaataaaatatttttgatatagcaagttgtagttattcacatcgtatctttttttttctaaccaccatactttatttttttctcttccatctctgaacgtttataaatcgttacttaatgaaggagttgtaatatattccattataaaggctgttttggctcatttacagcaaaacaaaacaaatattgaatcacactacttaatttttgtaaatggttatttattgttatcgttgttttttttaaaactaataaacaatatgtaaaacctatatcaatttaaatcggcttcttaagaaacaaatactttacgtcatgtaatttccataaatttggaaggtctgacgcaaatatattgctgtagtaatgtaaaaatacttcgtaattaacgatccaaagttgtgtatagttatgcatctgaaaacttgactttaaaatatatgaaaatatgagaagattttttttattactttttttttgtagaatgtaaaatttattgataaaagaagatagtgttactatgaatgcgacatgaaatatgaatgtttgaaagtttcgaaaaatttaaagtgttacactaaggagagattattgagtgcgagtttgaaaccagaaacgtaggccaccgtaccatcatagtcagaggaacccgtcatttgcgcttagtctatttcggacatatcaatgaattttatgagcatgtatgggggcaggagttggtgcctttccatgacgccgttcattgcgctctcacaataagctatgaattgtgagttgaaaatcataccgcaacacaaggacatcagcaacaaaataaccaacaactactcccatgtcaatacttcctcgtgagcctaagagtgcatatagattccccagagggcacaaggagacatgccaaaaataagtttcccttctagactttacctccattttgtgcagtggtcgagctaagtctcagtattttaagatttgtttccacatcaaggaaccagagtaagtgttaccacaaactgacaagagagaaccgttccgaagcaggtttttgtgtctccataaaacccataatgagtcattttccgagaccggtctccatattagcttcaagatacttatagtatttgtttcagatagcaaatgtaattccaaacctgcctcttggtttggtttacaaatgtcactccaagcaatctttgctttttctggttaagatccggacaaggccaaagaaaagcagacgtgagaatctcaaattcttttcacggtaatagtttggccaaaactgaaatatgaaaaacaaaaaggatttatttgcaaattctcaacaaaaagccacgtcatcaaatccttttcacggtgagtctctcttctacgtggcacaacccttaccgggaacctctctattctctcaatcgacaaacttgacttaaggattccaaacgtcgtcgcatgacttgtaactctgcaccattgctaatctaacatctcattctccaaaaactcaggaactcgaactatcttccacaactcacgaaaatgtttctcttaaaggtacgttcttttttatgtcctctaattaccatcgtttgtttgtttctgtcttatgtcggattaaaaatgattacttttgtctgattttgatctgtagacatggagatcaaccgcttttggggtttatggctacatgaatttcaccaagagtggtttcttgtaagttgaatttgcgtatttctacattttcaatcctgtggaattataaagtttgaatttttatggattttggagacttatacgattcaggctgtttagtgttctttggattaacatagaaagattcaatcttttgattcaacatttgcttcacatgaaaattttgataccttgaggaactctgttatggagaagtggttgatgtagtacttgtggttttttttttttgtgtggcagagatcattcaaagaagtttaaacctgaagatatgcagttacaaattgaaggaaagaattgtgtagttactggagctaattcaggtattggttttgctgctgcagagggtcttgcttcacggtaggttacttaagttatggaattgagggaaccaattgaattcttgtgttggaagagtgttaccaaattttataatgtctgcttatgtttttctagtggagcaactgtttacatggtgtgccggaacaaggaaagaggacaagaggctctttctaagattcaaacctcaacaggaaaccaaaatgtgtacttggaagtatgatcattttctactttcaaattcattttttgcaagtttccatactctttatcaaccattttagctttgcttctttcttaggtatgtgatttgtcttccgttaatgaaatcaaatcatttgcttcgagtttcgcttccaaggatgttccggttcatgtgctggtatgtggtcttttcttttactaattcttagaataacatttcacttgtttgattctggttttcaaattgtaggttaataatgctggtttgcttgagaacaaacgtactactacacctgaagggttggtctcatttatctttcttgaacgttccagtatcatttcatcttgatttaattttacactcctatgatcttctgtcataccagattcgagttaagttttgcggtgaatgtacttgggacatacacaatgacagagttgatgcttccattgttggagaaagcaacaccagacgccaaagtcattacagttgcctctggtggaatgtacacttcgccgcttactacagatcttcaggtaatcaatctgctggacacatatgtcatcttcaagaattgcttatgttcatttttttaatctctttggaactgcttgcaccactcctatgtcagatatataactcaagctacatatgattgttctgcagtttagtggtgaaaaatttgatggagtggaacaatacgcacggaacaaaagaatccaggtctgtaaaatctgaatctactagtcaagaagtcactttttttcggtcttctgaatttgtttctgtgttaggtggctctgacagaaaaatgggctgataagtacaaaaataaaggcatagggttctactcaatgcaccctggctgggctgagacaccaggtgttgccaagagtttaccgagtttcagtgaatcgtaagataattctgctaaaggaaacatctttaatgctaaaggaaacatctttatggtgctaaagaatgttttaaacttgtgaatcaggttcgcgggtaagcttagaacaagcgaacaaggagccgatacaatcgtttggttagcactgcagccaaaagagaagcttgtctctggtgcattctatttcgatagagctgaagcaccaaaacatctaaagcttgcaggtacaagcaagtctcatgaccttattgactcagtcattgattctgtgcattccatggcagctcttaatccttaaatgtccatcttcgacatagtttttttcttgaaaataaaatgtgattgcacgtaacagtattagtcttttctcattattgtggaaatattatagtatggaatatttatatcttttacttattacatagtatcagaagttcagaacagaagaattacacatagttttagctttggcatagctatatcatggatccatcatcgggtttttaccgcgttattcgcaaagagtaaacataagtaaacagagaatttacttattaggatgggaagaaagataaaagctttggcttgcgaagccaatactgtttgaatctctgcctcgaatactcgatataatcaaactcaatcttgttcacataaccctgcacacattcacacacaatcataagcttctgtgtttgttgttattttactttgatatgcatcaaagaaagagagaattagcttacagatatgattccccataaaccccagaagagatggcttgccaatgtatacttctcaatatcatccaaaagttgttctatgtcttcttctcttgcttcttcacctgaagaggttaagtagttacatatgaatctcctcctttcttcttcccctgcaatttcccaaaccatagttaaaacgaaaaaaactcggtttttcgactatggaattataaacactgcttgatttcatcactgtacctggatatagagtgtagtccaagatatgaggagtgtttgaatgataatctgccgccatttcacagaaatgatttgctatgtcgtaagcgatcggattataacttgcatactcataatcctgtttaaatccattttcacacaaattattagacagataaatgagaagtctcatgttcatcaatgggtgatgatattgttttacctcgagttaaatcgtatcgtaaaaatgggttttaaacttttttcccccattctgaaagaaagaaaaaatgttaagaagatttgtggttatgagtaagagacttacaatgatagtaattgcattggtttcttcatcaatcatgatgttaccatactgcaagtcattgtgacagaagccaatctcttgttcattgttcacttcttgttccagcaggttgatttcatcttcaatgtcgtctagaccaaactctgttgaatgttcatttgaacatagattcttggcttgtcctacccaagtcctgtcatttacatgttccaatgaatattactttcatatgatcaaaatatttactaggaaaatccttttagtatgcagtttctttacctcatcctgtcccagatgagcataattctatctccaggaatgtgtatgctgtgaaatcttcttagcttagatgcaacaagagctgatatgttcggatcacgaagatcggttgccgatagtgtctgaaccgaagttatagatgcaagaattattattgtgacatttttataatggaaaatgatcaacacaaaaatttaactacagtatgaagacaaatcaacaataggtgcacagctaaaccggtttggttttttccggtttaacaccacatgaaaaaggtaaaccaattatatgagctatagcctatagggattgctaaacctagtttaacccaataaaaaactaagccgaaagctgaaccaaagaaaatataagccaattcggtttcatttaactacatatccaaaagaaaaatcaaaccgaaccgaatcggaattgatgaaaaacaaacagtaaaatctgaaaatcatttacaaatcaaaacctgatgaataataatatccgtcaaatattttgtaacttgtaaggaacccaatttataccaaacatgaacaatatcaaaccaaaaccgactgctctttggtttcaatccggtttcataaaccaaacaactagaaaaccgtaaccaaactaaaagcaggattggagaaattacatccttacacatgaaaatcatcaaatattttctaaaaatcgaattcatactgaaacaagaactgtatcaaaccggatttgaaatccggtttcaaaatttcataaaccgaataactagtaaaccaaaactccaaacagactaaataaaagtgaaagaataatattttatttacccgggcatggataaactcttcgactctaccgccggcgaagcgaccaagaagtgtaggaccgtgaccatgacgagcaacatactcaaaagtacgaatctcatcgtctctattgaagaaaagctcaacaccttcaccataaacacgaacaagaagcttcctacatcgaagattcgtttcttttctaggccaactaaccatgaacacttcgttagtcatcgctcctttcattggcttcacttcaagactctcaaaatcctcaactacgtctccccatttcgtcgaaagcgcttgaagaatcttccttagctcgtctggtgatgagcttgggatcaatccaaagattcctaccgccatctataagaaaaaaaaacaatcaaattctttgtttttttaactttgttacttagtttgctttgtttcgctgagtgatcaaacttgggaagaagtagaagaggcttaccaagaaagttgtagagggtcttggagaaaaagttttggggaatcttgaaatcagagagaaaaaatctgggtgttttttggtttagagttggagagaagtcttggtcacaaggaaagaaaaattgcatggtgagtgtgagagaggtgttgaaagagagtatttatggacttttgtctttacataagaaagggaatatctatttctttgtcttggtgggttggatttgagaggaccaagaaacaaataaagaaaaaatggttttgttttgtaaaatttaaatgttcattatatgcatgaaaaatctatcaaacaagatatcaactactttggggggtttactagtaagaaacataaaattttgtttgatttggtaaaggtgaaagatacaatgtttctattttattattagagaaaattttgtttcactaaaattatattaaataaaataaattagaaatttaaaccggtaatgcaaagcatacattacatatatgtgaaaacggtcttgcgtttatgtgttaaaacacgaaaaacaaggttcataaaattttgattctcaaccaaaacatgtttgtaaaacatgtaggtttgacaacaacaaaatctattaaaatgttatgatttaaagcaattttcagataagattatgtaattttttttataaaaaacaacgtattattcgagtttgatttggatggtgatacaacgaaacaaaataacaataataataataataataatatatcctgatctaatttttagaaatatatgaatccaacatagtaagatgcaacgatattacaccaaatcttttgatcagaacactcctatcaaatgacgaaagtagaattatggtcatggacatgcaaatattactagaaacatggctagaactgaagatgataagcacaacgtcaacaagtataaggtgtattatttgtccgcaaaaaagtaccaatcaacatagttaatggcgtttacattattgtaccagttgggccgaaataaaatcttataatatatcagattagcatgattagacaatgacattttcaaagagtacttgaaagcattttgaagacttagcaaagagtttccagaaacaggtaatctctcaactttatatattctcgacttaaaaaaggcattgtgatttcaaatctaggtcgggttacgtcttaggttgcatggaaacccgttccgaggtccgtttcctgttttcgaaacgtttcggaaacacaaaaatcgtcacgggaacgcgtttacacaaaaatcgtcacgaaaacacaaaagattgttaaaacgtccataatagttagactattttctaactaccataatcagttttgcttgtttctttttggtttaatttaagtttacacatagttcttgattggatataacaaactttggtatgtctacacataaatgtaaaaagtatggacggtgagtgagtcagacaaaagtaggtaatgactaaatgagtaaggtaggcgtcggtcaacagaaacggatattttgctgctgatttcagacaaataagcttcgttacttattttatctcgcggttaaattgcataactcaacttggattccacttgcttactgtacaaatgagaatacgacacgttttaatgtaccacactctttgaacaagataacgttgagcatttttaaaatcgttggctttatgttttcgatatatactttatatttttgataatatcctaatatatactttttcctaagtttctatatattttaatttcaagtgaaaaaatcttggtaccgaatatatactatttttcaaacgtgatgattgttgaaaagaaaaacaaaaaaatgatgctttgaaattgtattttaagagtattgctccgtgaaatcttttgtaatttttatgtacttttaaaatgatgcaataacaatcttaaattttggatcataattttttttcttgctataaattcttatgactccacgtaatgtgagcatcaagtcaaaagaatggaaaatggagttgaattaagactaaattaacgtctggttgagaaccaagattccccttaatttaatgggattcttaaataaatgtttttggcttttgtacaacaaattttgatcctccacttctctttcaaccgtttatccttttgattattcttttaattttgcaactttactattatattctttaagaatttttgtttcgtaatcatgttttccaccaccttttttggttgtcattttcgtccatagaaatatgcagaatatatcagtcaaatttttgaaggtgagagaggcaatggatttgctgtgaaaaaatggcttaccgattttaggtagattagattagagtgttgtagagggattgtaacgaaaattgatttttatgctcacctctttttcgtttcctccttagtacattggcatgtcttgtggtaaagttaggacacgacactaaaggcctaatgtcggacagtttatgacgttatttgattggagacggtttaaagtttttctaaaattactaagttttcttgtaaattagtcgaacatagcctttcaattttttcatcttctcttatgcattgcaaatttgcaatgagtggaataacttgttttatcagcgaacttttgagatattaaatgcttaaccccgagtccgagacttaggtctcaagacagatgtaacacttatctctgaccattcttgaaaaactcaggagactccgaccctaattcgtcctcgaggccttcttcaaagtagggttcggccactaggcctcacaatctttgtactttgcaaccgcacctcttgcttgttaattcactgaaatttctctttgacaagggtaaacaaaacctgaattcccttagaaagaaccgaagctaattagtggctgatttcatgtgaccactacatatatagtcttttttcgtagagaataaagaacaggaaaaggcaaagcgctttttggagaaactataaaaaggttgttgatcaaactaaagtttcattgtgtgttgtgtaatgtacaagacaacaaaaacaacagctccagtgctaattaaatgacggaattatagagctttagttaagcaaaccttcccaaatcgtacaaagattcttacataatcagtcaacaaaacatcaaaaaatttaacaaactaaaaaaaaaaaaaaaaaaaaaaaaaggggaaatagcaaagaagacattttgttgcttaaaaaagaaagatgtatgcaaaagaaagaaagaggtaataggagtctttagatagagtcaacgaccttagtgtcagagacccaaagaagagtagtttcaagaacaatggagtcttccacaaggtacccttttgattcatcatttagatcctccacagatattaactcagatatccctgatccgtctccattctctctcgagtaaaaatgaaaaactatacataaacatcactcataagtcagtctttaagaatgatcatatcgatttttctaccctaataaaaaaaatatatagtttgatatgtaccgcgtttctcaatgtggttagagtttttctgatttagtagccgaagtctgagctttgcataagtgctagaagctaccgcatttggcagatatgccatggcttgtacataaactgaaagtgctcttacctttttgtctccctttggactaatcttcaatctccttaaatatatcataatagcacatagaataaatattttcaagtaatcagtatcgaaaactggtgattaagcgttacattaatgaagaaaaactcaccattttctatctccgaccacaaattcatctgaataatagtatctcttgtctcctatatatgagaaatgagagattttccacgtgaatttgttttctggtgggttttgtgtgaatacaaccctctccaccttctctatcggctttataacgaatatctccaccccaacgatacaagcatttccatcgatgtacccattctttgggtcgttgaacttcgaaaaaagaagcatttgcgcaaatccacactcttttttctccttattgtaatgcttcatagttccatctacatatataaacacaccaataagcataattctaaccaaggaatatcttctttggtttgacagatttgactaaaaccgacaaaatcgatcacaccatgtataaattgctatatcatcttaataaaatgtgtgtttgtaaatatgttcataccttgaaagacagagtattgcttgttgttgtgattgtagatgaagaacttgagttcagcatcaatctgcatagaagcaccaacattttcgatcctcgcataaatcgaaacatggtcttttccaccttcttctaactttccagccgggtaaaatatcaatctcctgattaaatttatcattgataaatcacacataacaaatcttacataagagttatgaaatatatattagatcttagatttggttgactataccatttatgtcccccaacgtcgaaatcagcagattcataaggttgatgactgaatttaacctcagagaaaccaaccagcttcatcaagtagcttgaaggagcctcttctcttatggtttccatgatgatgaatttctttggataaagattgttgacttcagagttgtttatttgtatggaagccagaaatgagatttgcatatatagaagaaaagagaactaatagcaatatataaaagagaagacattttctttagaaacaataaaatatgactgaagagagtcattgactttttagacaagtctttgttttgaggttttacatgctagttttctgtatttccaccgcagcttccttatcgtgatggagaccgaaagaatacaccattgatagaaaagactcaaaggatcttcaggatgggattcaagactgtgattgaataaggatatattttgggtttgtttttgaattttgaaaaatgtattcgtgtttaaatctttttttttttgtttgtcataattcgtgtttaaatctaatgttttaaatttttatttttatttattattattattgattattgacacaaatattattaaaatcatttacgaaaaccgatactagttttaacagcaattatccacaaccagtcaactccgtaaaaggaacattccagcagatccgacttgccaaagatgctgctatgccgaagagacaattaatcatataatttttacttgttcttatgcgcatgctgtatggagaagtgcaaacttttctgggagtaatcggctttgtttcactaataatcttgaagagaatatacgattactactgcaggcgaagaaaaaacaaaaccttaccattctcaatggattgctgcctttttggataatgtggcgcttatggaaatcacgtaatgagttcctttttcaacagattgatcgattcccttggaaggtggcacagaaaggggaacaagaagcaaccgaatgggtcgaaactacgattaatgacacagctaactcacacagcactgaacaaccaaatgatcgaccgtcgggccgaagtaaagaatggagtccaccaccggagggttatctaaaatgtaactttgacagtggctatgttcaaggaagggattatacaagcacatgttggataatccgagacagtaatggacatgtaatacattcaggttgtgcgaagctacaacaatcatactcagccctacaagcggaagccttgggatttttacatgctctacaaatggtttggattcgtggataccgttatgtgtggtttgaaggagaaaattaacgactctaattaacaagactgaagatcatcatctacttggaacactgctgtatgacattcggttttggatgactaatttacctttctcatcaattggctatgtcaatcgtgagagaaactcggcagcggacaagctatcaaagtatgcaaactcaatgtcttctttgtatgaaacctttaatgtaccgccacgatggatacaacactatttgtactattcatttacaaattaataaagtgagatgttatataaaaaaaagaataattgatatgaatatttttattttaaaaaagtaagaactaaaaaataataatcataaaaatatttcttttaactgatgcaaaatatttgccaccacttccataatcacttatataaattatacgtaatgtaaatattaaaatttaagtgacacgaaacactattttgttttgtagagattcgtttaaatgttcataatataaatcatatatatgaaagttggccaactctttccatattaatgacacatcatcacacaagaaaatgacatgtgtcattcgatattttttaaactaaaaattaataaaattaaataagcaaattaaatgtatcatcaatcctactcttaattgatttctttaaaataaaaatttaaattaaaaacaaaaaagtatgttaataaattaagcactactttcattatattctttttattactatttttttagcaataatcactattctataatgactaaatttttttaatacactataataaacctttaaaacataaaacctaccaaataattatatacacgatcatttctcttatataaatatactagattttaatccgcggtatactgcggggctatattatttttaaaaaataaaaaattaatttgtttagtagattaaataaatataatttgttttttatattttctaaatgtacaactattatatatatatatatatatatatatatatatatattatttagtatacaattacaatgtttaatttttactgtttaaaaatatagaaagaataacaaacagtttattaagttaaaatttagattataactaaataatacaaattttaattatatttgttttattaatataatgatattttaatttatatatatatatatatatatatgatttcacccgtggtatactgtctcgtattattatcgatccaaagccgtcatatcatctaatgtcgttctgtgaaattaaacatgtctaatagattcacccatgctatactgtctcgtattacctatcgacccaaactcgtcataccatctaacccggttcagcgaaattaaaaattattttgttatttttgttttaataatactttaatttaaaagatatataattcaaataaattttttttttttaatttcaaatggttatttaatttttttaaagttcatatattataaatattctaaactcgtcttatcatctaatcctgttatgtaaaattaaacattatctttttttattttttgtttgaataatatttttattaaaatatttataattcacatcaatttaatagttttatttcaaatgattatttaatttttatagatttcacatattataaatattataaaacgtttttctgttaaatattttaaatgtttaattaactataatatttatcttttaatcaagtatatattaataatgtcctaaaatttttcatttttaagttattaaatgatactttcatttttgctttctttttattttatttttcatatgaatactcttgaaatcttattcagtttataaattttatatatttaatcatgaacgtataacaatgttgttggagtattatatcaggagaatacataaaaccagaaatagtttatttataatcaaattagataattttcaaatcattcaagacacgatcatttctctaatattgatatacgcaatgataaaagatttaaaagtgttgacttaaatgaaattcaatttttgctatctttttattttcttcatacccctttttcatacgaatactcttcagatcttgttcagttgaagtaaatccaaactttaatcatgagcttatcacaatgttgttgaagtacataaaacaaggaattgatttatttataatcgaattagggtaaattttaaaccacacaagtaacatggttacacataattgtatcaaaatatcatatattgttgttatatgtattcatgatagtgaaaaatatttataaataatcagctttatacatgaaaattagaaattgatatttcgaattacaaatgaatctaatcataaaaaatgtaaatacatattatggatctaattttattaataatacaaaaataaacataaattagcaaaaataaccatcaatataaatattttttaacaattttctaaacaaacccacgcgtagcgtgggtagtcatctagtataaataatgtgtctttggaaactatttttctagatctgatacacctcgccctcggcactcgcatccacgttgtcaaacaaacccaaaaagaccaccccgaacacatataaacgattatgtggattgcaccataattgcagtaaatggttgtgcatgttttttttttttttccaatgggattttgcatgttgacgtggatttaacaaaaagaatttgtatttgcacatatcacacaactttactctgtaaacaacaaaaataaaatattttagcaaaacaaaaacaataaaacagaaaagaaaacaccaaaaggagaaattttgttgcttacaaatcagagatgtatgcaagaaaggagaggttataaaaaaaattagatagagtcgacaaacttagtctcagtgacacaaagcaaagtagtttcaagaacgatggtgtcttccacaaggtacccttttgattcatcatttagatcctccacagatattaactcagaagtcccatatccatcttccttctctctcgagaaaaaatgaaaaactatacaaaaacatcacatataagtcagtctttacgaatggtaatatcgatatttctacccaaatataaaaaaaaactagtttgatatgtaccacgtttctcaatatggttagtgtttttctgattcattagctgaagtttgagctttgcgtaagtggtagaagctaccgcatttggcaaatattccatggcttgaacatagactgaaagtgctcttacctttttgtctccctttgggctaatttttattctccttgaaaataccataatagcacagaataaatatgttcaagtaataaatatcaaaagctagtgattaagcattatatttatgaatcaatactcaccattttctttctccgaccacaaattcatccgagtaatgatatttcttgtctcctagttttgagaaatcagagattttccatgtgaatttgttcgttggtgggttttgtgtgaatacaaccctctccaccttctctatcggctttataacgaatatctccaccccaacgatacaagcatctccatcggtgtacccattttttgggtcgttaaacttcgaacgaagaagcatttgtgcaaatccgcactcttttttctccttactataatgcttcacagttccatctacacacatatatacacacatcataaacatatataattctgtcccaagtaagatatcttctttggttaagagacttgactaaaaccagcaaaattgatcacaataaatctctatatcttaaaatataaaggtgtgtttataaatatgttcataccttggaaaacagagtatttctttgcgttgtgattgtagaggaagaacttgagttctacatcaatctgcatctcagaagcaccaacattttcgaccctcgcataaatcgaaatatggtcttttccaccttcttctacctttccagccgggtaaaatatcaatctcctgattaaatttatcattgttttatgataaatcacacataaaaaaatcatacataagagttatcaaatatatatgagatcttagatttggttgacaataccatttatgtcccgcagcgtcgaaatcagcagattcataaggttgatgactgaatttcacctcagagaaaccaacaagcttcatcaagtagcttgatggagcctcctctcttagggtttccatgatgatgaatttctttggacaaaagattgttgacttcagagttgtgtatatgtatggaaggcagaaatgagatttgcatatatagaagtaaagagaactaacagcaatagagaaagactttttctttagaaataataaaacacgactgaacagagtcattgactttttagacgtgtctttgttttgagtttttacatgctagtgttctctgttctgtattataattttatcatattctttgacacacttcatcttgtaattcatttcatttttaaccacacaacttattaattaatatatataagtggagatatcaaaagtatgtattatgttatagagcattgttcttctccggagatgatttgtaagaaagagaatgtcctgagacttaagctgaggaaaacagaggaaacagaacatgaaaattagtctaaaattaggtttggttggagacggtttaaggttttcaaaaaaaaatctaagttatgtaattagtcggacatagccttccacctttttaatcttctcttatgtattgcattagtttgggatgttgaatgcttaacccgagtccgagacttaggtcttgagacatgtgtaatacttatctctcaccattcttgaagaagtcaggagactccaagacctaggtcacgcgttgtcgaggcctcacaatttgccattttcatttataccctctttaaatttataatgaccattttacctttatttagaaattgttttaggttaacaaaatggaatattaatatttttcgccaaaaatttcgaaaaaaatatcctgccaaaaaaaatttctcaaaaatatttttcccgcaaaaaaaaagctcatctgcaaccagctcgacagttgtgggttcgacgagagaatgttgctacactcagaagtatgatcttgttaccgttatatgttatgttttcctgagaaacctctagtatctgttgacatctctacgttattatctccaaatcttttcttcatgcaagtgtttgtattttaatatttgttgatggcatgcttaaaaagtttgaagtgaagtcacatccacatccagagagacctgatcgtcttcgagctatagctgctagtcttgacacagctggtatgttgtcaggagaatatcagtatgtttcattttacactatcatactggtggaagtaattttggtactcaccacatttgaatttttttgcaggtgttttccctggaagatgcttgcctattaatgcaggcgaaatcacgaaacaagaactccagatggtgagctgctacattactgtcttcgagacaattctaatcttttgttcattgcagtacttttgcaagcaattccataactggtttctatttgtcaattttgaggtccacacttaagagcatgttgatactacaagccagcttctctattggtttgaattttaaaccatttgttactttctttttttgtgtcaccgtgcatacccttgcttgttaacctgactcttcaaacttgaatcgaaatttcctttaccttagctgctcctgatttatatccttttgctcttaatcccgttcttttaccacttcctgattcttactgcatccattttcttgtactcgccacgtagctttttgatattgtttaattgcatttgacttgtgaaactctagttgttgtttttactgtattctgataccatcaatcacgttgatggcttaatttgtgttgatttaaggaaaattttggagttgttagttaggttcatcggctggcaaagtaatttgaatctctttgacctggctgagtgtgtgcaatatcatgccaattaggaaagtctagtaaacttgcctagtagctattggtagtgtaagaacatgcctagagtctattggcagacaaggtttctttcagaacatgttcttctcaagtttattttgattttccatatcatgaatgtaatgggagaaacctaagatcaatcatgtccacatttcgtggttttacttttactctcgactcttgtcttcagttgccggattatcataccatcatcggacaatgtttctttaagcacatgttcttctcaaatttaaaaacaacctcaaaaggaagaaaagaaagaggaattattcgacaacaatcaaactcatcaacagagactaatgttttgtaagcaaatagaaacaaacaagtactaataatctcgttctttccttttgcctcgtgttccttgtgggatcgtcaccaaactcggagaatacgagcacacgagagggaaaactggatcaggtcccctaggatctacttgttgttggtagtatccattcatgtatccaagatccacttctttgtagtatccattctctccaatcaggtaagctctgtcgttgatctcctcttggtctttatcgaataccacagcgatttttttctcctcgtcaatgaagaaactcccagcgaaaaaagcaaacgggataaaagaaccagtgagtggttccatatccactgctaaaaacaccttgctccatgacaccacatccggttcaatcttattcgtaacccatatctccatcaaacaagtatcctgctgatataacactgctagctgctcttctctaacactagaaagagtcacggtctctccattgtaagagtgaaacggtagaggcagacgtggtccaaattaaatctctcacttgtaaaatcaaaacagatcaaaaaatctttgaaatcttcaatcactacaacatcatccccttccaccactattttctctttagcaaaaaagtaagtatttcctttcaaagacacgccacgttgataagaatctatctcccagtcaggagtggcatcaagaaccctccatgcattagacttcaaatcaaaaatttcgtgttctataatagaatgcttcacagcaggttcgtaactatccacaaacctcaagattttatggtttttcaagtttttgtcgtatcctagagcatacacgtctaatctgtggaaagcgtgtctgggtttgatccacctggtttgtcccaaatacgggttccataccacgaggctagtgagcctagtcttgtccttggtcaggcacaagagtaagccgttgcagtgaaacacttttgatatctccacttgatctaaattgtttaggcttgtaagcttacctatacccttcatatatatatggatcggccaactcgtcctcgttaccgtctccatggagttttacgctcatcaacgaaaccctcgattgagacatcataataaactgtctcgccgctttaccaaagtgcgtcttcgcaaagctcggatctttggatatagtgttccaccttttgcatgtgaatcgcactcttctcatagatgtcaatggaaccctagacagtatcctcgctaccaaatcccgtggaagatcgcaaatcgttgtcattgttttttagcctgtttctcttccgacattcttgcttttatagcaaagagactacgggtaggtttaccaatttccttttcttctttttcctttttttttacgaataaatagtatatttattgggtcacagctctgcaggctcaacaaatacctcaccaaaatatatatatatatatatatatatatatatatatatatatattggcaaatatggaacaaaatcttattattttatcaatatgtttcgtccaatgataattctattaattttataacttatttttgataggataaataatgttgtaaaacaattcaattgaaactagaattatgagttttatgtatattctttttttgtagtatatgtttgtgaatttttgtatcattgttgaagaagctcatatggaaaatatggttttagtgttatggttatgattgaatttagttaagatttcgttttgaaaacataattatagtgtattcaaataaccgtagcttttttaataatatactagattttaacctgcggtataccgtaggacgatttattttttaaaggtaatatatatcaaaacttgcaaattttaactttataaaatatttatattttatagtttataattgttattaagtaacgttataccacgaatccatgagacaattgttaaaaaactgaagttttaacccttattaaaacaggatattaatagtattttaaaattttataaatattgatttaaatacatccaccatattatccaattccaaaataaaatccgttctgtaatttctttaactgtcccgtgatttttgttttaagtagtaatttttaaaatttaaaaattatttatttaatataaatgttttgcaaattgtatcattctataatacatgtatattttatagtttaattttatatatagtcacattatacatagcacataacatttttggttttatataatcttttctaaattaggatgatttgatatgtttaatattagtggtcttaaaaaataagaaattaaagatttaacccgtattgaaacggtgtattaattatattttacttttttattaattttgattcaaaaacccgtccctccaaatccgtcttgctaaaatgccatttattttaataatattaattttattttatgatatgattttgaattataatcgaaacattttagctaataacataggagtgcaccatatttatttaataggggaatgtaccatatgacccgaatgcacttttatccaaatcaaccaaaaaagtcttgcaaaaatactttagagataataaacgatagttggtttgataggtataagattaacaaatatattagttagcttaaattagttaaagaatacaaattgaaaaggtatattacactttattcgaatatagtatcaaaacttatataacacagagatttgataaatttttaattgttgaatactttttttttgtgctaatttttttgtgattaagatttaattaatttcgtatataaaatattaaattgttttacgaacttatttgtttataatttggtaacagatagatatttgaatatttgatatattttgcttcagtttagaaaatctttgatgacctgtctttagatccaataagccctataattaagaaatgaatattgttgttaaataattttggtaaccttaatgacgtcattaaaggattttgtttttgattaaatttttctaatgacattgtcattttattatttacaaaaattaaggttacatttaaaatgtacttcccaaataatagagtaagatgtactattatttttttgatagataagaatcatttatgattcgatatcaaatacaaaagtattttaaatattgttttaattaattttataaaaaacaattatttaaagtttaattgtttagttaattactttttattagaatttcgtttttagtttttgtgttataagactaattgcaaaatctatagacaatctaaaataatttggtaattatttaaataggtgaaaaactaagaacatgacatgacagtttaataacattatatgataagatttattttatagagtgtttctcaacaaaatatagaagattattaaaaacgaaaagaacttttgaataccgacgtgttcaatcttccaaaaccaaaaaatcaagtctcgttggtttttagaaccgaattgaattaccaaaattctggctatgttcggctaagaatattaatccagatctatttaataagtacttttgaatatagtcgactcgattcagattgattctggctatgttcggctaagaatattaattaccaaaattctggctatgttcggctaagaaccgaaccgaattgaattaccaaaattctggctatgttcggctaagaatattaatccagatctatttaataagtacttttgaatagtcgattcgattcagattgattctttcggattttagatagatagaggaactatatggatggcttatgttgatgataaattagttgaatttttgtaagtaaagaatgtttcatttactcatttgtttgttctttgaaagacagacatatacaaatgcaaaaaaaatattcaacaatgaagagataacttgattagtgtcctacaattaaatagtattctcgaggtatccaaagttgtcataatacatatcctacgagggattatgaaaaatgttttctaaataaaatcgaatacacaagatcaaaaactaaacctaagtgcactatttctagtgtcgaactcaagcatcataagacaaagaaaatctaaaccggatcacaaattctcgtctaatctatttaacataactcaagcttgtgcctgcgttgcaacaaccaatcagcgtcccaagtagagtcatgccaacatattattttattgaaaaagaactagagcactaaataaatattcgattaaaaacgtattttcaagcattaataaattaaaaaacatgaatcaatggtccttaaaagcgactaatagccacttatttaatttttacttgaaatttgtacaaactttgcaacaacaataactaatattgtggtgggaaattcttttaaaatcctttaaaacccttttaaaacccttttaaaccctttgagaaaaaaattttggcgggaatttttttggcgggaaaattgtggtgggaaatttattttggaatattttcggcaaaaacaatatttatattttatttcgttagcctgaaacaatttctaaataggggtaaaatggtcattaaaaatttaaagagagtaaaaatgaaaatgacaaataggaaaatgtagaattgaaaaggagtagtgtggaaagagcattctcagcaattattcttaaaattattgaagtatcttttaaagtacttttgtgttaataaagtaagaattgacaaagaatgtcatcatattaaagtcaaaaacaattataatttttaaaatattattgaattgatatattttaactttataaaacattattaatatttaaacttataaaaaaatgaaaatatcatgagacgagaaatatagcgggacaggtttggattgatatgaaatatagcaggacgagtttggattgatataacacaggttaaatatttattttattattttatcatcaccaattgttttagttacaacattaatataatactagattttaacccgcggtataccgtggggacaatttattttttaaagttagtatatataaaaatttgtaaattgtatctatctataaaatatttttattttatagtttacaactttattaagcaacgtcctgccaaacccgtcccgcaaaacccatcctgcaaaaaaaccatttattttattaatgttgattttatttatgaatcattgtctaaatattttagtcgatgcgggatgttgaacccacacattttttgctaattggttaatatatgttcatttttaaaattttgaatcacaaaatatgacgaaactttttttgagattttttaaactatatattatataatgatgttaaattttttgatatattaaactttttataagtttaaatattaataatattttataaagtttaaatatataaataataatatttaaaaaatatatatattttttgccttttaggtaatgacataataactctaaaagcaaagatttagaagatttaaatcgttaattaaatattttcatttctaaataattaatgtcagtagcatgacattgtaaataagttcaaatacaggatttatttatttaaacaaaaaacgtttagtaagaataatatttatttaaacaaaaaactttgttttaaaatattgttaacaaatacgtttatgctaattttaagggattaatgtgaagtttgtttggattaaatttgattgataatgtgattgacaatttaaattaagaatttaaagtaaaattaattattttggaaaaaagaaataatgctaatggcattgggttgtaaataagtctaactctaggatttatttgttaaaatggctgcaaaaatgtatatatagatagatgatctaactttattactaaattaaaaactattaaatttaatattattatatatatgaataaaacatttgccatgtggtataccacgggttaaatcctagtataattagtttttagatatgttttcaattttgtaagggttttccgattcaagcatctaattaattactaacggattgatttgctctctttttttggttaacacaaattcaagcatctaagtaattaattaattactaactcatttatttctatttttttataattaatgatattttagtaaatatagatgtatgcatccaattaatcaaatatatatatatatatatatatatatatatatatatatattgttcacaatacaattatatcaatcacttttgttataattctatcatcgaagatgactaaaaacacagctcttacaatttttatggttgttttggttattggtatgctctaaactttaatgtatattaaatattatgtgtttcttcatatattttgatttgatggttttcttttcatcaccttattattatttttaacaaacagtaattgaaatgatattagtctatgttttaaatatgtattattagaaatggtgatggaggagacgcaaggagatacatgtcatgaatatctttacccagaaaagtgtgaaaataatcagtgtaactcggagtgtgctaccaagtttaaagaagtaggagtttttggattttgtgtaccacctcgatccgagccaacagagcagttctgcatctgcagttacaattgttaaaattgatatatatatttatttactataaataatcaccaaatataatttaataaaataatgggttgcaaaaaaaaatgaaaaacaaatattgcaatcttttctaattatgtgaatgtgaattctgatttcaattattggacatcatgaaatgaccaaatttattttatagcacttcagccaatcgatttatctgttctaataaccaaaacttaaatagaaataatcaaacctcgacttggttcgattcaggttcagttttttattctagcatatttgttggaactcattgtcacaagaaattcaccccactaaaatccattcaaaatccaccaattcaattcaaaagtccactaaaaatccacaaattcaattaatctaacatattgattttacctaataaaacaatggtatcaaacgtatcatcaacgatgagaaggagaaagaagtaaggtgattggatgggttttcacgaatagataatggcctttttaacaactgtgtaatcaagaaaatagagatttaaaacagatgagtggtggccttaaatcagattcgaattaatatatacaccaaaatgcattatatatatatatatatattcatcctccttagatatatgatatgaaaattggctaactctatatgagtgacatgtcattattccagaagttgtcatgtgcccattaagtaactaaagttagttctacatctttcattttaatttttaaggggtaatggtatatatatcattaattatgccaatactaactttactttataactatatgtttttttctataaaatagttttattggttttctcatatcgttttgggattttctcggtaatgttttgtagttctaactgaaaatatgagtagacaataatgtggttggttagctaatggtgtaagtaatttttttgtttgaatctttgtctacataatatatcacaatggctgatggtacctaagaggaatttcatcattaaatacttgaggttttaaaaaccgatgaaacttaggaggagtaccatcattaaatacttaaagaatttttttttttagtataaaaaagttcttgagttttacactcacacacgatacaaaatcatttgatattacttgccaatgataaaatatgattaacataacgataaacccaaatcacacctccaattgtaaaacaatatgataatataacgattgaaaacggtagaattttgtaggcacacatctgttgtgctagcatgggagcatcggttctctcgccggttaccccttcttgttacatggcttcataccatcggttaaaccatccccggttttgacctcatattttcattcttagtcggaattttgatcttacgataatgaaatcgggagaaaacccttttgaagacatgtctcaatagattcaataaacatttcctcgagactatacttgaagttaaaccccatctctgtgagcttcttggaactgaactcaatactctttagattctcatcaacaccttcaaacctgttatatagagttttgtttaggacaaaacaattatgggccaaaacattttaaataatagtcaacacacttttcagtattttgtttagtaattttctaaaaaaaccaaattttaatcttacacattctattttgctatataatttaactatctatttcattataataatcccgattttgattatgcacacgttattttaatggataaatgttaaattttctatcaaaataatatgtataccatatcaaatgaatataattacttcatactaaaataattaccaaataacaaaacataatgaaccaaaaaaaaagaaaaccacaaaaatgttttagaaaagaaaaattgcttaagatatagttttgctatattctataatttcacaaattaattttacctaatgtcaaactcatattaaatgacttaaaatttataaataaaacactaaaattttatattaactttttttttatatcaaataataaaaacaaatcaatccctttaagccctaatttcctaatttttggttttttcactaatggctacatgcattaaaattgttagactaaaaaataggtataactatacaaatattctcattaagtatagaaataaaatactatattacattgaaaaatacaattttaaccaattcaatttatgttaaataaattattttgttattttaaataaatcattagttattattcatactaatgatttttttttaaaattaatacatgctagatttatttaattgaccaataacacatgtaaaatcaaatttgttaattttccttttgatgaataaaaatgattatatatgtatatatatatatatatagacataaaaattagtatatgtcaatttgtttacttttttaggttttttattttgtaagagaataaaaaaattaaatctttaatgacatatgtaaacatcttatcgttagacttgccacatgtcatgatctcgtgagttactaactttcaaaaccgtactttatataataagatatattgaaagtacaaaaatgggaaaacatcttattattgatttggaaaataaggaaaacatattattatagatatgagatttcgtcatggccgacgacgacgtgagacaaaaaaaggatggcaatttcatttgagaccctttctatccaaatctccacctaaaacctaagaaattgttctttacattttacactagaatttctattaaattcttgccaaatcattttgtcatacaaaaatacaataacttgaataacacttgcttttaatagaattcagaaatccggaaattgaataacactaaattttaatagaactagatgatcacccgcgctacaccgcggttttttcggattttttttattgtttaatttaaatataatcttttttatctactcattcactcatgcaatgagcaattacttttagtattaaaaatatttttttctaacaacgttctcaacaatgcatcatacacataattcataaacaacgtttgtctttaaccaatttaacaaagggtagtgttggattctaaaaacttaagaatttgatgatggaaatccttacgtattatataaatatcaatttaaaagaatataaatatcaatttaagagaataacttactcaaatcattaagtaatccacgactattaaacactcatactttgagtttggattacgaaaaaaaatcttcgaatatgagaaaactattaaaatagttttattgaaaaatcatgtaatattaaaataaatttagtaatagtacagataaatatataaaataaaataatatgtaaaattaaataagaaatatatcattaacctataaattagaagttgaagagcttacattaattattttaatagacacatggcaaatgctaagtgatgatgtgtcaatcatacggaaagagttagccatgattaataaaatacctcaatgacactagaatttgaattctattaaactctgtcaaattccacggtttaataaccccctttataaaagttgatcaactctgatataaactttttgttatttatataagtgttccatcgaaaataatattttaataaatattcatgaagggtaaaatggtctttaactatttcagtattacgataaccctactaatgtgtaatatatataaatcattgaaaaaccctagcagacctcttttgtgttcttcactctccagcgatcgtttattgcttgaagacggcttcttcttctcacaaacctcatctctgctaatcaaaatggtaattagggttttcgaatttctcctttccctcttccaaaatgttctcgaacaatcgatctggaattaaaatggtaattaggttaactagattcatatattcgattcgtatccactctctgaaaaatgaatctagagataggtcaattttaggttgtgttagtttctggaatttagagttcttatgttatgcaaagttcgtatttttctatgatttacattgagctagaaagttagagtttttatgttctgatttacaatgtaatcgcgagtaagttgataaattttgcgttttttttgtttagtttatgtgaaattactgatgggttaattgaattttgtgttgttgattgtgtagtctctggttgcaaatgaggagtttcaacacattcttcgtgtgttgaatactaatgttgatggtaagcagaagattatgtttgcccttacctctatcaaaggtattggtaggcgattggctaacattgtctgcaagaaggctgatgtcgacatgaacaaaaggtttgagcttttgttgctcttctacgtttgtctttctttagtgtgaacttaaatcaattgtgacatttgagatatattgaagagtaatagttttgagataggttcttgagtgttgcactttacctttgttctgtttaatctctagatcatagatcggcgcatattattgtgtctcgtagtttgcaaattgtgttgctttgtgggagattgttgtcttatatgatgtatgtttaacagggctggtgagttatctgctgctgagattgataacctcatgacaatcgttgcaaacccacgtcagttcaagatcccagactggttcttgaacaggcagaaggattacaaagatggcaagtattctcaagttgtctccaatgctcttgacatgaagctgagagatgatcttgaacgtctcaagaagatcaggtaaatacaaaaaccaacagataattcttatctttgttcacaattgcataaaacatggtgataatgtttctttcatgtttgacaaatggatagaaaccaccgtggtttgaggcattactggggtctccgtgtcagaggacaacacaccaagactactggtcgcagaggaaagactgttggtgtctcaaagaagcgttaagaaagatccaatgttgctacttacttctgtattggatacttcataaggacctgtttttatttcgtactaggacctttttgtgtgacgcttttcgagctttttgtgatcacattcctctgtttttcattcttgatccctccagtgccttgaatagtcttatttattttaatttccagcttactctgcttattgtctactgtgacagcaacagatgtctaaggcaattcaacaatgcttaaaaatcgaaatatacaaacatcggaacattgacggaaaagtgtaaagaatgtgatgtaacttagttcttcacgcaagagtaaatcgtttggtaccaaggcaaaaaattgattctataagaatacaaaattcagctacaaaagaatatctcaaactgagcgatgtgtgatgtgaaaagctatgtgtgaaactgatctttctgatcacttacttgctacgctttatctcgatgttcatcagaatctgaagtagccccaagtttctgttgtcgggtcgttggaagagaataattcttcttctccttgccgcctggcttggacgaggcattaccgtaccagatcatcccgagtactgcaatgatcatgccaagaatcacatgcaggtttagaccatctctgtcaaagaagaagaagcccattacaagcaccaagatcgtcttcatatggcccaggacttggaatgacactgctgtgaatctcccgatgcagatgaactggctcaggtttgtcccgattgctattgtgcacgagagggttataaacatctgcagaatcatcaccaagttattgaatacaaagaacaattcattagagtcgatgtgcaaacccatttgataacagaaaaaaggtgataatcacccttctaggctcagtatgccgtcaagcattggacctaataggtaatttgtctacgtcttagcgtgttatgagcatctgagaaccttatttcaagagtagtaaggagatattgtttaatatataatctgagtgtttcgagcacttaccacagagacagagttgtaatcatacatgtctacccgtttgtctgtcaaccaatagtcgagaaatggaccgactatcaataacgttgcagcctgagctggagcagtatgacccagtaggttgaatgagctaagcgagtactttcgctgtagataatgtacatactgcaacaaaagagagaaactttgtgtaaatcttaatcttaatctttgtgtaaaccgtagctcaaagaacttacgtattgttgcaaagcagtactccacacagcaacaaaagcagcaacaaaacctttggtgttaacactaacatcagtaacagtacaaacaccaacaccaacaagaacaagtccaatgctaagttttgtatctcttgagtaacgaatcttatcaaatactacttccaacaagcatgatacaggaatcatgctaagctttgcaatctgttaagcataaaagagaagacaccattagaaccaacaacaagaaacgttacataacacaaaaagcaaacacatttacctgataaaacccaacagagttccacataagactaacattcattccaacaatcgaaaaattagcaaacagaataaacttaagaagctctgtaaatggaagatgagaaggttgtatatatcctaaacatcttaaaacaagcgtcatcaacgtcgtagtggcgaaatgtaaaccggttaacgttgtagctgcattgaaattgaaaatattagacaaataatttgaagatatgattgtaaataaggttttgatgaagaagaagtaccaaagctaaagccataagtagccattaaagctttattaacaatgatgataccaacagaagtaacaacattgaacatccaagcagcagcatctaatgttgctttcttatctgattttttcactggagccattgttaaacttcgtcttcttcgtcaacttcttcaatcccacatttctacacagaaattgacgaagcaaaatcgttaaaatatctcaattccatggattcggtgacgatttttttccctaattcgaaaactgtgtcattttgattgatcgcgtaattatgaaagactaatcgaatagactctacactaatcggattcgaagatcaaaaataaaaatgagggattgttgttcatcgaaattagaggaatgatcggggaagataacatcggtgattgttgatcgcataagaatccggcgagggagtacctggagaagaagaaaatacggcggtgaagaagagaggctctgtttccggcgagattgctcggtggtgaagtttttgaattggatcagtgagtgatctgagagagtgaagccagagactcgtacttaagtagtaattatttcagttttttttagaaccaatccggcgagcaccattttttatttattatatttctctaattataataaaggtagaaatcatcatattcataatacaattaagatgtgagtatttcggtttaagttcggattcggtttgggtttagctcgattcggtttatttgagttttataaaactttaactaaattcaaccgaagttagtatgatttagtttggatttgggtcaatttatgttcagtttagctttagttcggtctggtttaatttggttttaaaaaactaatcaatgtaacaaaacaaaattatttcattcattgtcgtttgaactttgaatttgaatttgatgatagttaacttaagcaacaaattcaagttatatatttaagtttaataatttagatatgccaggaaaaaaattaaaagtgtaaattattacatatttagtaatacacaatattattaattaaataaaacattgggttatcggttcggaacataactgaatggtttgagtccaaacttgggtttggtttgggtcggtttgagtttggttaagtcgatttggttcggttcggtttggttaaaacgcccacctacctatagtgagaaaaaaagatatttatgttgataactgaaatgagaaattgtgtcaaaggatttatgaaggttagtgaatgttgcagctttcttgtagatccaaatataaaactagagaatgttttcaagaatcaagatttgtagcttttacaaaatttgaacaactcaaaaacttcttgcattctagctacaataatttgagggtttaagacagatttagagccattcaagagactagactctttactgttccatggttaatactcctacatacgtttcctacatcgttttcctaatgtctacattattgttgttctatttacaaagtacatttgcaacaccaggttggttatccatagatggttagacctcttgagaataattgcataccgcatttttatttcgcgtatatccaacccggactttatctccatcgcgtcatagaattcaatgcggctggaatattcttgaagcaacattcaaatataattagaggaccgtccaattggtatatgatcctactatattatttgggaagtacattttaaatgtaaccttatttttgtaagtaattacataggtatgccattaaaaataaaatttaaaaagaaaattaattcatctctttaaaaattaaaaaatcaaatactaattgaattaattaaatttaattaaaaaacgaaatacattattaatttccaaaaaagtaaccaattaaaatcaacaaattagatttgatatctaaattatcatattaagtttttattaattattatagttcacctctcatctttatatgattctatttttgtgaaaaaataatatcaccgttataaaaaaataattagagttttttcgcttatgccataatttgaatttctaaaaacgaatgtaaactgttcaatacatgaaaaaatattataacgggtcaaaaatagatttaagaaaattttctactgagtactgggtcataatttgaatatttatattcaatttcatacatattattttaaaaatttataatcttatatactacaataattaataacatattagacttttttaaatataattaatattttggatattaaattaatgtttgggtttttgaatactctttttgggtaacgggtaatttctggaccaatcggatatccacgggtttactaaaactctacccaataaggaaatttcctaaaattttaacccgccctaacccggttttttggttcgggtattgggttggttatcgggtccgtattttgtcagccctatcaaagataatctaatatatgctccaattaggtccacaaatataaccaaaatactatacaaagactaattctaagttaggccaaaaattagatccactaatacaaaggaaacatgtttcttaccaaaacaacttgtatacaaattttacacatttacttaaaactatatatgttatatttattataaaaataacatttttaaacaaagtcaatccaatgcagcattatatgctaatagtaaaaacattgaaaaatattatgacatcgcttttatactatactatttcttatgtaattgaaacaaagtatacaatttaatttatacaaaatattaatgctcgtgctgtatagcacgggttatgatctagtaacacttcatttccaaaggacaaatcataccattatatccaccttaggatcatggactcatggtgccagatattttgcatcattgccaagcagaatgaaagattttcctccacaagagatttgagtttataaatatttggtgagatttaacaaaaaaaaaaaatatatatatatatatatatatatatatatatatatatatttggtgagataagtcttaacttgctacattcaaagaaactaattaaaccaaaaaccaaacactaaaagaatagtaaatcgtcaatttcatattagatgagctaataaagcatcacagcaataaattttgtctatctccatcacttacaccctttttttgtagataatgtaatttcttcctcaagatctgaagaatcataaatcacatagtttagtcaatgttacaatacacacgactaaaagaaaaattacaaaattttattgatagaatttaaaatataccactagacactagacttttgtcttttcattagtcattaccgcttgatatttttactatcttacgcatgttatgaaagattataaagcttaggttttgggtagcaaaaaagggttaggaaaaagaaaaccatactatttgttatccgaaaatgtcaaactaattcctctaactgtggtaaaaggttataaaatcaaatcctctagattgatgtaagtgatttttaaatcgttattcggtcagatcacaagttaatgatgaacttttcagggttcaatacatggcgattttagccatggatccccaacgggatcatgggattacggtccaactgaccggtttggaccgggtcttaatatattgaacaaaatacaagaaatctctcattcacacgaatgattacatttcagaaaaagaaagaaaaaataactcaaaaaacttcacaccaatttgcatcacactatattacccattatttttctacaattatgtggtccacttttcaaatagttcactctcatcataaaccggccggggtccttcaaagctcatgcagttgtgcgttgtaaagatatattgtattccaacaactaattcttgccaaaacacttttggctaatgtcattttcattgaaaacaaagcattataaataggaatgatttgtcatttctggaatggaagaacttgggttttagttaacatttgtgcctaaccaacctctcgtttatgtactaaagcattgtccttgtgattgtgaataaccaatcgctcatttctgtgttagaacagtattgtttattttctgttatttgaatcatttccaatgagaaatgagttacataacacctttatttataaacacaaagatgcacacaaggagaagcaaaatcaataagaagaaaccactccacgtggcccgtcgtcagagttacataattggtgaacgactaaactcagaagaaacaacatgtaataagaaacacagaagcagaagcaaaagccaagcaacatttattttgtcgacaaaaaagccaagaaacattcaatgttgattttgtctaagtaaccaggtgtacatacattacccttaaccatacccaaaatcgtatgtactacgatatgtgtacgtaacagtatctatctacatttatattttataagacattattaaatgggaaacttatagtggctagtggctgctacttggctagcaattaacatcaataatttaataactcaaatgtgaaacatctcattcttctcctttattacaccaaaccatttctcattctttacttaccggtcaggtcaacaattctaccattccccatctttggttaagtttatcttttcattttaaagaaaatatatatgaatgttcatccaataattccaacttcttaaaattgttaatgaacattttaatcaatatataattttaatatcaattttataaataatagaaatgtgaaaaacgcaatttctttgctccttgtagcagtaacacaagtcaaagcaacatttgttttcatttgtttgtcagttagctattttatctacaataatatgttatgctttctgaacaataaataaatatagcattattagatatattcattctgtattttgatttgtccaattagtatatgacacgtctacaagatacatagatctttcattatttcactttctcatccaacgtctggtgaaccaaccattcaaaaatcaaaagtcaacttttaatgcacttgagttttggtcatgcattcatatacatacatatatacatagaagtcattacatgcattatactttacttatgtcaacatgttgcaaaagcactaagatgatatacgtatacatgcatattgcaaaaatcagtggtcccataccattttaagtcatcatgagcgtatgagagtaaattcttctcacatattaataacaacccttcaaagttataagatttttagagagagagctaccacgttttcgtatctccgggaacgatggatgaatcaagtattattccggcagagaaagtggccggagctgagaaaaaagagcttcaagggctgcttaagacggcggttcaatctgtggactggacttatagtgtcttctggcaattttgtcctcaacaacggttagtttcttatctctatagttcattcatctctcacaatacaaccataatatctatatccgtatatattatgtaaactatatgtttaaatgaattcggctaattgttggcttgtcgtagtgttacaattcgatcttgaaataattttttttttttttgaaggttttacaaaatttattaagatttttgaactacttatatgaaagtatcattgtttagggtcttggtgtgggggaatggatactacaacggtgcaataaagacgaggaagacaactcaaccagcggaggtgacggcagaagaggcggcgttagagaggagccaacagctcagggagctttatgagacacttttagccggagagtcaacgtcagaagcaagagcatgcaccgcattgtcaccggaggatttgacggagacagaatggttttatctaatgtgcgtctctttctcttttcctcctccatctgggtaaacaactctctccctatactcaagtttctaaatttgttctttcttttttttccttctctaagtgaagacaaaaatagtattgtgtgttaaatgcgaatatcgaaaatattgtgttgacattaaagagaaactgaggaagttgagttactagaataagaaagaaatgagagttaatgaaacgtacacacactacattttcatgaacattattgcgaccgttgagattctcattgtttggtgattgattatctaaagtagaagcatgaatagatataacataaatgcataacaaaatgggttagttatgggtatacttcatgcttttctctatgtggtaaaaaaaaatcaaatataaatttgggaggtagtaatttgtaggatgccaggaaaagcgtatgcaaggaggaagcacgtatggctaagtggtgcaaatgaagttgacagtaaaactttttctagagctattctcgctaaggtaaattcttttattcattcaccaactatactatgcatctatttttacctatttatgtatacactatactatgtatctatctacttgtaaacctatttatctatacttttatacattttcactgattaacttgaataattcttcttgtcgttttatgggccttttacgtcggttcctcaatgacttagagtgctaaaattcaggtaaaatttgtctttattagtttgctctttttagtaagatttgagaattgtattctgatgaaaatgtattttaaaaaagcagacagtggtttgcattccaatgcttgatggtgttgtggaactaggcacaacgaaaaaggtaacgttgtatatactctctcttttatttacttgttaatgaaatatataaacaaaataacaaagtgaatatagcctatctttctttaggtttagtaatgttaaattaaggagatgcactacaaaaaaaaggttgttttacatcatttattataaatatttgcattagttaaaagtgatgtaaaagaattttgtatcacttaaataagtgacttaaatattgttgatgcaaataatttgcatcagttaattagtaactgatgtaaataatcaaaataattacatcgattattataattgatatcaatattgtatcagttactaaaaatgatgtaatgtttacatcaatttatttaagtgatgttagtatttgtttcggtttaaataactgatttaattaatatatatataattattaatacaatgttattaatatttcaaataattattttatttatttcttttttttttttaaataacagatcattgtggataattactcgttggaatatctactaaaattttatcaagatttaataaaatattttacatgaacaataaatctttatataagataagcaaaaaaataatcataatttggttttggtttcttcgtgtttaaacacatctttcttctgttccatgcttcttccttccattaactgttggttcttcttgaaaaataccatttcttcttctatgccatctctcttccatttacagaatcaaaatcatactttggttataacttatatctcttgaatcctcatcacacttgagtttctgctgtacaaaataaaaaagagagtaattgtttgaaaatttacagaattgttttggtcggaataagaataaccatttgtaagtatttttaaaagaaagtgatagagtacctttactttgtgtttctccaaactgtgtaggaaaacaaacagtcctaatgatcaatggcagatttctgaaaataaaagaaaagaaaaaaactgagcaatggttaagaaaaagagaaagatagaatgatagaaaaataagaaagtacttgtcgttgaagatgaagaattgaatgagagttatgagatttcaaaaactaatttgaagatattctaaaaacgtttttggatacaaaactgtaaaaaaagatcgtgagcgtaaaagcaggatttatagtgaaggaaacaaatatatttagttagctgattttgagggaaaatataggaattaataataaattattaacccaatatgattatttatttatggtaataacaatttctcgtcatctacaataaattcaagttagttttttgtttaaattaaaatacagaaaaacttattagcatcacttcttattgatgtataattttatatcatttttataaactgatgttaataaaattaagtgaatacatcggttatttaattggtgtaaatacagatttttgtatcaatttgttaaaatgatgcaaactaatacaaatttctatcaatttgattaaagtgacgctaaacatgttaatttatacatcacttattataattgatgtttaattatttattttgtgtcatttgcttataagtaatttaaacttgtaccatttatacttgtgatactatttaattgatgtaatctatccttttttttgtagtgatggatcaatatttatttgttgtatttgtgtgtgtaggtaagagaagatgtagagtttgttgagctcacaaagagtttcttctatgaccactgcaagacgaacccaaagccggctctttctgaacactccacctacgaagtgcatgaagaagccgaagacgaagaagaagtagaagaagagatgacaatgtcagaggaaatgaggcttggctctcctgatgatgaagatgtttccaatcaaaatctacactctgatcttcatattgaatcaacccatacgttaggtatatatatctaccctaagctacttatattttgcggatttatttcgctatatctaagaaattatcatttgtatatatatgtagacacacatatggacatgatgaatctaatggaggaaggtggaaactattctcagacagtaacaacacttctcatgtcacaccccacaagtcttctttcagattcagtttccacatcttcttacatccaatcatcgtttgccacgtggagggttgagaatggcaaagagcatcagcaagtgaaaacggcgccgtcgtcacaatgggtgctcaaacaaatgatcttcagagttcctttcctccatgacaacactaaagataagaggctaccgcgggaagatctgagccacgtagtagcagagcgacgcaggagggagaagctgaacgagaaattcataacgttgagatcaatggttccatttgtgaccaagatggataaagtctcaatccttggagacaccattgcgtacgtaaatcatcttcgaaagagggtccatgagcttgagaatactcatcatgagcaacagcataagcggacgcgtacttgtaagagaaaaacatcggaggaggtggaggtttccatcatagagaatgatgttttgttagagatgagatgtgagtaccgagatggtttgttgcttgacattcttcaggttcttcatgagcttggtatagagactacggcagttcatacctcggtgaacgaccatgatttcgaggcggagataagggcgaaagtaagagggaagaaagcaagcatcgctgaggtcaaaagagccatccaccaagtcataatacatgatactaatctatagaccctaactttattgatgccaactctagagaaggataattaagcgtatttttgttttagcctcacatgtattaagacatcagttacatatatagccggatgcaacatataaatgaaaatgtactagatgatattgttcatttgtccaatgtagtacttgtgtatgatgcaattgcaacatataaatgcaaatgtactagatgacgatgttgttcgttgtccaatttagtacttttgtatgaatgcgatatttggatgcagattcagttgcatctaaaacatcatattttttttgatgcataaagatgtagaatttctatgtagttttttcttacgttcaaatttgagaaaatattattaaaaaatctttacaaaattcattaaaataatttatgccaaaatttgtatgtcataatttatgtaattttatcattaacctcagattagagaaatcaaagagtttatataaaacattacattctactttggtgctcaattttaagaatcaagttgtagcacatcaaattacgaaatcaaattttccagcaaaattacgaaattgcgttttagtgtaagaatcaacaatttctagagtagactaatagttatactcataattagtgtatggaagaacatttataagtcaagaatattaagctatcaaccaacgagataaatgtattgacaatgttcatagttgcagcatgagctatatatatttttctcttagttgatcatcatacattatcaaagctgcaagatgtgtaactgcattggctccacttcctttgttgtcttctttcttgaatagtggtgttcaatagtgtaagatatctttctatagtttcagcacttagcaggctgcttaaaattggcctggcccattcgattctttgatttcggtatgaactgttagaattctgattgaattcagataccaaaccttgccaaaaagaaaaaaaaaacggtttaaatgaatattaacttactttgaccaaaaattgatggcagggtaaaaagactcaagataatccaaggtcaaacctattttaatttcagaactttataataatcgttttaaactgaaattggtttaatgtaaaaatttaaccaacctgaaccgagaactacaatcaaagtaaacaggagattatattaaatcgaaccactcttacaactcataggggtgggcgtacggttttatgatttggttttggtttggttttttcggttttataaaaactataatcatagaaaaacagaaaaacagtatgtaattcagtttggttccggttcggttttataaatattaaaaccatatgtatctcagttcggtttggattcgatttgtttttggtttggtcccggttttttagttattccatacttttacaaaaaaaaataagttcgatgatttataaataaaaataaacataaaagaaaataatatatcaatcaataagttagatataatagatatctttttaaaattaaattcttggtttctaaattactaaaaaaattaataattctaagcctactaaatttttttttttaaaatgaaactattattaatcaaactaatcacactataaaatggacaaaaatatttatcaataattatttttaatttctctaaaaaacctaaaaataatctggttttacggtttttaaccaaaccaaaccgaaataataataaaaaaatacaaccaaatagtttttttttttaaaactataaccaaaccaaactatttttttcgatcgggtacggtccgggttttcggttttcggtttttttgcccacccttacttacaagtcaaatgatgacatttttttaccggttaacataaaaaacacacacacacacaagttatagatgtttgtttactcttattgtgaaaattaggcccatttactagtgccccacataaaactaagataaacaaatttagggattacaatttttcattttctctataagcttggctttctacctctcaatctctatttttctacttttaagagaaaaaaactataaaaaaagaataagaatctttgtgcgataaataaaattaagaaaaaaactctaaaaccttaaagaaaacccttaaaaaaaatcatggaggtacgtataagttttgtaagaaaaaaacagatttatggagatacatatacataatattatttctgaaaaatacatatacataattttattttacccattaacaagtttgtaaattctcctcttccctctatacacctcttcaattacttctcttaaatcttttttcctctgtaatcaactcaaaaaattgtttacaaaaatttgctaaaactctcttcaaaaatatttaacacaattaacaaaaacaaattccaaaactttgtaataagacaataagtaatcaatctccaaaaaaaaaaaaaacaaaaaaaaaaaaaccttgttggtttgtttgggtcttgccgtttcgtataaaagtgcgaagtaccctctctctacccaattcctcttgttttgtttctctttcataatctccaatcttcttcggattcgacgaatccgtcatcgccgacggaatcgtggccgtgtaatattaacagatggggaagaagagaaaatcaacagccacaagcctcgatgaggtagatcggactgtttacgcttcttttcgcaccgccgctaactctttatctcagctttatactcagtctatgaatcatcagaagttatcttttcaagccggtgaacgccatggtttggtattttcttatttactctctgtgactgtttcaatttcttgattctttgtgtgattcattgtcttgacaactctctaattgaaaaagttttgatttttctcatttctgtgttagttttgcgttttaattttgattgtctttcacagggcttgagacctcttagacaattgtttgttatcttattgttggaagcaagagattgtgtttgtagctaaacgtctatgttttctcgtgtttgtgtgtaattgtattagtgagacctatgccaaagatgtgaatgcatctttctttctgtctttcagggtttttgaattggtagtatatactgagttgtttatgtagcttgaatcaaattatagtcagttctttagctatatgtttgaaagagacactcttttactcacatttcattctcaatcaacaagatttagtcacatcccctaaaccagtgtctttgattgctaacacagccattgagtatccttcctgtctatctttcctttgtttattgtgatgtgtctagacattttagaactgtagtttagagtatgaaaactagttgatgacaaaggaaaacaaggctatgaagcgtgaagatggaaatgaaacaagaaaagtctctctggagaccgtgtttctaactttcaccttgcgttatccttgtctcttcgtctatattactggtctgattataaacagaacgaatgttagaacatccgatcgttgtctatctcttccgttttcgttagctataatgctaatatttcctgtataggtgcttcttagccacatgaattgaatagtagtcttaatatgataggattagcattttcttgtatgcgttctctttcactatattgagttctatagagtaatattgtgttagtctgctcttgtttttccttggtgtactgaaattcttctacttaaaatgtgggtttattgtgttgtgatgtgaaaacctgtacttggaagatgacataccgcgcgtgatatatatgtggaataggttatggctaaagagacccttacgagatttttctgctttatcttccttatttcaggaaaaactgtaccaatggatatggagacaacaagaaggagggtcaagagtgacacctatggatattgtcaattatattcaggttcatatgagttctatctatttattctaacatgtggtcagatttgtttactgttcttgattgagtttctgatttctccaatgcagaacgagctcgaatgctgcatagacgagcctccaatatccccaagagcgccaccaccgcaaccaacaatgcatgtcacgaatcccgggctcatgaccacttcaggcacctctttcccaacagctgttccagtggttaggtccgagcagtgtgagaaccaggccaagaactcggttttctcaaacgcactttcaagcccaatacggcgtagtcttcagaactaccaaattccgcagggaggctacacatccggcggaaccaccagaagcagtgaagtgaacaggggatctaactctccaggttctattgattcttcaatggacatgcatgcagaataagaagtgtgatcgtaaacacaactcttgtttaatgatgtttgatctatatacaaaaaccggtttgattcctcataatgtatcaattgattcttatcttggaggtttgtttgttggtaattttgttagagtttctaaaaggtcacatgtaaatcattgtgtgtctgattattattatcacttgtttaactcttttaacttttcatcttttaaactacttgatgaccaagagttttcacatctacttgaatactcttttaaccctaaaataaactcaatggattcttctatactccaagtaaaacactactacttcttatcatgtagtgactgtcagaacaagtcattggtctgagtgatcaggttttctgaatcttcatctccttctccttctcttcctcctgacccttgttctccttttgttctctctttcgctttctcctactctgttggtcatctccagcttcatgttcttcatcttcttcactatccgaaactccagcgacggcagatgggacggcttgctgatcattcccacgaaggccttgttgattatttccgccaacgtcgccacctccaacaccaaccaattcaagtccaagagaaccaggaacccatttgtatacagcctccacaatcacaccatcaatcgtactcaagacagttcgttgaccacgcattgatgagattgatcagatggttcagtcggttaaccgatagcccagatgatactctcacaaactgtagaatttcagcgtccattgctctgttatattcaatcttcaaatgaactatacaaatcaaagaccataacgaagtgtccataagtttcataatactaatgagtcaaaggcttcatctaaagaagcttcaacaagatagattgattcaaaggcttatctagagaggtacacggtcgaatcaccttaagaagaagactcggtgaacgtcttagcaaaagaaagactcgcggcgtgaatcggcgaagaactaagaaggaagactcgcggcgtgaatcgacgacacaacaccgtctttgaggaaaccagactcggcgccgaatctatgaagcaccaacttccccgatttggattgatcggaatctagaattcggagatctaattgaagcggttagagaatttgggttgttatatataagtgaatttccttatatatatgcctagaagaatggaaaaataaagaatcaaaccttgttttttttttctcattaagtgtgtggcttttatatataacacaagtgttacaaagtattacaacagtggaaacattcaaacatccacttacagaactcaataagctaatgagcattatcatgttggattatctaaagaagattgataatccctttttcatctactcagaagttaacattttcataatcttcaagtcctgcttcagatttaaaaccacaaccttgactgctttcattagaaagggtatatgttgctcaaaagaaacggaacaaagcatcaaagaactaactaaatgagtaaatcccgccggagtccacatcatcatcaccatgtcaccgtaaaacccaggagaagatagttatgtccattcttctaatgttgatgataaccacatgataagttagatgagagtaaagaacacaaaggtgtttagaggaagaattataatagactctcatcaaaataatgttacaacatacattctcctatatagaaattatgataaacataaatgtaaataatatatttaaatttagatataatgttaaacttccaaaaactccaatattaacatttattttctagaataatatcttcttgccatatctcgatcttttcatctcaatcgtcgctcttggtctatctccggttctccatatcccaatacctcccagcaagctcatagctggtaacacgtatgagattggacatgtctccaaaataccggctttatacccgaccgtcgggtcatcatcgacgtttatatccagtcgtagggttcatcaacggcgtttatacccggccgtaaggtcaaagtcgtggtctccatcgtgttcgtagttaatggaaaaccacatggaaaatacatctttgtagttatgtatctccatcgtttaaatcataaggtcaaagtcgtggtctccatcctaaaacccatgatgatttcagttcgaatcaacatctattcaaatcaaatattcttcatttctacaagtaaatcccaatttttgctatcaccgatcaagcctttttcaagaataaacccataaacgacttgaggagtatcttcacaagcgccaatgaaacgcgacgacaaagccgaaaagcaccgaaaagaaaatcaaaacaaaccgacggcaaacacaaacgtcaaaactggctaactctgcttatagaagccagatgctaccggactagggccaaccaccaccactatagaagctggagatgttggaaaaagagctcgactaaatcggacaggacatgataaacaccggaaaacatccggtcatgtaaacaaaaaggaaaaaactttctctgttctctgaaagatttttagaaagagaagagagagaaagttgatcaacatatatactagtaatttactaattagttctctttcttcaactcaattaaaatcaaattctaaataataacaacataaatagtttagtttttaacttttaaccgttaaaagtaacttccaacattgttcatctatgggattttaataaattaaaaaaacccgcaagttttaattgattcattttaaaacctttaacttaatttgtaataaaaaaacctctcaactaagaaaatctaatgaaaaaaacccttacctaatagtatgtgcatataaaatatttaactaaattattaatgaaaatcacctttatgtacaaagttttaataaaactccttcattttaaatatatctcgtttaattatattttatgttaatgcttattaaaaatgtgtaaaacttatattcttaaaaattgctaatatcgatttaaaaattcaaagatagtgtaaccatcatccactattgtgcttatattttatttcaaatttatttagttactaaaataatacatgaatttgtttattttcattgttttacgtattatgtgatgcgatatcttaattatattgattcatcatttcagtttttcaatctattgtatcacgtttttggtgctaattaaaaacaaactgacattcttttatgcctaaaaaatttaggcatcatcttttaataaatcgaatgagttttatgtttaagagatctttacttgaggggtctaaaataaatccgtatatatttgtgcgtttgatagttaattgtttagaggtatataccaaacgcactcccttacaagttgtacagctagatatcattcaacccactaaccttcaagttctatacactaagatcatccacattggtgattattagtgagtgtttctaaatataaaactaataaaaatgataataacaaaataataaaggtttttaaactgaaatttcctagagacattttagacacattaaaaagaaaatgtctttaattttattacttattagaaaacggcccacgcgatgcgtgggtaaacattaggcattgtgtttttgctttcacaataagtaatatacattcaaaatatgttaatcacattactgttaataattacgacaaactacattgcttttacagttcagcaattggaaaaatagttagtttggtccatgacagtgtcatcatttgtccagactacaatctaaccgtgcctaacatattgcctttacaataaaagggaatctaccaaactacttcctctacaactaatgtcatgttcatgaaactccccaaagtaatccgagatatgattagtctcaattcaagtaacataccatactcttcattgatctaatgcatagtaggttagaaagttgtttagtgaagaaattgttgaattacttttgtaaatcttacttttattaaaatttaacattttacacccaaaacaaaatcgtaaccacactcccattcagattgtaatgctaggcaatagagttttttactacatagatttaaaaataaaaagtaccagtttgattccgtttatttttgttctagacttttagttttagcgtgttgacgtcggttccggtttggttcgatacttttacgaataattgcgtagagctattggaacacacaaaaccaaatatatatatagagtttttagaaaaaactcaaaacctgttcctctctattctttagttccccttctccataccccatccttcccttcaaaatggggagaggtaaatatttctgttacgcagcactcaaaatagtaataatattaaaaacatttaactaattattaaacatatgaaagtttcattattttcatcaaccacttacttgatgtttagctttccctagatcaatgaagaagatagaggtaagttgattcttccgaattactagaagtgaagcgctatgttggggtgggggacgggaaaagaaacggctcccaaaagtaaattggggttctttacgcccaatgagatgtgtcaccccacaaggataaattaggatttttactactaacccagaaggttgtttcacacaacacacgattccatgtatagtgtcattctacatcgtgatggaggacatagcttacaatcaccagctttgatcatgccgctagacatttgattaagatatgcaattattaaaaatgaaattttctatattgatggaaagatttaggattttatgatactgtaatgtaaatttgtatatatattttctaccgtagattatgtaaaaagacatgtttttttgtggagaatgattggtaatgcaatgtctatttggcaacgactattggcattacgctaactcatcaaggaatgattactacttctctcgaattcatgatcagcttctgaaacatgacaataatcgtcttctgttttaaaaagctaaagagaaaaaatttatgttacaaaaactatattaatatgattcaaaatgttaaaataagaataaaaaatgcaactaatagttaaacttttagaggatttttcttatctaaaattaaaacatgttaaaatttgcataggataaaaaaaataatttacctttttcgtgcagtaagaaacatgtgaatactacaatttttcaatattgatggaagcaatttttctggtgtgatggagccggaatttggtcatagaataatatgtctagtatattttctattgaaaattttgtggattagaaaataatttgggttttatagttttgatgttttgttatgcatgaaacatattttctatttataaatagtttttctcttatttctcatcattattattgtatgctataaagtggaggtttaattctacaatcttgtttggtgatacgttatgaatacgttaaagtaaaccaatctcatctattctcttcgtttcaatgtcttcattacttctacttatattttaaaaaggcatcattttctttgattataatattattttattgctattagtcaacgttataaggcattaattttattttttatttttcacaagaattcattatatagtttaaaatagttattaatattagcttaaagatatgtaatttagtgtgggattttaataaccaaacgttacaaagtttggtgttttggcctgatttttgtttttaattcatttcttatatttaaggttcttaagataaataagtgaaataaattaaagattattatgtatacttatatttagaaccaacaaatataaagaaaattttttgacatatagatgacacatgtcaaataaatagagcgccacttgtcagctttttagagcatgagttttgttttttgatttttcacaagaattcattgtatagtttaaaatagttattaatattagcttaaagatatgtaatttagtgtgggattttaataaccaaaacattacaatgtttggtgttttggactgatttttgtttttaattcatttcttatatttaaggccattcacaagaattcattgtatacttttaaatagttattaatattagcttaaagatatgcaaattagtgtggaattttaataaccaaacgttacaaagtttggtgttttggcctatttttgtttttaattcatttcttatatttaaggccattttctttatttcgttaattaattttactaagagcattattattgctataaacagaagttaattttatataagtatttaaaatgtaataaatttgatataattattaatataagacaaaatcatatatcaaaaaactaatataaaataagtatgatgataaaataaataaaatatgagaataagagaattacaaaatgtgtgaagcaatgtaaaatttattatagattttataaataataatttgatatttgataagtgaatattatgataactttaaatttatttgaataacttgtgtaaatttcaatgtcaattttctacattaaatgatggaagtagacaaaatgaagagataaatttttttcttaagataaataagtgaaataaattaaagattattatgtatacttatatttagaaccaacaaatttaaagagaattttttgacatatagatgacacatgtcgaataaatagagcgccacttgtcagctttttggagcataagtttgaggaaaccttactttattatataagattaatactaaagacatctatcaacttttatccaatgaagatgctctaagccacccaatgacccaaattacttgaaaccacaactttgcttgtgttttttttgggcatttctaagttataacacggaaggtgataatccaaaaaaactctttgattgtggttagatgtaaaactaagcaaataaatgtattgaaacgaaagccatactcatccgcactaactatttttcagttgctcatttttttaatttctattctcaaaccttcagcttgatgttgcatttattgtaaaacagtatttttttggtgaataaatttaacattcataccaaaaagaaaatactctaacatatgttaaaagaaattttcatcgtagacacctttctaactttttctttcacaaagagacaaagtgggctggcccaaccagattttagtcattcagccaaaaatggacaaatttgctctggaacgagaaatgaaaggaggcggttcagtttcgtttctttatttttctggttaccaaaatttaaatttaaaattaaatcaaaaacacgttattaactttctggaaccaaaggaaatcaaaaactgtttgtcgaagacgaagaacaattccgacgaaacacaaactccgatcgaaagtgaaattttgattgaggctctgtgcgagttctggtcgttgcttaagttgaggaaatttcgatcgacaaacgtgataaaggataacaaaaagaggattttctggtttcttgaattattgttcatactcaaatggcggagatgaagatgagtagtcggcggcgaggagtttcggatgttaatgagttaacaagcggctgcaaaattagggttgcagaggttgaagacgagtgcaaaattacaattatacctttcattaaaaaaatttgtatgtatatgtaatttacggtatacgtacacacacattactacatacattactaccgtgtacgtacacattactaccgtgtatgtacaaattactaccgtgtacatacacattactaccgtgtacgtacatattactaccgtgtacgtatatattattaccgttacgcacatatgtttatatgatattgctaatcgtgaattgttttcaaatgataataaataaaatattatttaaaatagaaataaatatgttagattttgttttattgtaaaggcggcatacaaaatatttattgagtttgtacattagaaacctttggttattttgattggataaaatatgttttggggttttcatcataaatctattcatatataataattaaataaaaatatatggtcaaagtatagttgttcctcatacttttgaaaatattatgtacgtacatgtataataatgtacgtacatctttgttggtgagttaaaattgttgagaataaacaagattttaaactaaaccttaaacatacacgataatattgagatacacgtacacgtatatgaccgctctaaacagttacatcataaaaatgtctaaatcacataaatctaatactatgtacgtacacaaaaatgtttattggaacgtacatggtacaacattaaaatgagtttaaaattttctaaccattgtctacgaaaaaaatttaatttttttttttgacatccacattaagttattatgtaagttatatgtatgctgtatattttaatatagattatgtatatataatatttcaacgaatcgtgctctcattcatgtaaaaccgatcttccaatactaaattgcacaccattacaatttcacatctaccatgcctatatgtattcgtgtacgtaaaacatttatctttacataattcaccagatacataattagtagtgtacgtacatattctttcataaatgtacgagtgtacgttaacttcgattttataattgtaatttgggtaattggaatataaaagtctaaatataatttatgttaagtatataactatattttgaatacccattcggttctcaatttgctttggataattttgggtttacaaatacaaaaagaatctccaacaaaacaatttatgaatccagaaatttttaaaaacgtataattattttcatatcacgttctcaagtgtaattaataggattaacacgaatttcttacccagaacacagattatttccccttgaatccttcaaactttgtaaaacagcaactgaaaacttcagatacttcaccgtaacacaatttcgattttcgtttttttcccagaattctaatctcaattatgtaaatatcttacaatataatctctattataataggtaatcatgagttttagttttgtcgaaactttttagcattaaaaacttctgaacccaaccaattttaaatttttttaattccaatctcaagtgtcaaattcgccgaaacccagaaaacatttaatgcatttctcgtcgatgaacagtgtacgtacaaacccggttctcttggattccaacgacgcggtccgtacgtacaaaccggattcagtttcgtcaagggcattttggtcagtttttggctgaatggctaagaaatgaaaggctcagcccacagtgtcaaaatctgaaattaaaagtatgttattcctagattagagtcgtcgctgccatattttgttgggccaaagacacaagaaagcccataataagatgggcttatagtttattatatatacgactgaaaaccctaaaaatcaaaaagccaccggcactgcacgttcgccacaatgtcgatatcggagctttcacaagacttgttagaggagatactctgtcgcgttcctgccatatccctaaaaaagttacgatctacttgcaagctatggaacagtttattcatcgacaagagggtcgcaagaaaccactttgataaagcagcaaaacagtctctgattctcatggtgacaaataaattaaggtttgttcattgagccttaatctcaacgaaacaccatccgtaaaggttaggaatgaacttaggcgagtcactgtatctcaagtctttcactgtgatggcttattgttatacatcaacggagtagacactataatggttgtttggaacccatttatgggacaaacgaggtgggtccaacccatagctcgtgaccagacccataaatatgttcttggatcctaccaagacataaaatcccgcataactagctataaaatactgagatacagatacacgttatgtggcagcaaactagcattcgaaatttgtgagctttactctagttcttggagggttcttgatatcactatggacttcgatctttatcataattcctgcgtgtctttgaagggtaagacttactggctcactttcgataaaaaagaccgggagctcgatatgtttagttttgattatgcaacagagagttttggaaatcgtatgcctcttccctatcagtttcctagatgtagttatgaaactgtggctctatccgttgttcgagaagagaaactatccgtattattacagctcagaggtacatcaaggaaagaaatatgggtaacaaataagattaatgagaccactcaagtcttgtcgtggagcaaggtgttaacgctggataattctgattttggttattgccctggactaagtttttttgtcgacgaggagaagaaacaagtcttgtgttttgagaaatgtcgtgtgttccacatccacaccaatgatgaggtcttcgaaaacaaagtatatactgttggggaggataataaagtcacacaactgcgttttgaacaatctttctgtcctaaaatggatccatatgtgtttggttatgttccaagtttggttcaaatcgaacaacctcgacgcaaacgtaaaagaggtgactgaataagctacacaaaaatagggttgttacgttttttcccctgtacttgttgctttctcagctttcttacaaaaacttcaataaataaatttgacctttattataaaaactacatgtactcacctaaggatagcgagaagaatagtctacgtctttcgagtttttcgatatactttaccaccccatcttcactcaactagtttaattaaagaacacctatatagacttcaatcacatgtcctcatgacccaccacatcccttacgcagactaagggcaaaccattaaacctacgacactcatggtatgaaatcctttatcctggagaggtgttaggcatacacatgttgttacgtgtcgcttgaacagaactatggtaaaaagtatatggacaaaaatgtttccaactggtagatgtcaatacctaaggtttgaagttgcaatgggaaaaaagaaaacctggaaccgaatacccaaacccaaaaaaatacacgaacaaaacccgtatcgactttttaaaatatccgaatggatcctaaatttctctacccgaaaacacggaactgaatccaaatcgaatccaataccggcaggtatgtgactatatccgaagtgcaagtatgcgtctaaaaataatgacaatctaattcatgctttataatttggtatcgttttgtttcgttattgcatcttcgtggttccaactgttaacacttggaaaatattctttctattttctaggtttttctattaatttggaactgattttctttgtttactattcctacacagatgttgttagtgttactcttttttttccaaaaagtatttgcttacgtactcatttgcatttactagacctctttggttttcagaggttgtataatttaatcagtttattaactctattaaacaaagtaacaaacgattcacttttattagcggttcatgttagtgatatgatggatggttaattgttggaattgtatccttgattgaatctgcaaaagaagaagaagaatccatgagaagaagaagaagatgaagtcgtgaagagaagagtcaaaggaagagaagaaagtcaacaaacatatgggatgtgtgttttgtaataaggttgtaatgggttggaattagtttaggcccaagtatgtttagttgtctaagtattagttgagttcttctatctagttaaatagtgttgtgtagtaagtttaagttagagtctaagaagagtgaatcaaggagtgagaattccaatgtatgtagggtggctacttgtcttgtgtaagagccatcattaggtctaagtgcaagtgtgcaagtgtgtgtcaagtagaagtagtatatgtatgtgtgtccttgtgttgtgtaagagcatccaagatattaacaatgtagaagattaaaagaaaattggtttttgttcttactctctaggacaatgaaaccaaaacagagtaaaagatagagagattgtgagatttacaacattaatttatcttcttttatattcatgcttttactctctatcttctttgtccatgtgcaagttttgaatatatagaaacgatactagtgggaaaaggcaatagaataaataaggaattgatacttagagatacaattaattacagtcattaagttatttcataaggttgtttacatttttctattctcggttgattttcttgaaagattttgtctagagaaaattgcaaaataaatatttcaaaatttatttcttagattcgagttggttactagagagaatggaaatcacttacgagtctgcattcttccgctgtacttcgaaattgatggatacttttttcaacgaggattcattcgttgcatatagaaagcctcatgccctatacgctgaatgttcggtaattatatatttgatcttgatgatttgatcataacatggagcttctagagaatagtccagaaactataaattagatgatgaagaagttcgagacaacgtaactgaccttggaaaagtataaattttcgtttgtgtggaggtcaagaaatcccaaactgtatttttggagatacatgaagcatatgcggatgcttgagatcgcgctacaagaaaacatgaccatttcggacagaatgagatcccactccgttgctacctcagttgagagagtcctatgagataagatgatcagaaattgacggagtacagaagtatattgtagctgtaagatacacgtccaaatattacttgtgcagcaagctatccatctagctaggcaaactctgaaaagcatagctagattctcggacatatggaaaaccatgccaaatatgttgatggtagtcttgaaaacttgggagaaaacatcaaggtttgtcctataaaatagtaattcatttaaatactttaaaggaagattattgtctttgatcagttggtttttcctataaacatcaaggtcaaattttctttgggagtggttataaattggaccatcagtttgaaagatacatcggtatagttaaagacatgatcaatctcgtaggctgaaaccttagtttgattaattgggagattctatggaatctttcaaaaatagtttcccacttatgtggcccatataagtggcatgtcttgttgtatttccgaaatgttgggcttaggctgtttcccattggaccgtttctcacccacatttcgaggaggcctattagaatatgttccacaacaattgggattaagatatttgggcattatataaaggatgtaacaatccttaactcttgagttagcttttgggttaaggtaggccatattcctaataaggtctaatcgatcatgatgcaagttgattggctgatcaactctacaattagaaagacactgcttgtttagcatttcaaaacctgtaagtcatattttctctaatgcttttcgatgaaaagatttgtaagcaattctagttcaacgttatgagaatgcaggtttggaaatgggaggcaacaaagccaatcgattttccttactggaagtgtggcaagcatataatttagatgatgtatctctagaagatgtggaacgtatcagccctgagaatcttgtgtgagaccgactgtttaaaagctacataacttgcaatggatatatttccgtagtagacgtgggaaaagatggtgtggagatcgcggatcatgtggaagcatcgtatagtattgaacgtaactgtacggtttatactacagacatatttaatattgtatgacgttcatttatgaaaaaaagtgcacaaaagtctctgaacataaaattaaataaattcaggggctaaattcagacaaacattttatgctagattttatgcaataaacctttctttagtgggccatcatatgattcatcaataaatctttaactttcgaaaaagaaaacacaaatattgataactaaaatcttagtcggtttagtgaacctacataaaattccttctaattaaaatttttactttgatatacgaaatgaatttagtaaaccaacgtcatccaatataattttcatagtaaattaattagttgaaattctagtttgatttaatgtatatctattgtaatttggtatattaattataccctaagacttggacaaaaataaaataaaaaataataattataccctaagacctaaaatcctcaatattacatatttttttttcatctcctgataattttcattgatatttttttttaaaaagttgaatcatttatttggatttttggattattttaaacttttcagaattttaatattaataacttgatttactaaacattaacctaataaccttctatgaattgatgccgataaaaggatataattttaatttttgtatgttataagagataaataattaattgtaattcaatacgagctgaaattttgtgtaatttaaagataatggaaaaatagttaatatgttttttttattgaattttctcttcctaatcaacattcaaagtcaaaaacagcagtttaagtctccaaacgcaaaagaatttcttgatcatagatgttgatggaacttataagagagtaatttcactaactctctaaagaattgtcaagagatacaaagggagcgtaaagccatgcaccaaaattgcaccaacatattaatcaaagcaaaatgggaggtgaaattacatattaaaaatgaatttgtaatatctcatttgttttgctgatggcgacaatattcatggagaagccacaaggctcaaactcatggatactcaatttagtatatgtaggaaaatttgttctacacctattaagccgaaagattaaaattgttttaaaagaactttcataccaaaactaaacgagaaaaatcagataattctgataggagtaatgattaatcgtgttttcaaaccaaaagagaaagtcagaaagaagaaagaaacatatttttgatcatacgtgtcaagtatctataaaacaaatatgctatgtactcaagatgtcgcttgggaatatgttagagaaaaatatttctcaaattttagtcttctggatcatcaggagattttgaatccaaggtagattttaattactctacccaaatcttaagggaaaaatatgttatgcactcggatgtcgcttgggatacgttttatcagctttcttgtagtacagtgagaccttatatcgatccaattctcttatggacatctatacgttattatctttttgacgttgacggtgagagaaaaagatgacaaagttgtattaatgatggtagtgttgatttgtattacttcaattcagttttatcaagttcttttttaacgcattcacaaaatttgacttccttgtcattaagtctctgatgcgggtaaagctgttatttgggtctgaaatttacaagtatacttgacggatattggcctttgcccgtttagacaaggtgatgcatatgaaattggatcaatcccatctcctagtcagaagttacaccaagttgcacttgatgcgggtaaggctgttatttgttatttataactattttctttcctctttcaatcacaagttgcacttgatgtataaacgtatattttctttttgaatatagtttaacactaaattcaaaaaaaaaaaagttacaccaatttagtaaaggcatgtccgacacacccgaagaagactaagccgttgaagttgggttctccatcaagcctagccaccaagcatgcacggtaatcagctccttggccaaagcccagcagcccgcaagcatgaaaagcacttcaactatttgactcggaacgtcctaatccgaatttaagtaccttgaggcctacaaatactcattccttatagagtttttgataccaactcatagacaacaaccacatgagctcgcctttcgtcagagaggaatgctcgtaatgaaagattatcataaagagacacatcgcttgtagaagtgccatcgagtttgatatagcaaaaattttcgatacattacaatggtcttttttcaacgggtattccatcttaatcgtagaatttttcttacctattagactaaaaatatacaatcataaacgggtaaattattattaaaaagaaaaaacggttatgagatgaaaaattcctggtatatatgagacggatggagtttctgtcccaaaatctacatgcttatatcctctcatatttttacgatgttgtttttactgataacaagaacaaatctgatttatgcttttgtctataaatagaattgagccaaactgatatgagttcagattatgaataatataccaaacaaatatgtctacaaacataaccccgcactaacctcagggtccgaatctaacgtttcgactttattaaagatatgaggtataacttaatttatttgtttaaagaaatcttttgttgatgatagaagatgacgattgaagactctccatattgctacattaaagaagatatcaaagagggtaagggaaagttaaacgtcgattctacatactaacgtgaatacctaaaagtggtttcatctaaaggaggagtcgtttgccaattcttgacacgcggtaccaatggcaataatgtgacatgaccaagatgggtaaagtccaaggttgaacccgagtcaatgtcaagcctaagacgtagtctaaacacctcctttagatgaagccaaagagatatggcaaagttgaaaggtcatacaaagctttgaaaatcaaatgagaaaagcaaagtaatatattgcttaaaagggttggagaaagttcaaaccaaactggccttttaaagtgtgatttttcaggtattaattttgttttaactatataaaatgaattttaaaaatgataaaaaaataaaagtatttttagtactaacaaattcatctttggttcgtctaggccctaaataaaatctgatgacaaaacaaaattcagatataggccgaaagactaataataatattacggtccaaatgaatggcccagttatatttgaaaatcgtatctagaatttttttaaaacaaatgatgatttaacctaaaataatgttgaccaattattttgtataaatagatgaaatcttatcttataatgttcacctcttcgccgtcaaaaacatttctgatatgtgaacaaattccaaatccatttacacatctaatcaggacagtcatgacaaatctaaaggtttcatcttcaatctcaaattcataacttgttaatctatgatcgggtttaatgattatttgtgtttaaattatttgttctaattgtcttatttacaaatttaaatcatgttgttatctgggatttttcaaatctatcaaagtattagattttgattttagttttcattaaaattgaggtaatctttgtatcaaacatatatctcctattgagatcagtttaatttttagatctcctatttaaacatattccagaaaatatatatatgttttaagatatttaaaactcaatttgaaccattttatttcatttcttttctttttatttttaatcttgattattaaatatttttaaggtatcattggctgcttcagatcagatccggatacccacggatattggtggatccaagggatacaaaatactagccaagataagttgatacatgcccatctctactatatctaatggtttcagacctgaaatgtaatatgagtttaatcttttatatatatgttttgccaatcagtacgtcatcttgctattatcactttcattacaaaaacaattggctaaaaaaactttttcatgaactaatgagaaatattttaaaaattacatataaagtttgaattaaatttttcattattcaaagatatgatttttttgtttgctttaggtaccttgtcttttacaactcagataataaattaagaaaatattgtgaagataaaatttttcttactttcaatggtatgtatttatgtttcacgttaaaacccttataaattattactcaattaattaattataaaataataaaatgcccttctccaagttgggccagtgtatttatgtatatatattaaagataatatatattcagtattatttttaaatggattttggttagatctcataactaatttttttttatcaagaaaatattatattttaaactatattattgttttattgtgtataaatttaataaaaatagccaaatctttacgtgtaacttatcaaattttcaatatgcataatattcattttaatagttgtgtaggctgttcaaatacaacaattaaggtcactatttacaaattagaagatatgtatattatttgtattcgtggattcatctatgatctttgttatttgttgttaaaataattttttttcttctcaatattaaatgttcaagtctaaaacataaaattttataacatttgttattgtagacttcaaagcattatttttatttatattaaattgtttaaacttttttctaaaaataaataaaaattaaaacaaaaaattaataaatattagtttacactataaattaataaatattaattagtagataaattaataaaatatcatggtccctatattattatatattaatttgaagatgttttaatagtacttatttcatcatggtagaaagaatgtataataaatgaaaaaactgttaaaagtgatttttttattttatataccacatatgtataagtaatacttgagaatgataagatgtttcattaaattgtttggtgcatttgtgttaagtgttagaccttgaatcaggagtaagagccacgattaggtgactttgatggtagtcaaaaattaattgtaacaccacgactgccctactagtcaacacccacgtcctctctcatgttcattgggcccacttctgtctgaaggtcggtccgctacgtctgggagcggattgaccttaacctaagtccttcacccaagtccgaaagagaggaggaaactcttaagcctctaggagctcgagtaggaagtcccaacaaagtgtatcaaatgctttccttataccccctttcaacagagagctcttgggacaacatgcagaattatagcccctaacaagttcagatgccagtaagaccttttttacctagggaacgccctttaagaacgcaacttgattgcgagagatacaaccctgaaaaataggcttcaggctgtttgcaatgatcttgattacgagagatacaaccccgaagaataggcttcagacgatttgtgatgcgtgttttattttgcctctggcttttacctgaaagaccacacaactactgcaagtgcacagtatatcggaatagtattttaggatcgaatccacaaggagagaaatagttcagagaaatccttaagaagagagtgaggcaaggaccaaaataaaagagagggggttgttgtaagcaatgagtaaccaaaacaaaaggcaagtaactaaactaaacggcaagcaataagagagaagcgttaggtattcaggggtttctccaaatgtcatggttcaataaataagttgtagatctcaatctaggtcataacatggctaggtttgtttacttccaaattctcggacatacgaaactctatcaaaactagctaaccctaacggttagttggtgaaagccggctattatcactaatattatgtgtactcagttgccctatcggttagtaggtgctaacatggtttcaaagtacaagatcaaagcattaagttcaaattcgattctagtccataagtccctatcactcggcgggtgtgcaacgattatagatctttattcagttgagctagttcaggcaattatacaagattttgccaaagtacaaaatacctaaggtcaagtactaggtggcgttccggacatacaagcattaagattaaacgcaactagaaagaatagtgtaaacggccgtagaaaccgccaacctagactttcgatctattagtcccaatgaatttccctttgaaacctcctcaaacccaactagagatctactcgctcatggcaaaaggagctaatcaaaagttgggttgaaaccataacaaatagatgagtaaacttaaaaagggtttagagattacttccttgaatgtagatacaagaggcaaagcttcaccttaaagagtcttacacaaaaacgagaaagagaaagagagagatggtgttcttcaagcttcaataggtgtgacggcgagtgggcagctctcggcgacgtctagggtttgcttgtgatgaaggcacacctagggttagggcttagaacaagtatttatacttgagtgccaaaaattaggtttaggggtaagaatgttattccgccggataagtaagtgatcgggccgagtagtggactttagggaaggagcctaatgacggtggcgcaaagcgagaaggacttgggcgtgacctagtggtcagtggtgagcttctcggagctgcccgggttcaagtctccttggccggatactttttggacttattatttccaaacggccggttcttgacatgtcttcactctttaggtcatatcttccaaacggcttcatggattgcttcaattcgacttcgacgttaatcttgactcttctagctttccattcataccgaaaaatcacgtttcccagatagggaaggtctcggtcggatgctaaacttctgaagtactagaatgatcgccttttgatacttttagcttcaaaactcttaaatcctattgacacatagaatacgtgtttctcctcttattggctctaaaatggcaccagatgctctctgaaacataagaaaaaaaaagctaaaacgggctaaaaagccgtgttatcagtttgcaatgatcttcgaaacaattttataaaccaagttgcagcagctaattataaacaatcttataaattaatcttataatcggtctatagtcataaaggttacaagcctcatgaaatttgcgagtaagagcgattttggtggagttaaaaccttttaggagccgtccattcctaaagaactctttcacatccaatataacatctgaacaaacaatactccaagccggtctgaagaattcaacataatatccatcacgccctggacacttatttgaggcaaggaaaaaaccgtcgaaatgatctattcctctgagacctccttttgcaactctgagcagcgaaaagaaataaggtctacaagctgcgcaacaatacaaggggaatgtggcatatccgtgcagccagttatctcttcaaaataggctgcaacatgagctttgatctccaacccctcctgaagtcttctccccctttggtccataagaaaatggatgtgattatgattcagcctttgggaaagagatttgtggaagaaaaagtctcatttcccaatttgaaattgagtttaaacctaaaaccaaacaaaacaaaccgagtttcaaactgaacttaaccaattttttattcggttcaatttggcataaattctgataattgaaaaaccaaacgaatggtgagaccaatgtggtgtcgcagatcaaggtcttagcattgtatccaagagttgatttttggcatggcgtaagttgctttctagaggaggagaataaagtcgtactgtgtcgtaagagtaaatgatggatggacgaagattacaaagagaagtgcaaagacaaggtatacattgttagagaggataataatgtcaaaataatgaattcgtgagtttatacaattgaaaggatcatgtccaactattttaattatattcgaagtttggttcaaatcgtgagagctggagacaaaaagaaaagaggtgtttaaacaagctctactacatgtaatctcttatatttttgttttcatattttcccccttatattttctttcctttttaccaagctaacttagggaaagaaaaaaaatctgaaaacaaaaaacagagagattacatgtagttgagcttgtttaaacacttcttttcttttggtctccagctctcacgatttaaaccaaactatgcatatacagaagtgtttgacatgatccttgtaattgtataaactctcgaatccattatattgactttattttcttctccaacaatgtatactttgtctttgcacttaaccttgtcatcttcatccatccatatgttactcttacaacacatgacgactttgttctcctggtctagcaagcaacttatgtcaatatgtcatgccaggattcagcgccgagatacaatgctaagaccttgttccacgacaccacattggtttcaccaatcttttggtttttcaattatcagaatttatgccaaattaaacagaataaaagtttggtttagttcgatttgaaactcagtatatttgtttgttataggtttaacctcagtttcaaattaaacctagttttgtttatcttttactgaatttcagtgaaatttaaaccaaattacagaatcatggatgatggactgaaattgaaaaactcaaacccattatatagttaaagtgacataacaaattcactcaaataataaatttactgtaacagggtccaaacccaattacacgattaggttgacaaactcaacccattaagaattagcctgtgaatggtaaccaaaaccgcaccgcaacagtgctgtaacagtatcaaaatctctatgtattttcgttactatttgaaccgcaacgcacttctcccgtaacgcaaaacgcagtcaccattcggagccttaatgtttccgacaaaatggatgacggtgacttagtggtaccatcggaaactacgatggttatatgccaaccgcaaaaaatctaccttcttataaaatctatcacatatcaatatcaaaaccacatgtactccatcatctaaagttgacaaaaattaagaaaagtacaattaaaaaggtttgaaagtcagatgaagatcggtcagatttgaagatttacgagtaagtaccaaccgtgagtttggtgatgagacaaataaatagttttgtatagaagtgggttctggagaaattcggaacagccaatggggcaacaaattctcaagtattaacacttaaaccacaatggcacgaagtgtgtggtagtacacttcttcggaatcttgttgttttagtcgagtgaattaataatcgagcaatcttccatgttgccccattgacatttctgagtttcaccaaaacccacatgtaaacaaaaccatctcttatattatattggttatgtgccttaatcctccttatcaattatattactttcgttgctaatttactttgctaacatgaatgttttataaatagatgaacaaagaagttatggatgtgcttgaggaaattgttacgatttgagcttaagtaaactcgaatcttacacacacaatatgaatttgagaacgatccaagaagaaagaagcttaaagaaacaagaacacaagacacaagacacaaatttgtttacccggttcagcgagatcgatgtgatcaagcctacgtccggagccgaatcaatctggcaaatccactaaacaatgaagaagttttcttgctcgaacttgagcttacaacaatgtggaatcactaaacaacaacctctctctctcgataaagttagttgagcttatgaactatgaaaaaagtaaagttatatcaaaagcaacttataatcgtttcaaccgaataacagcaaaccctcaactaagttagagtctttgcctttctctttcaatcttggtttaatcagcaatcccaaaccagagataaccgcctggtccaattctcacaattcaataaaccaattgaaccactaagaattgaatcagaatatcgaaccttaatagaaatgacgaagaaagaagaagagcatgtcgtagaggtaagaagaaaaagaaggaaaaactcagattaccgtgtcttaaactaaagaaccctatggcaaaatgataagacatggaagcaaaaaacaactctctgatttatcgacaatcatttaactttagttcacttttagcagttcaacaaagactacaaggagatttagttaagaaagctctcactggtaggcctactaaaagtgttttaactcgaaagatatttagaaccaataatgtaatatcccggttttaggaatatgataatgcatgcaaagaggtttaaaatatttgatttggctacttcagttatcttttcggtcaaacgttcaaagagagctccacaattaagtacgtttgggctcgagtaatttcaggatgggtcaccttctgggaactggtttttaaaactgtgtgagtgaggaaaaaagacgggaaaatattttgtggtgatttgtagggttggtaaataagtctttaaacctcccggatgtagcaggcaaaccatcgacaaaggttgggcccatgggctcgagagaagacgtgagtggtatgggcgatcgaggtgttacagtggtatcagagccagatccagataagtgcggagtcaagaaggctctcaccgtcggggtgacggtcatggtgcgcaacgaggacgttgggatctataatgtgggtgaactgtaacacctcgattttatgaatatggtggtgcatgcacaaaagtttaaaaaatgatttggccagctatgtcactaaagtgcacttatcattttggttaaacgtcttgagagaacttaacagttaagcttgtttgagttggaataattttaggataaaataaccttccgagaaatgattgtcggaatcatgtgagtaagaacaaaaaacgagagatgcatttcttcacccaaataagtttttaaggcaattctcacaaatagcacaaaaataagttttgtatccaaatttagcacattatttttaaagttccaaaaatagcacaaatttaatagaaacaaatattcttaatttttgtggtgattcaaaatagtgtcaaaatcgcctaaaaactaatccataatccaaaattataagttataatctcttaaagattatttttagtgtttgaagtattgtttgaagtaattagttggttgtggtattattgaaaaataaactaatggtggtatttttagaaccaaaacttagtggagttgaatttgaggtatttattttaatatcattattttataattgtgttaactaatgctattattggtctggactgtgtcgaagaagtctcggacagaagttcatcacaaggtggagtgatatccttagaacccttacagacatgactttggggagaattgaattattcttaactagatatgcatttcaacgtggtgtctacaacatcaggagagaacggaattgtagaaagaacagagaaacaccaaaaccacagttgcaactacttcaaaacctcgataaacacgttggaaatcggatcttttcgattcgagaacaaggatataggagatttgatagatgcatggaaacttggtttgcatcaaaataaactcccaagaagtaggatatttcaagcattgtatgcaactctttaaccacatgtagcacctcgatgtacaaatgtttttttcgaataagttttacatattattcaaaaaaaaaagttaatgctattattgaaaatttgttaatttgtttattaatgtgatatacgtgtccacgaaaattgttttaatattttctgagtatttcttaatttcttttgttaacatataaattaattttttatgtcaacatacagtaaaatctctataaattaatactcgataaattaataacctctataaattaataaattctctcgatcccgaactgagactagtgtaaaaagtgacacaaaccgataaattaataagataataattttttgaaagtcttatgtaaatatatggtctcatcaatatcataaattaataattacataaatatataacctatatatataaatcatatgtaaggaatttctttgaaatattgtttttgtttaaatttgtatttattcttctttgaaatttagttctaatatttcactatatcaaaaacttttggtaattgttttctaaacatgatattattttttatttgtaattgattctagaaaaatattttttataatgaaaagaaaattatagaaaatttttaaaagttactaaattaggaaaatttattaatttatcgataaattaaaactttttaaattataaaaattttcagttccaacattattaatttatagaggttttactgtatatagattaattaaaaccagaacttgtattctttttttgtcggtcaagttaccgaaactgacttagagttaatttctatctaaatacaggtactcgagcttctctcagtttccacctaaacagctaaacagctaaatacaggtattcgagcttttctcagttctaacatatgcaactgaaacatgatcttgcgtaccaatgtgcaatgtctctatttagtatcagatacatcatactagcttccaagaatgaaatcaatcaatcattgtttgtaagcattttccatcataatttgataattacatatacataaatgacgtgtcgttcattgaatggttaccaatacacataatggtccatagaacagaggaagtgggtgcgaatataaatatacttaacatcaaaaacttatgaggaaatgataattacttttgtttcttacaaacttaaaaagagtccccaccacatagaaccacttggcctcagttacatgaagacgcaaccattatgttggaattccgactcattgctttcaaatctaatctttcataaatacaaaatttatattatttgtcttatggaatttaatttgacaattcagctttagacatgttgggtcctttctctatatagtcttgtctccactttgtcttcttctttttaattcgattgatctaaccctatgattccaaattgaaattttagttccatcttatttaatttcattctatgcttatcaaaatattaagaagaaatgcatgtttactttatcaaaaacatatttgatgataagaaattagatgtattggtagaaaacaaaaatttaccattctttttcaattcatatgttgtataaaaactgaattattatcatttgaatatattcattaggtttaatcatagcaattgatggtggcatgcaaaaatagacctaaaaattgggtccacacgtaaagttgaaggagtagataatttcttcttgctacaccatcatgtaaccaactatacaacatcacacatgctttgccacctcaccccacccatcccacctttaccctactgttttgaaacccggttttatttaaccaatccaatcggttagaccgaaattcaaaacaaaattaattgacagtaatttgtatgatcactgatactaaaaacaattatagccatttataattggaaaaaaaatctatataattttgttgtattgttaaaaaaatcaattcaataatccaccctctttttttcttccttttttggttaaaataacaatcctcggtctagttggtttgataccattaccaaatgatctggtttgtttcccactttcgttataaacctaaacaatgctacccccacttctttataacccaaacccatttaagaagtgtagtaagcttcttcacccacatagctataacaagagagagagatagacatagagcaaaaattagtttcttagaagttacaaaatcaaagatcagaaccaaagagcctaaagatgatgaagggaagcaagtcttacacggagtattcgtcatctttctcaacagatgaatttggttatgatcagaaccgttcaaactcctataacttcaatgggccttgtatcaacacagatccggagatgaaaagaaagaagagagttgcttcttataatctttttgccacggaggaaaagctcaagagtactctcaagaacagtttcaaatggatcaagaacaaattctcaggcgatgataatagtatccggtacaacgtctagattagtccactttgctcctgatctttttatttcttcctttttattacactaagatcttagtgaaacttaacatgtaaataaagtgtgtgagattgtgtatgtgtgtgtgtgtgtctaaagttttgtatgttactcaaatggaaatgtcaatttgctttaattatttctttattgttatactgtttatttggttgagtcaatccaaataaaaaacacaaaacttttaaaaacatcacaaaatatataggaagtagatttgaaacttattttgaaagcatgttaaataaaaatgttgaatatttgatatacttatatagtttacagattttttattattatttacatgtatcaaagtagatatccgcaaatatcacaaaattttttggatattcgaatttccggatatccgaaaattttcgaatcgaagcaaatcaagtattcggttaaaacgaatcgaataacaaatatcacaaattttccgaatatttgcttcgtgcccaggcttaataggaagcgtcacttaattgttcttataaactcttcctaaatcatcgtaggaattttccggataatgttttaggattttgttttaaaatcgaagtttagggaagttttataggagtaactttgttatttctgaaaaaattgggtgattttttgtgtatttcttatggttaaaagatattatgaacaattgatatcgatcaaaggccaccatacagacgaactaaatgcaagtgtatatcaaggttaccattttattactatttatataattgtaatcacatcattgataattccactagttaatcttacaagctatataataagtttccaattatataaatagtctcaatttcctttgtataccacacatttgaattaataaagaactcattaattggttttctgatcaagaagaaccgaattattaaaaataaattaaaaaacatcttcaaatctagttatggatgaaagggctaaataattagtactagtcacaatttagtagtccccattgtgaacataacatcagaaacaaactggagcagagcaactgatatgatatagtactagtctagtcttgggacactttttcgcctatagctatttaatcaatacaatttgtccctgcatgaatcgttggaaagaaaccaggagaatatgaatgaaaggatatggccaggttatataatgagttttttttttatcaaaagttttataattagttaggttacattttatatgacttgtcagataaaaagtgcccacaaatctcaacaagagcaaacacaattgctataaaagtctctaatttttacctccctagaaaacgacttcacatattcttcttcatcatcgaagttatcaacataatcaaactcagcatcgaacataaccaaagacagatcatgtgttatcaaacatgatgaggcaaaaaaaaatcttgaccaagaaagatataggtcagttgaaactggtgtggttgataatcagttgaatcccaatataagggtaaatttcagatgtattgggagacaaaagggcttcaaagatcgtttttatcaacaaaggaagcttcaacaatgctcatgacggttagtgggcatataagagaccaatataatcaccttttgtgctgggattttactctttgtgatttgactagcgcaacaacggttatttatggacaaatgaagtcttatgagcggttgggtttgatgttcctgtgtgaaaaagtatatgaagaaagctacaaaaagaggagaggtgaaaatggttgtcatagttgctacctttgtgccttttatgatgcactgaaattaaaggcagtcagaacgagaaaagcgaaaagaagttcaattgcaatattataaggcctcttttgggctataatagttttctttatctattatgttttaaggcttgttgtagtaatgtctcatctcggttaataaataacatttgatgtgatgtctccaggataagaatgtgaaaattgtcattgagctggttcaccacatacaagctccatcgatcacaagcatcgatgatgaatatgttttcgtttatgcaccaataggtgttgatggggaaattagctgtgaaatctagttagaattaacaagctcccaaatcaagaaaaataaatggcaagatactcatgaaaacaaaaaaaatgaatatgcaatcaaagattcagaaggtactaattttcaaaagtcgggaaaatctactacaaagataaccgaagtcaattgataatgttcgatgattgaggcgccactcgatagttgacgtggcacgtgaatggcttaaaataatgtcggcttggctatggtgtgtttattgactcaaaacgacgtcgttttggctatggttgtttgagttgattttgaaaaaatattcgggttgattttggcaatttttccttcaaaaaagatggtgagtttggaagctggttttgaagattagtaagcgagttagtcgtaatagacaaagtatagaaaaaattgaattgaagcataaaccatctaacaaaattttaaatttgataagaatagacatatgatatttacatggccatgaaatgttgaactatataaatatcagtattaatcaagtattttgtaggatcaccatttgctttgaacatgcaccttatttgttttataacaattacatgaagagtaaaaatagattatattgtgtattatttttgaattcgtggaattgacctgttcttgcaaaaatggtgaactacaatttttttttttgtcttttttcagaaaacccttttaattttttttatttacctaaaatagtttgtgttccgtagccattgatttaattaattttcacattttggccattgaatgcaattactctaaataatctataacaagaatcttgtttgtatattgacgtaaataagaatatgcaaatgtttaggaaaaaaactgaaagtatattatacattctgaattcaagattttctatttttaaggaatctgtgctatttcaagaaggatcttgtgaagagactgaggtttagagaagaatgggcaatgatcacttcctttgatcttaaaaactgcttcgggactattctctcgaaccagtttctcttgaacgtccggtgaaagagccaagtcatcgagcgtctggacatagaatctccgacctttcccatatctttctgcactaagtgacaacttctccatcatgggacctaatggtacaggccgcatcgagatcattgacaatgcaatgtcctgaaacaattttaagtaaagacaaattgatcacttgttgcattaggcctatccataaaaacagaacatgaactacactctagattggggctgttactgatcacttagcttgattagtgtaagagtttaccttatttggtgactgattgaagtacaagcctttcatgtgttgtttctcgaacatgaaccctgtcgcggggttgtccttgccgtttccatagatcaagaactgtgactctttcatgaaccgttctgcagaaccaagctgcaatgaagacagtttccaaagtgtgaggggaaacacataaacaaggaatattcacaagatgagaagagaactaactacagaattattcattattggtttcattgcgatgaaatgactcaacaaccaattttgtccacaatttcttaagagatgaaaatacgttcaagaagcatgtgtcaaggaaactttgctagtgttacctcatcagcgaagacatcgaagggtctttgtccatcagtaaccatagttgcacaaatgaatatagcttttgagattttctctggaaaccgctctaacgcatatgaaacacatgcccctccagtactgtgacctaccagaatcacctgccacaattcttcatctgataaatgcttcctagttcatattacaaccaatacaaggaccaccattttcatctaaatcttagcaagacattgacacttccttccaagttccaacataaacctatctatctaatggagcattttctaaccttttcttcagcaggaagattttgaatgagctcgatcaacggttttgaatattcttctaaggtggaaacactatttgcgtctgtcatattaaatccagatccagcgaggtcaaccgtaacaggagacagtccagactcctccaatgacgcaatagttttgtaccaacaccatgccccaaacccttcaccatgcaccaaaacgaatttcttaaccttcaagctctccaaaaactcaggaacctaaagagataaaaaaaaattaactagcataagtaaaactgaacataaaaagcaatgacaattatgtgtgacaggaacaatcatgaacaaattctcgagtgttcgaacaaagtcctctgctttcaataaccataaagaagcttcttttctcactctttgttctaaccacaacaagacaggcccgtagggtaataagacaataactatcatttgagaacaacactcaacaaacgataaaaagatactagcatcagtaaagtcaaaacataaattgtgtactgatctctagagacctggtttctcatagtcataggcagtctcaattacaaagaagtaatatttacacgaacaaagttcactgccttctccaacaaagaagcttcttttctccatctttgttctaatcaaaactagacagacccataaagtaatatgacaacaacactatataaacattttaaaaagcaaaacgcactacaagaccttttaagaacacttattctgttcttttggtcccaaccacttttaagaacaatatcaaatttaaaacctttataaatacttttgaattctctcctcaaagtttaaaaatccaaactttatcattactatcaaaaagcttggacctgcttgttattagaaaatgagtcagagagtgttcctcttctagagctagtagacccgattcgtctagacatggatccatcaaatctctgagaaacttgagcttgatgaatagccatagacaaagctcttcgatgcaaattctcttcatcagcaagcaacttcctctgtgaacgattcactctcttgcttctggacccatctcctccacttctgataacaacatctttcttcttcatgcagattactctgttacccattcttcacaaaaccctgaatttagcccaaagaagtggactttaatggaaactcaagaaaattctcaaaatttattaaggtccattaattgaaaaaaatcttgacttgatgatagagagaagaagaagaagaagtaaaacggtgtcattgattaggatgaataaggacgattcagatttaagacaaagcagccaaagtttgttaattgtttcgtctatttgtgtgggatatttgatttcttgtgtgtttcgacatttttgttctcattattatttctctgttccttcacaaaaattgggacatgtatttgtctgactctcagcatattcatatattttttttttcattatttcatgaaagagtctaaaagagaagaaagagtcttattagcaggcccaaagcccaggcccacttaggtagcaaacaattctcaacgaatctcagtgattgtgagtttcttctgctaccttcttcttctttctccctttctcgatttcagaattgtagattttccagaaattcttccgcagagttcttcaggcgcttttgattttacctctaattccggttcagaggcagaaaaatcgagcatttactgaatttcactggaaatagtctcatcaccacctaacaatccagagctttctagggtttatctctttttcctcggtgtgtggctgtgttttttttttcttgtttggttggcttgagataatgattgtgtttctatttcagggtcggtgacattttcttgatttttgtaaagagatggacagaatcattgggttacctgatgaagtactggttaagatactgtcgtttgttccgactaaagttgctgtgtcaacgagcattttgtcgaaacgatgggagtttctttggatgtggttgacgaaacttaagtttggtagtaaacgttattcagagtctgaattcaagaggttacagtgttttcttgataggaatctgccattacatagagctcccgttatagaaagtttccgtcttgtgttaagtgattcgcattttaaacctgaggatatcagaatgtgggttgtagtagcagtttctcgctacatacgtgagctgaagatttatagttctcactatggggagaagcaaaacatattgccaagtagcttatatacctgcaaatcgctcgtgatcttgaaactcgatggcggggttctcttggatgttcctcgaatggtttgtcttccctctttaaaaactttggaactgaaaggtgtgagatacttcaagcaaggatctcttcagcggcttctatgtaattgccctgttcttgaagatctattcgtgttgttacttcgttgtgacgacataggaatgtttattgttattgtcccatctttgcaacgtttgtcactctatttaagtcctcgttgtaatttagaagggtttgtcatagtcttagatactcctttagaatatttcaaacttgtggatcgtaattatgatcgtcacccatatatgattgagaatatgcctaagctgacgtcagcatatgttgaggttatatccgctgatcttaagagtcttgtcgaatcaatcacttctgtcaagtacctaacaatattctcagaggtaatctgtctcaatctatcaactgcaagactttgatctcgcgcgctttttgttagtactttctttattcgtctgcatgctatgtttggtgacgctacatgtatgggatgacaatctccttgctcggttgctcaaagactctcctaagttacaagaactagtgtacgtctctgacaaagatgtaagttctttcgataaactattatatcttatctattgcacattattttttattattcaatctgattttctccttgatctcagaattatgacgattttgtgtttccctggaatcaacctagtactgttcctaaatgcttttgtccagtctacaaaagttcaccagtctacaaaagttcacctggacaaaatacttaggaagaccacaagacagagatattgcggtttacatcttgaaaaacgattgtcgcttaaggactgcaacaatcatatgtgatacatgtttggttccagatcaatatgaaattcagatatatgtatgttctcagatgatttagtgagatctatctaaaggaatcttcttgatgttgtacccagtatgtgaaaatcacttactacctcagaacctagtaaggaattctcacaaagaaattatcctctttctcacatatccggtttgctttccttgaactgccatgggtacatagagagatgatcttgtagatgaggttgcaacacgagatgggtcaaaattccgagaaatctattgatccttgttgcttaggaacaagtgataagtcacgttaaactgtctaaaaagagagaaagaaaagaatatagtcctcgtaatttcgggaactgtcttcaacggtaaggcgttttggtgattcttgtagccacaagagctagccaaaattcacagtcccttcatattactgtcttttttttttgggacaaatcatattactatcatggtaactgtttttccggattacgtcttacttgcctcgcaagttgcttctatcaatccctatataaaaataccctatgcatgattatccatgtattatgtatcggatcatgcatcttatctaaccatttcaattataccaaaggttcaactcatcttatcactctttccttaagcatataatttaattacatgactatatgattttactctttaacatgctaatcacccaatagtatgcatgcatctattatcaaatgccatactactagacatgcttacctattgtgattaacaaaaatctcataaatctataggattttaatagatgttaatgaatttatcaaactcaaatatggtttgcttagattgcacaaataatttatagatgttaatgtgtaccatagaagcttaagataatgcatctatatccatcatattgagcattattaagcctctgtgttacacattcacattttttgttttaatatcaataaattcaaaatttcaacaactaaaacaaagtcatctcatcatgaaaattattgaaattacaagtcaaacatttttctctgactccacaaaaatttgtacattttatgaaccatagccaacaccatatataatcacaaaatcaattaagtcaaaaaacatatataacttgaagcaagggaataaaaccaatcaatagaattaaagctataatggagaatgattttatgaggtaagaaaacattggttttggtaggaagaggtggtaataggaagagtgccacgtgaacaacattctaggtagaaaacaaagtagtcaaaatcgacttaatttgaaatgatgatgtaaaggatcgtcaaagtgattggcactgatattgagtgataccatgtttttttttaagttaatgtttgtggagtgtgtgtgtttgaaatcttgattttcttatgtctatctggttgattttcaggtcatgtgatgtataaaagaaaatagatcaagaaatgtataagcatttcgaaaaacatgatatatgcaatgtttttggtatttttgatgaaatcttgtctttctaaagaagaacaatatgtagttcatcgattattggaaaaactctttggcagtaatatcattgactagcttctaatcgcttctacggggcgatgaacttgaagaaagccagaaactctggaggtctatgtaactcagggatgtccggaattcatgaaaaaactcctcaagcaatgtggcaatagactgattatgtttgataagaaaatcgaagataataaaaaaaagctcgaccaagtccaataattaactaatatgattgacttggttgcacaaaaaacatggaaaaacatttacaagcgaaacctttttgtattgttaactatctatgtaataaatttcctaaaccctaatttatcatttgaatttagcaaatcaagcaagcactaataagtccaaatttgattttttcacaaaatgccttaacttcaactctcgttggctaaggacaccttgcttaacctatgttcttttcaagaaactctaacaatataacattagttaatcataagaaaatcattttaaaatcctaaacccaattaagacactactaagacatgatagaacacaaacatcaaacaacccaaattagaccaattatcataccaaaaggatgtaagttctccattttggaaaacaactttgcagaattgttttaccaaaaggacgccagacgaattgatgtgatctatttctttatatctatctttatagtgaatgataattattaaattgagtgcattaactactcgataagagtttcttgaaatcatgtacccattaacttaaatgtaaagctgtcctccttgcattttcgagacaacaaaactattattggttatcgaactaaacatattcaaccacatgcatccatagaaaccgttgatattccttcatttttgtattctttttaaccataattttggaggcaacttagtttggaatgagttcttgagaacagagacagaaaatccaaagatctcttcatatattcttttaatctatattttaaaatttacttggtccactttcaaatgggtggaggactcgtagaagttgatgtccaaactggacaaggtatgtcacatttcttagatctttcgaatctctttctctcactcatagtcattgctttatgcaaaaagagaagatattctagttcttaatatgacttttatagatttgggctttgacagagtttctgttttctgttttttgaagatgcttgtgagtctgatttaccgatgaagccttcaagaaccctagtccttattggctgctcaggcaacgggaaaagtgcgacagggaatagcatcctcagaagcgaggcattcaagtcaaaaggacaagcagcagctgttaccaaagaatgtgagctaaagagtactaagcgaccaaacggacagatcataaatgttattgacactcctggtgcgtccatgtgtgtgtttgcatctgcttcttgttcatatcaaactaaatgtcaaacatgtggatggtgattcattttgcaggcctttttagtttgttcccctcaaacgagtctaccatcagagaaatattaaaatgctctcatcttgccaaagaaggaatcgatgcggtgcttatggtgttttccttgaggagcaggctaacagaagaggagaaatctgtgccttttgttttgaaaacccttttcggagattctatttttgactacttgattgttgttttcaccaatgaggattcacttattgatgacaatgtgacaatcaatgagtatttggagggctctcctgatttcaaggttactatgttttcttcttatctttctgttgaaacctcaagcaaggccaaacgttctcttgtgacttacatctatcaattgatttgtttatatggttctaggaaattctcgctgcatgcaacaaccgcatggttctgtttgagaataggctcagaacaagtaagcgcaagaaagctaagcaagttcagaagcttttagaccttgttgaagaagttgagaggaagaacaacaacaagccatttctgtttgatttatctcatgagtcaatggtaacatttatttttaatgcatgttcccttcttgatgtcttttgattgtagtataagtaaccatctgcatctcaggaaagcgaggctgtagttgacgaaaaggccaaaaagattagagcaatgaagagtaactacacaaaacaagagatgtccaattggaaggaagaggaagtgaattc

SEQ ID NO: 560 - DNA, 92495 bp, Arabidopsis thaliana
aagcttaaagaaacaagaacacaagacacaagacacaaatttgtttacccggttcagcgagatcgatgtgatcaagcctacgtccggagccgaatcaatctggcaaatccactaaacaatgaagaagttttcttgctcgaacttgagcttacaacaatgtggaatcactaaacaacaacctctctctctcgataaagttagttgagcttatgaactatgaaaaaagtaaagttatatcaaaagcaacttataatcgtttcaaccgaataacagcaaaccctcaactaagttagagtctttgcctttctctttcaatcttggtttaatcagcaatcccaaaccagagataaccgcctggtccaattctcacaattcaataaaccaattgaaccactaagaattgaatcagaatatcgaaccttaatagaaatgacgaagaaagaagaagagcatgtcgtagaggtaagaagaaaaagaaggaaaaactcagattaccgtgtcttaaactaaagaaccctatggcaaaatgataagacatggaagcaaaaaacaactctctgatttatcgacaatcatttaactttagttcacttttagcagttcaacaaagactacaaggagatttagttaagaaagctctcactggtaggcctactaaaagtgttttaactcgaaagatatttagaaccaataatgtaatatcccggttttaggaatatgataatgcatgcaaagaggtttaaaatatttgatttggctacttcagttatcttttcggtcaaacgttcaaagagagctccacaattaagtacgtttgggctcgagtaatttcaggatgggtcaccttctgggaactggtttttaaaactgtgtgagtgaggaaaaaagacgggaaaatattttgtggtgatttgtagggttggtaaataagtctttaaacctcccggatgtagcaggcaaaccatcgacaaaggttgggcccatgggctcgagagaagacgtgagtggtatgggcgatcgaggtgttacagtggtatcagagccagatccagataagtgcggagtcaagaaggctctcaccgtcggggtgacggtcatggtgcgcaacgaggacgttgggatctataatgtgggtgaactgtaacacctcgattttatgaatatggtggtgcatgcacaaaagtttaaaaaatgatttggccagctatgtcactaaagtgcacttatcattttggttaaacgtcttgagagaacttaacagttaagcttgtttgagttggaataattttaggataaaataaccttccgagaaatgattgtcggaatcatgtgagtaagaacaaaaaacgagagatgcatttcttcacccaaataagtttttaaggcaattctcacaaatagcacaaaaataagttttgtatccaaatttagcacattatttttaaagttccaaaaatagcacaaatttaatagaaacaaatattcttaatttttgtggtgattcaaaatagtgtcaaaatcgcctaaaaactaatccataatccaaaattataagttataatctcttaaagattatttttagtgtttgaagtattgtttgaagtaattagttggttgtggtattattgaaaaataaactaatggtggtatttttagaaccaaaacttagtggagttgaatttgaggtatttattttaatatcattattttataattgtgttaactaatgctattattggtctggactgtgtcgaagaagtctcggacagaagttcatcacaaggtggagtgatatccttagaacccttacagacatgactttggggagaattgaattattcttaactagatatgcatttcaacgtggtgtctacaacatcaggagagaacggaattgtagaaagaacagagaaacaccaaaaccacagttgcaactacttcaaaacctcgataaacacgttggaaatcggatcttttcgattcgagaacaaggatataggagatttgatagatgcatggaaacttggtttgcatcaaaataaactcccaagaagtaggatatttcaagcattgtatgcaactctttaaccacatgtagcacctcgatgtacaaatgtttttttcgaataagttttacatattattcaaaaaaaaaagttaatgctattattgaaaatttgttaatttgtttattaatgtgatatacgtgtccacgaaaattgttttaatattttctgagtatttcttaatttcttttgttaacatataaattaattttttatgtcaacatacagtaaaatctctataaattaatactcgataaattaataacctctataaattaataaattctctcgatcccgaactgagactagtgtaaaaagtgacacaaaccgataaattaataagataataattttttgaaagtcttatgtaaatatatggtctcatcaatatcataaattaataattacataaatatataacctatatatataaatcatatgtaaggaatttctttgaaatattgtttttgtttaaatttgtatttattcttctttgaaatttagttctaatatttcactatatcaaaaacttttggtaattgttttctaaacatgatattattttttatttgtaattgattctagaaaaatattttttataatgaaaagaaaattatagaaaatttttaaaagttactaaattaggaaaatttattaatttatcgataaattaaaactttttaaattataaaaattttcagttccaacattattaatttatagaggttttactgtatatagattaattaaaaccagaacttgtattctttttttgtcggtcaagttaccgaaactgacttagagttaatttctatctaaatacaggtactcgagcttctctcagtttccacctaaacagctaaacagctaaatacaggtattcgagcttttctcagttctaacatatgcaactgaaacatgatcttgcgtaccaatgtgcaatgtctctatttagtatcagatacatcatactagcttccaagaatgaaatcaatcaatcattgtttgtaagcattttccatcataatttgataattacatatacataaatgacgtgtcgttcattgaatggttaccaatacacataatggtccatagaacagaggaagtgggtgcgaatataaatatacttaacatcaaaaacttatgaggaaatgataattacttttgtttcttacaaacttaaaaagagtccccaccacatagaaccacttggcctcagttacatgaagacgcaaccattatgttggaattccgactcattgctttcaaatctaatctttcataaatacaaaatttatattatttgtcttatggaatttaatttgacaattcagctttagacatgttgggtcctttctctatatagtcttgtctccactttgtcttcttctttttaattcgattgatctaaccctatgattccaaattgaaattttagttccatcttatttaatttcattctatgcttatcaaaatattaagaagaaatgcatgtttactttatcaaaaacatatttgatgataagaaattagatgtattggtagaaaacaaaaatttaccattctttttcaattcatatgttgtataaaaactgaattattatcatttgaatatattcattaggtttaatcatagcaattgatggtggcatgcaaaaatagacctaaaaattgggtccacacgtaaagttgaaggagtagataatttcttcttgctacaccatcatgtaaccaactatacaacatcacacatgctttgccacctcaccccacccatcccacctttaccctactgttttgaaacccggttttatttaaccaatccaatcggttagaccgaaattcaaaacaaaattaattgacagtaatttgtatgatcactgatactaaaaacaattatagccatttataattggaaaaaaaatctatataattttgttgtattgttaaaaaaatcaattcaataatccaccctctttttttcttccttttttggttaaaataacaatcctcggtctagttggtttgataccattaccaaatgatctggtttgtttcccactttcgttataaacctaaacaatgctacccccacttctttataacccaaacccatttaagaagtgtagtaagcttcttcacccacatagctataacaagagagagagatagacatagagcaaaaattagtttcttagaagttacaaaatcaaagatcagaaccaaagagcctaaagatgatgaagggaagcaagtcttacacggagtattcgtcatctttctcaacagatgaatttggttatgatcagaaccgttcaaactcctataacttcaatgggccttgtatcaacacagatccggagatgaaaagaaagaagagagttgcttcttataatctttttgccacggaggaaaagctcaagagtactctcaagaacagtttcaaatggatcaagaacaaattctcaggcgatgataatagtatccggtacaacgtctagattagtccactttgctcctgatctttttatttcttcctttttattacactaagatcttagtgaaacttaacatgtaaataaagtgtgtgagattgtgtatgtgtgtgtgtgtgtctaaagttttgtatgttactcaaatggaaatgtcaatttgctttaattatttctttattgttatactgtttatttggttgagtcaatccaaataaaaaacacaaaacttttaaaaacatcacaaaatatataggaagtagatttgaaacttattttgaaagcatgttaaataaaaatgttgaatatttgatatacttatatagtttacagattttttattattatttacatgtatcaaagtagatatccgcaaatatcacaaaattttttggatattcgaatttccggatatccgaaaattttcgaatcgaagcaaatcaagtattcggttaaaacgaatcgaataacaaatatcacaaattttccgaatatttgcttcgtgcccaggcttaataggaagcgtcacttaattgttcttataaactcttcctaaatcatcgtaggaattttccggataatgttttaggattttgttttaaaatcgaagtttagggaagttttataggagtaactttgttatttctgaaaaaattgggtgattttttgtgtatttcttatggttaaaagatattatgaacaattgatatcgatcaaaggccaccatacagacgaactaaatgcaagtgtatatcaaggttaccattttattactatttatataattgtaatcacatcattgataattccactagttaatcttacaagctatataataagtttccaattatataaatagtctcaatttcctttgtataccacacatttgaattaataaagaactcattaattggttttctgatcaagaagaaccgaattattaaaaataaattaaaaaacatcttcaaatctagttatggatgaaagggctaaataattagtactagtcacaatttagtagtccccattgtgaacataacatcagaaacaaactggagcagagcaactgatatgatatagtactagtctagtcttgggacactttttcgcctatagctatttaatcaatacaatttgtccctgcatgaatcgttggaaagaaaccaggagaatatgaatgaaaggatatggccaggttatataatgagttttttttttatcaaaagttttataattagttaggttacattttatatgacttgtcagataaaaagtgcccacaaatctcaacaagagcaaacacaattgctataaaagtctctaatttttacctccctagaaaacgacttcacatattcttcttcatcatcgaagttatcaacataatcaaactcagcatcgaacataaccaaagacagatcatgtgttatcaaacatgatgaggcaaaaaaaaatcttgaccaagaaagatataggtcagttgaaactggtgtggttgataatcagttgaatcccaatataagggtaaatttcagatgtattgggagacaaaagggcttcaaagatcgtttttatcaacaaaggaagcttcaacaatgctcatgacggttagtgggcatataagagaccaatataatcaccttttgtgctgggattttactctttgtgatttgactagcgcaacaacggttatttatggacaaatgaagtcttatgagcggttgggtttgatgttcctgtgtgaaaaagtatatgaagaaagctacaaaaagaggagaggtgaaaatggttgtcatagttgctacctttgtgccttttatgatgcactgaaattaaaggcagtcagaacgagaaaagcgaaaagaagttcaattgcaatattataaggcctcttttgggctataatagttttctttatctattatgttttaaggcttgttgtagtaatgtctcatctcggttaataaataacatttgatgtgatgtctccaggataagaatgtgaaaattgtcattgagctggttcaccacatacaagctccatcgatcacaagcatcgatgatgaatatgttttcgtttatgcaccaataggtgttgatggggaaattagctgtgaaatctagttagaattaacaagctcccaaatcaagaaaaataaatggcaagatactcatgaaaacaaaaaaaatgaatatgcaatcaaagattcagaaggtactaattttcaaaagtcgggaaaatctactacaaagataaccgaagtcaattgataatgttcgatgattgaggcgccactcgatagttgacgtggcacgtgaatggcttaaaataatgtcggcttggctatggtgtgtttattgactcaaaacgacgtcgttttggctatggttgtttgagttgattttgaaaaaatattcgggttgattttggcaatttttccttcaaaaaagatggtgagtttggaagctggttttgaagattagtaagcgagttagtcgtaatagacaaagtatagaaaaaattgaattgaagcataaaccatctaacaaaattttaaatttgataagaatagacatatgatatttacatggccatgaaatgttgaactatataaatatcagtattaatcaagtattttgtaggatcaccatttgctttgaacatgcaccttatttgttttataacaattacatgaagagtaaaaatagattatattgtgtattatttttgaattcgtggaattgacctgttcttgcaaaaatggtgaactacaatttttttttttgtcttttttcagaaaacccttttaattttttttatttacctaaaatagtttgtgttccgtagccattgatttaattaattttcacattttggccattgaatgcaattactctaaataatctataacaagaatcttgtttgtatattgacgtaaataagaatatgcaaatgtttaggaaaaaaactgaaagtatattatacattctgaattcaagattttctatttttaaggaatctgtgctatttcaagaaggatcttgtgaagagactgaggtttagagaagaatgggcaatgatcacttcctttgatcttaaaaactgcttcgggactattctctcgaaccagtttctcttgaacgtccggtgaaagagccaagtcatcgagcgtctggacatagaatctccgacctttcccatatctttctgcactaagtgacaacttctccatcatgggacctaatggtacaggccgcatcgagatcattgacaatgcaatgtcctgaaacaattttaagtaaagacaaattgatcacttgttgcattaggcctatccataaaaacagaacatgaactacactctagattggggctgttactgatcacttagcttgattagtgtaagagtttaccttatttggtgactgattgaagtacaagcctttcatgtgttgtttctcgaacatgaaccctgtcgcggggttgtccttgccgtttccatagatcaagaactgtgactctttcatgaaccgttctgcagaaccaagctgcaatgaagacagtttccaaagtgtgaggggaaacacataaacaaggaatattcacaagatgagaagagaactaactacagaattattcattattggtttcattgcgatgaaatgactcaacaaccaattttgtccacaatttcttaagagatgaaaatacgttcaagaagcatgtgtcaaggaaactttgctagtgttacctcatcagcgaagacatcgaagggtctttgtccatcagtaaccatagttgcacaaatgaatatagcttttgagattttctctggaaaccgctctaacgcatatgaaacacatgcccctccagtactgtgacctaccagaatcacctgccacaattcttcatctgataaatgcttcctagttcatattacaaccaatacaaggaccaccattttcatctaaatcttagcaagacattgacacttccttccaagttccaacataaacctatctatctaatggagcattttctaaccttttcttcagcaggaagattttgaatgagctcgatcaacggttttgaatattcttctaaggtggaaacactatttgcgtctgtcatattaaatccagatccagcgaggtcaaccgtaacaggagacagtccagactcctccaatgacgcaatagttttgtaccaacaccatgccccaaacccttcaccatgcaccaaaacgaatttcttaaccttcaagctctccaaaaactcaggaacctaaagagataaaaaaaaattaactagcataagtaaaactgaacataaaaagcaatgacaattatgtgtgacaggaacaatcatgaacaaattctcgagtgttcgaacaaagtcctctgctttcaataaccataaagaagcttcttttctcactctttgttctaaccacaacaagacaggcccgtagggtaataagacaataactatcatttgagaacaacactcaacaaacgataaaaagatactagcatcagtaaagtcaaaacataaattgtgtactgatctctagagacctggtttctcatagtcataggcagtctcaattacaaagaagtaatatttacacgaacaaagttcactgccttctccaacaaagaagcttcttttctccatctttgttctaatcaaaactagacagacccataaagtaatatgacaacaacactatataaacattttaaaaagcaaaacgcactacaagaccttttaagaacacttattctgttcttttggtcccaaccacttttaagaacaatatcaaatttaaaacctttataaatacttttgaattctctcctcaaagtttaaaaatccaaactttatcattactatcaaaaagcttggacctgcttgttattagaaaatgagtcagagagtgttcctcttctagagctagtagacccgattcgtctagacatggatccatcaaatctctgagaaacttgagcttgatgaatagccatagacaaagctcttcgatgcaaattctcttcatcagcaagcaacttcctctgtgaacgattcactctcttgcttctggacccatctcctccacttctgataacaacatctttcttcttcatgcagattactctgttacccattcttcacaaaaccctgaatttagcccaaagaagtggactttaatggaaactcaagaaaattctcaaaatttattaaggtccattaattgaaaaaaatcttgacttgatgatagagagaagaagaagaagaagtaaaacggtgtcattgattaggatgaataaggacgattcagatttaagacaaagcagccaaagtttgttaattgtttcgtctatttgtgtgggatatttgatttcttgtgtgtttcgacatttttgttctcattattatttctctgttccttcacaaaaattgggacatgtatttgtctgactctcagcatattcatatattttttttttcattatttcatgaaagagtctaaaagagaagaaagagtcttattagcaggcccaaagcccaggcccacttaggtagcaaacaattctcaacgaatctcagtgattgtgagtttcttctgctaccttcttcttctttctccctttctcgatttcagaattgtagattttccagaaattcttccgcagagttcttcaggcgcttttgattttacctctaattccggttcagaggcagaaaaatcgagcatttactgaatttcactggaaatagtctcatcaccacctaacaatccagagctttctagggtttatctctttttcctcggtgtgtggctgtgttttttttttcttgtttggttggcttgagataatgattgtgtttctatttcagggtcggtgacattttcttgatttttgtaaagagatggacagaatcattgggttacctgatgaagtactggttaagatactgtcgtttgttccgactaaagttgctgtgtcaacgagcattttgtcgaaacgatgggagtttctttggatgtggttgacgaaacttaagtttggtagtaaacgttattcagagtctgaattcaagaggttacagtgttttcttgataggaatctgccattacatagagctcccgttatagaaagtttccgtcttgtgttaagtgattcgcattttaaacctgaggatatcagaatgtgggttgtagtagcagtttctcgctacatacgtgagctgaagatttatagttctcactatggggagaagcaaaacatattgccaagtagcttatatacctgcaaatcgctcgtgatcttgaaactcgatggcggggttctcttggatgttcctcgaatggtttgtcttccctctttaaaaactttggaactgaaaggtgtgagatacttcaagcaaggatctcttcagcggcttctatgtaattgccctgttcttgaagatctattcgtgttgttacttcgttgtgacgacataggaatgtttattgttattgtcccatctttgcaacgtttgtcactctatttaagtcctcgttgtaatttagaagggtttgtcatagtcttagatactcctttagaatatttcaaacttgtggatcgtaattatgatcgtcacccatatatgattgagaatatgcctaagctgacgtcagcatatgttgaggttatatccgctgatcttaagagtcttgtcgaatcaatcacttctgtcaagtacctaacaatattctcagaggtaatctgtctcaatctatcaactgcaagactttgatctcgcgcgctttttgttagtactttctttattcgtctgcatgctatgtttggtgacgctacatgtatgggatgacaatctccttgctcggttgctcaaagactctcctaagttacaagaactagtgtacgtctctgacaaagatgtaagttctttcgataaactattatatcttatctattgcacattattttttattattcaatctgattttctccttgatctcagaattatgacgattttgtgtttccctggaatcaacctagtactgttcctaaatgcttttgtccagtctacaaaagttcaccagtctacaaaagttcacctggacaaaatacttaggaagaccacaagacagagatattgcggtttacatcttgaaaaacgattgtcgcttaaggactgcaacaatcatatgtgatacatgtttggttccagatcaatatgaaattcagatatatgtatgttctcagatgatttagtgagatctatctaaaggaatcttcttgatgttgtacccagtatgtgaaaatcacttactacctcagaacctagtaaggaattctcacaaagaaattatcctctttctcacatatccggtttgctttccttgaactgccatgggtacatagagagatgatcttgtagatgaggttgcaacacgagatgggtcaaaattccgagaaatctattgatccttgttgcttaggaacaagtgataagtcacgttaaactgtctaaaaagagagaaagaaaagaatatagtcctcgtaatttcgggaactgtcttcaacggtaaggcgttttggtgattcttgtagccacaagagctagccaaaattcacagtcccttcatattactgtcttttttttttgggacaaatcatattactatcatggtaactgtttttccggattacgtcttacttgcctcgcaagttgcttctatcaatccctatataaaaataccctatgcatgattatccatgtattatgtatcggatcatgcatcttatctaaccatttcaattataccaaaggttcaactcatcttatcactctttccttaagcatataatttaattacatgactatatgattttactctttaacatgctaatcacccaatagtatgcatgcatctattatcaaatgccatactactagacatgcttacctattgtgattaacaaaaatctcataaatctataggattttaatagatgttaatgaatttatcaaactcaaatatggtttgcttagattgcacaaataatttatagatgttaatgtgtaccatagaagcttaagataatgcatctatatccatcatattgagcattattaagcctctgtgttacacattcacattttttgttttaatatcaataaattcaaaatttcaacaactaaaacaaagtcatctcatcatgaaaattattgaaattacaagtcaaacatttttctctgactccacaaaaatttgtacattttatgaaccatagccaacaccatatataatcacaaaatcaattaagtcaaaaaacatatataacttgaagcaagggaataaaaccaatcaatagaattaaagctataatggagaatgattttatgaggtaagaaaacattggttttggtaggaagaggtggtaataggaagagtgccacgtgaacaacattctaggtagaaaacaaagtagtcaaaatcgacttaatttgaaatgatgatgtaaaggatcgtcaaagtgattggcactgatattgagtgataccatgtttttttttaagttaatgtttgtggagtgtgtgtgtttgaaatcttgattttcttatgtctatctggttgattttcaggtcatgtgatgtataaaagaaaatagatcaagaaatgtataagcatttcgaaaaacatgatatatgcaatgtttttggtatttttgatgaaatcttgtctttctaaagaagaacaatatgtagttcatcgattattggaaaaactctttggcagtaatatcattgactagcttctaatcgcttctacggggcgatgaacttgaagaaagccagaaactctggaggtctatgtaactcagggatgtccggaattcatgaaaaaactcctcaagcaatgtggcaatagactgattatgtttgataagaaaatcgaagataataaaaaaaagctcgaccaagtccaataattaactaatatgattgacttggttgcacaaaaaacatggaaaaacatttacaagcgaaacctttttgtattgttaactatctatgtaataaatttcctaaaccctaatttatcatttgaatttagcaaatcaagcaagcactaataagtccaaatttgattttttcacaaaatgccttaacttcaactctcgttggctaaggacaccttgcttaacctatgttcttttcaagaaactctaacaatataacattagttaatcataagaaaatcattttaaaatcctaaacccaattaagacactactaagacatgatagaacacaaacatcaaacaacccaaattagaccaattatcataccaaaaggatgtaagttctccattttggaaaacaactttgcagaattgttttaccaaaaggacgccagacgaattgatgtgatctatttctttatatctatctttatagtgaatgataattattaaattgagtgcattaactactcgataagagtttcttgaaatcatgtacccattaacttaaatgtaaagctgtcctccttgcattttcgagacaacaaaactattattggttatcgaactaaacatattcaaccacatgcatccatagaaaccgttgatattccttcatttttgtattctttttaaccataattttggaggcaacttagtttggaatgagttcttgagaacagagacagaaaatccaaagatctcttcatatattcttttaatctatattttaaaatttacttggtccactttcaaatgggtggaggactcgtagaagttgatgtccaaactggacaaggtatgtcacatttcttagatctttcgaatctctttctctcactcatagtcattgctttatgcaaaaagagaagatattctagttcttaatatgacttttatagatttgggctttgacagagtttctgttttctgttttttgaagatgcttgtgagtctgatttaccgatgaagccttcaagaaccctagtccttattggctgctcaggcaacgggaaaagtgcgacagggaatagcatcctcagaagcgaggcattcaagtcaaaaggacaagcagcagctgttaccaaagaatgtgagctaaagagtactaagcgaccaaacggacagatcataaatgttattgacactcctggtgcgtccatgtgtgtgtttgcatctgcttcttgttcatatcaaactaaatgtcaaacatgtggatggtgattcattttgcaggcctttttagtttgttcccctcaaacgagtctaccatcagagaaatattaaaatgctctcatcttgccaaagaaggaatcgatgcggtgcttatggtgttttccttgaggagcaggctaacagaagaggagaaatctgtgccttttgttttgaaaacccttttcggagattctatttttgactacttgattgttgttttcaccaatgaggattcacttattgatgacaatgtgacaatcaatgagtatttggagggctctcctgatttcaaggttactatgttttcttcttatctttctgttgaaacctcaagcaaggccaaacgttctcttgtgacttacatctatcaattgatttgtttatatggttctaggaaattctcgctgcatgcaacaaccgcatggttctgtttgagaataggctcagaacaagtaagcgcaagaaagctaagcaagttcagaagcttttagaccttgttgaagaagttgagaggaagaacaacaacaagccatttctgtttgatttatctcatgagtcaatggtaacatttatttttaatgcatgttcccttcttgatgtcttttgattgtagtataagtaaccatctgcatctcaggaaagcgaggctgtagttgacgaaaaggccaaaaagattagagcaatgaagagtaactacacaaaacaagagatgtccaattggaaggaagaggaagtgaattcacctctggccaagaaggtagagaaggtaaggtgtttccgagttaatcgctatggtctctatggaatgtatacaaaggctttgttaagtgtacaagtttattgctcaggtgatagaaacaaccagtttgctggagcaaaaactgaatcaggagcaaaatgcaaggcttgaagcggaaaaaagggcgaataaactccacgaagaatccagcgaagagataaagattctgaaggagaaactcgagagagcacaaaaagaactcgagaaaagggatcaaggttgcatcattctttgatgatctttcaaacttgtgccatctgagatctcaacgctcattttgagtttgatatatatagtctttttctttctatcaattatctggttttatgtgatgctttctgcttttaaaatgtttctattgcaactcttggaaactctttatcttgataatggaaacaaatatgaatctatcgtgtagcttcaggtttactctacatactattgtttcaatgaatagacatatatgcatactgtatacactataagctaatttatatgttatagtgcctagttcatgtataacatataatgatcttaagacacaaatctataactacatatacacatgcatttgtgcctatgttccatctttgatgctagaccaaacctttttctttaaattgttagatctttctcattgacccgaatgaattttctggtttagtatatccttagtgggctttattcatttattgttggctggtttaaagtgagaagcgtttctggtttttcactaacttgttttggatttggagaaattatctggtttattggaactataacgtctccattaacaaaaagctgtcctctatgacttctcgagacaagaaaacactcattgggactaaacaccattatcctcaactgagactgttgatattcctttcttgcctttttgtacttattaagaccaaacttttggttcaaataaggtccttgagaagcgagaaagatagtagagagatctcgttttgctttctttctatacatataaaacccattaacctttctacaaagtgcagagaaaaaaccccattaacctttctaagaaagtgtagagatctcgtttagtagaaactgtacactttgcaaatgggtggaggagtagcagcagatgatctctcaagcgatcttgcaggtatctatttgtttctttaatctctttgaatatatttctctcactcatgactttaagcaattagcacaatataactagcctaagagaagaaacagattctctgcatttctaagaaaacagaggaaattttgagaatcatgcatgaatatgtaaatctattcacatattgaattttttttttttttttttacatattgaattgttatgtctagaaattttggatttttcagagtttgtaatggtgacgaaatcttctgcagaggatggttctgtttttgaggttccttgtgattcaggttttcagcaaaaacctgcagcaccagtagcagatggtttcttaactgatcctactggtaagtctctctctctctatatccaactttttgaatatatttctctttcataaaaacagaacatgaatctttgtcttgcaagtagtactactgcagaatttattccatataagaatttggtactatgcatttctgaaaaaatagagtaacattgaactgttttagagatgtagtcaaagttctttagcttaataactaaaacaaatgttccttactttcttgaaaaattgagcctataaaaatggacacaaatagacagctagtgagaatcatgcatatgaaaatgtataaagatatactcaggtcatatttttctgaatgtaatgtttttgtgaaccaaagctgtttgatttattgatccaccccacacagtgaagataccctaaatcagtttatctttcatagtttgacatgaataatagtgacagaatctttgtcagaggatggaccagttttggaacttggtttgacagagtttccaatgttttcagaatctctcccagaggataaaccggttttggaggttgctttgacagagctgccaatggtcgcagaatctttgccagaggatggttctggtttggaggttacttgtgatttacgtttggagcataaacctgcaagaaccctacttttggttggacgttctggtaatgggaaaagcgcgacagggaatagcattcttggaagaaaagccttcaagtcaaaaggccgtgcatcaggggtgactacagcctgcgagctacagagttcaacgctacccaatggccagatcattaacgttattgatactcctggtaatgtgtatgaaacaaagaactatcaagccaatgagtcatcaatgatacttaaaatattaaaactttgcaggtctgtttagtctgtcgccatcaaccgagtttacgtgcagagagattctgaggtgcttctctctgaccaaagaagggattgatgcggtgcttcttgtgttctccttgaagaaccggctcacagaagaggagaaatctgcgctttttgcattaaagatccttttcggaagcaagattgtagactacatgattgttgtttttacaaatgaagattcccttgaggatgatggtgatacatttgaggaatatttggaagactctcctgatttcaaggttagtgtaatgatcgttgaaacatcaggcagaacattttcacatcttgcgtctcttattgagttgtgtatggttgtaggaaattctcgagccatgcaatgatcgcaaggtgttgtttagaaataggtctaatgcccctgtgagtcagaaagctaagcaagttcaggagcttcttaactatgttgaagaaattgcaaggttgaatggaaaatcgtatatggctgatttatctcacgagataagggtgaggaaaaaattgaaatgtatttttagtacacatccctagttgatgtcctttgattgcttatttgttattacatgtgcttctcaggaaaatgagactgcattccagataaagcagcaggagattctagagatgaagggcttgtacacaagacaagagatgcttcaaatgaagaaagatatggagaagtcttttgaaaatcagcagctcaggcaaatgatggagagggtaatgtgttatggagttttcctccatattctttctttactacatgttatattgagtcatgaatgtgataacatgaatttacctagctttttcttttgacacttcataatcagattatttgtgaaggagagtttttgtttaatgattcctttgtaacatgtggtcatgcctatgaattccttgcataggtggagactgagctgagagagacaaaagagaggctagagcagcagctgaaagaagagaaatctgctagacttgaattggagaaaagagcaaaagaagtcgagaaacggtcaagtgatgtagtaaaggagctgaacgatgagcaagctaaaagacttgaatcggagagtagagcaaaggaagctgtgaaacagtcgaatggtgtagttgaaaacctgaataaggaactggcaaggataaaacaaatggccacggatcttcaaaaatccaagcagtggtgcatcattatgtgactgatatagttgaaagaccaaatttgatgctggatcaatggagtgattaatgtttattctcgtctagatgttgttggtttcttgttactttatttgacagataattttttatttcaagttggattggttttctgctttttctacactttactgattatgcaaagaacatttatgttcaaatgtagtagaaaaatagcagcgcgattggaccgaccaaactcggtgaaggtgttgtttatcatttacattaggattatgatgtatcaatggcctatagtaagggtctttgatactaattgatactcctagtaatgtgctatgtgtgtgtgaatctgaaaccatcaaaccagtgagtcatttatgatatatttacaatctttaaaccttatgcatcttgaaatgttgccgcaggtatatttagtctgtctccatcaaccgagtttacgtgcagagagattttgaggtgcttatctctgaccaaaaatgggattcatgcagtactattagtgttttccttgaggaacaggctaacagaagaagagaaatctgcgctattggatttgtccatcttttttgttaactcggttcaaaacctttttccatatacaattagtttcttagttggagactaagctgacagagacacaaactaggttagagcagcagttgaaagaagagcaagctgcaagacttgaaatggagagaagaacaaacagagacgagaaacattcaagcgatgtagttaatagcctcaggagggatctcgagagagcggaaagaatgactttacaagtaagaaaaagttccaaaaagtgcatcattatgtgattgatgttgtgatcgaaagaacaaaatttgatgctagatgaattgagtggtttttttttcccttcttagttattgtgattcttatctttgagagatattgtttcagagaacactgtttctatgcaggagttactttttctgcaggttatctatttcaggaatgatgaaagcaaaaaaacttcagagattcttgtttagctttgatggattaatcatagtggcagcgtcaaggttcttaattcaggcaacataaaaagacaaaagagagatatagcaacatgattggaccaaccaaagattgttatctttctcttagattcctttcttgtcagactccttttacttctcaaagttattcttttctttctctttccttttatggaatgaatattctgttttgtctctataaattacaaaactatttctttgctttgtaacttgtgataacagttcttgattattttttacctttctttagtcatttcaagaaccatcactagccattagcttttctttagggtttagatttgaaaaaaatggtggtggattcgtctgcacttaacgtggagaatgattggaaacctgagagaactctagttttactcggtcgaacgggtaatggtaaaagtgcaacgggaaacagcatcctaggtaaaactatgtttcagtcaaaggcaagaggaaaattcattaccaaagaatgtaagctacataaatccaagctaccaaatggtctaaccatcaatgttatcgacactcctggtgagtttgtttatcaattcacacatattcttataacatatatacactacaatgagattaagaccatctctaatggttgtctctattttttcttctaaatatagaggaaaaaatagaaatctctatttttactcctacggttcctaaaaaataaagatatctatttgttagaagaaaaaataggggaaaaaatagagatggttgaaataaaatagagtcaaaaatagagtatatatagagataaatatagagatgggttggagatgctctaatataatggtattttcaggtctgtttagtgcttcctccacaacggatttcaccatcagagaaatcgttagatgcttacttctagctaaaggcggtatcgatgcagtgcttcttgttttctctttaaggaatcggttaacagaagaagaacaatcaacgcttcgtacattaaagatccttttcggaagtcaaatcgttgactatatcatcgttgttttcaccaatgaggatgcacttgagtgtggagaaactctggatgattatttggaagattgtcctgagtttcaggtttgtttcatgatctttcaccatgagaggtacatgttgtatgattacatctttataacttggaaaattttctttttatataggagattctcgaagaatgtgatgatcgtaaagtgttgtttgacaatagttataatgcccccgtgagcaagaaagacagacaagtccatgatcttctcaacctcgttgaacaaatctcaaagaagaacaatggaaaatcttatatggctgacttatcacatgaactaagggtgacaaaaagttacaaaacaagatttcacattttgtatagtgttaaatatctgagttaaaatttcgtctctttggttctaggagaatgaggccactataaaggaaaagcagaagcagattgaagaaatgaaaggttggtcttcaaaacaagagatatctcaaatgaaaaaggaactagagaaatcgcataacgaaatgcttgaggggataaaagagaaggtgattaaattcattcattggtttatatgtaacgtgtatataaatgaataatgtcatcattacaagttgttgttttctttggttagatctctaatcagctgaaggaatcattggaggatgtgaaggagcaattagctaaagcacaagccgagagagaggaaacggagaaaaagatgaatgaaattcagaaactatcttctgatgagatcaggaggctaagagaacaactcaacaaagctgagaaagaaactgcttcgttacgcaccgaactcaacaagaaatgtactgttctttgatcatatcttaaaatgttctatgtatgtatgatatgaaacaataaaccaaagtcttgaaggattattatactaatacttcattgtactatgagctaataatacatcaaaaacatatgttatgttctctgttgttaagtaatatgtaaatgctatgttttatggtcatatgaatcactaaataagataccatagaatagatactatgatacgaagcaataaaaactagagtatgtcttaatcattacacaacacaaattgcaatgagtcttgaaggaccaataccttcattgtactttgaattattttgcaccaaaacatattttatgtagagataaatctgagcaaagaatccccagatgcatgcagagagttattgcagctcggtttttcgcagacgagattatccgagatgaagaattttcttgtcgggatcagagtaagaacctccattaccagatccagaaccagcagtcataatgctatgagcaaagtaattgcgtgaggctaaagcttcaattgcattaatctctgaaccactaaccatttgatgatggtgttgttgatacctctccacttctgctacctgttaagaaacataaaaattagtataacaagtgattgattcgacatgtctatggacttcacacacactaatattaccttagttcttagatagatgttctcattgtcaagctcaatctcctgcaaaattaactataccatattcaaagattcacacaattaaaatttagagcaaccaacttgagctttgcttacccttttctgcgcgttttcgatttcaactaaaagcaactcatgctgtttttcacaagagcagatttagaatatgtattgtataaacatagattcatgaaactgatgagtcttgtaatatgttttagatgtataccttcttggacctgatcctagagatagctttctcaaggcgattctcaacttgttttagttccttgacacttaaggaactcaaagagtctcccatcagattcctaaaacgttattaaaaatgtgttacaatcaataaatttacatatatatatggctggaaaagatggtaaaatatagttcagatatatataaaacctgttggagttttgaatcgtttggatctgttgtctcagcttagcagattcttgttgatagtactgtatttcaagcatcatcaaactataagaacatatatgcatacgtatgtgatgttagtgaagtaaagagatggagacaaaaagtgaaaccgcggcattgatttcttggacagtgctagtgttggtgctatcagaacaagctttcttgtacctctcaatggttgatcttatgctgtcacaaataacaatccaattaagtcagaaacatagagtacttatgcaatttattagcaatgtggtagtctaattaattaaaaattagtgtctaaagaacaaatcaagtatattatggccaccattttttatttgtctaaacgtaaacacagataaacaattagaccccaattagtctgagctaattacaccctaaaatgttttaaaatatataagatctcatgaattttgtttcatgttttgtcaaaaaaaacgtatatattaaaatatttgcatctgtagaaggatcttaatagtttaactaataaagtaattaagaagatcatcatatatgttgcctgtatcattaacaaattacaaacaatgtatataaactctgaataatgtggaacaataataagttttttttgtattcaaatatgcaactttatttaaaaattgggttgtaactgaaggacagaaagtggagttgatactatgtgtcatgtaaaaaaggaaaaaaagaaactgaatgttttggatatataatatcgtttgaagtgagtgactttaaaggaaatggatataagatgaaagagccaaaaaaagaaaggagaaaacatgaagcaatagactgatctgcttaagatgaaagaggaaagaagagtacaacaaaactacatgacatctctcgctgcacaattgttttaagttccaagaaaaactttgacaaaagcaaaaaaataatcaaaaagacttgttgaccaactgcaactgcaagttagcttgcatgattttggtacttaaacccattgtactagatttttctctttctctatctctttaagattttctttttttgataacctggcttttaagattttcacaagatacataggtaatatatgaaaaatagtatgtatatatgatgtcaaaaaaatagtatgtatatatagtactacttttggacttgtgtatatttatgtttacttttgtcaaatatgaaatattcatgggtatgcatatgtaaatatagctaaaagtaaatatagactcatgaaattgaaacttcatatgtacatgtatatgttatttgttaagaacttcatatgtgggaggactccaagtgtggttcgcatcgagataacatcgaggatataggaatttataattatgctaggaaaagtttgcatttacatgtataaacgtttattttttctttgaatataatttaacattaaattcaaaaaaaaaaatgtatttgttatttgttatatggtgttgcttagtgtagattttttttttttttaaatggttcaacctatagagtatagaccaaaaaatctcatctctagatcaatctcttctatattttatctctattattttgcatcattttacttcataaactaagacacctatacgaaaatattgcaaaagataaatcttttttgtagctctaatgtatctaatggtagctcttatagtaatgatgcactaaattcatttctcaaacgatcacaaacaaaagttggcacatttttcaaaccttatatgttttattaggatatttatggttgaaatgaaatggcttacttgttattggcgtattcatagagacggccacgagtggagaaaacaatgagcgcaacttctgcatcgcaaaggaccgaaagctcataggctttcttcagaagtccatttcttcttttgcaaaacgtcacttgtcgatttgttgagttctctatcctctttatttctatctttcctcttcccatccttcattttaaacatcaaacaacacttagaattgctcaatttcggcagtattggtaagataaatattaacacacaaactagtggcagactgcaagaagataaaaaaaaaactaaagctagggtttgaattaatgtacttaattaatacataccaaactcgacttttgttatatatattaaaaaaaaagttttctttctgtatccaactttctcgggaaattcaattaaggatgttgttgattgatctcaaggacagacaagaatcaactgaatctgatgttgttggaactagagtttaagaatttattcaaattacaagattattaatatatattacatgtaattcttgttagctagataggttctatatgtattatctatatacttaactaactcatcaggaattgtttttttaaagccagggagataaaatctgacaatatattacatggttttttggtacccagatacaaataattttgacccatcccgtgtactatctccctccctcttcaataaatgtctataaggcttcacggggtcaaaatggaaaacaacatatacgtaatgatcttagatctggaagatgtaaatactttagacatatgtaatatgtcttacaaattcattgatctgatgtatgtaggcattcttacgcattctttagtttgttttcacagagcaaaagattaaataacttttgataaagaaaaaaaattggaaatatggagagagaaaacaaatcaaattgatattgaagaggaagaagaagaaggcactgatgcacatgaaactgaagttatagtacataagggaaacacaagaaacattattacacagaaagaagagagagacaaaaccatgcttagtttcgagaagagaggaagaagaaatacaacagatttggaagattttcagactcaaaaactccactttagctgacaagaaaggaaagagaatctagcagagatctacatgtgagaaactaaaaaaaaaaaaaagataacctaattcttaatctggtgaccaaataaaacccttgtgatctttctttctctttctttctttcatggggaaagagcatcaaacagaagaaagtaacaaaaataaggaaaataattcataattgtgaaaattaagttttctggagagacaaggcaagaaaaaaacccatgatgacaagaattattacaagcttggaatctgcatatatagagatataaatgtagagtttttgaatgaagagatgtgtacaaagatgggaacttgatgagatcaagaagtgttttcctttatgagaagaagaagtaaagacatgacagacagacctgagaatttgcttcacccaactcaattcagctttcggaaactctctttctctttctttctcctttataaagaaaacaaaacaaaagaaagaaaaaaaaaatgaggaaagtttattttgagttttttgagaatcccaaaaacaaacccaaattcttttctcttcaaaaaccctaagcttctcactcaatatgtctatttgtagacgtttctttctttgctcaccttccaatgtccaaagtgagattgcgattgctgcggttgcggttgccacttgccaatgcatttgctatattataaaaaaaaacctgaatcttaattttgaatagaaaaaattttaagaatgaaaggaaaaaataacgagcaaccaaaaaaagttattttaacctttcttttaagctaaatcgcacatataaagtattagtagtatttaagattcctacaaaactcttaagtgtgagtatttgttgtttaattcttatttttgtagagaaatggagactctagctaagctacatgcgccatcatttcatactttggccaagttcacggcaagaccaagatttgggatctccgaagatgcaattatattaattgttctaactttcattactggatatataatgaggtaaaaaaattaattgcatggtaaaaaaaagtgaaataataaaaccatggtgtttcagtgattaggcttatcattatgaatttataatctcaaattttgcaattgcaatcacggtttttttaatttcccggttacaaagaaaacttcaaaaaaaacatttatatagtttcactaaaatatataaaacaataagaaatagttttttttttgacaaagaacaataagaaatatttatttcattcttaatatgattggcagtacattaaggtttaattagttcataacatataatattattactaaaattttgaaattatttttaaaaattaattctaagattgcgagcagtagaaaatatatagctcctttcttaagcgacattttgtattttgagacagtcaacattttaccacattattgtcttgtaatactttctcgttattttcagttttttgatgattataataattaatctcctctccaaaatggtaaaaagaaacaaaataaggaaaaagtaaaaaaaaaaaaacattcgttaacttttttttacaaccattttcagccatatgtaaggaacatatttgaggcataatttttgtaattggaagaatccatgacctaatcattaactaaataatacatgaagtttaaatttgcaaattaaagcgtcgatagtgaccaacgatgaattaatagtaaaaatatgtgagactgttagttaatagtaaaatagacgaaccctatcataaatccaaaagaaaattatgcaccactcaaaatatataattgtaccaccactcgttggttattagtgtttttttttttaatttagacatgtgtgatttatcatttatacaacctaaccttttacttaacttaaacattttaatacatatacataacttccacgtaaatgtacgtacatatgtttcattctttcaagaaagtgagaacatacccaacaaaaacgaaatgaaaagttgacagataaatgtgttatatatacacctacatattgagattaatatatgtataatgtaaattttgaaatgatatataatttatatattgagaagcaaatattaaaatttaagatttctttggtggaaaattaaagagaaaggtgaaattgcagagcttaatttagggctcgaaagtgacacgcaaattgtattattgcagaagagagagacagagagagtagatgttgacgttattggtgcatctcctcatttatttgccctagctagtttccatcttctctttgactctttcttaagcaaaattttgtttttattttccttcgtcaatcacacgaaactctaaaatccaaaaacccttttatgtattactaagttaccaaatataagtcacccaaattattgttacatcaatgtttagactacgctgtttaggaagtcaaatggctctttcacgacagcctaaacattaattaaattcagaaatcttactttagatagtttatttttgcgaataatattataggggcgtagatagattccatccccaatccaacgatatagtatatggcttaatataattaatacttttttaatatggttttaaaaatattttattaaatagaagatttaaatctatatacacatttttgcagctattttaacaaataaatcctggatttggacttatttataattcactgccattagcattaaatctttctccaaaataattaattttactttaaattcttgatttaaattgttaaccacattatcaatcaaatttaatccaaacaaacttcaaatcaatcccttaaaattagcataaacatatttgttaacaatattttaaaacaaagtttttgtttaaatttaaataaataaatcatgtatttgaacttatttacaatgtcatgacactgacattaattatttaggaatgaaaatatttaatcttctaaatccttgcttttagaattattatgtcattacttaaaaggctcaaaatataaaaactttaaatattattatttatatatctaaactttataaaacattattaatatttaaacttataaaaagtttaatatatcatgattttttaacattattatataatatataaagtttaaaaaaatcttaattctttccgtcatattttgtgactcaaaattttaaaaatgaacatatattaaccaattggcgaaaaagtgtgagttctacgtcccacatcgactaaaatatttagacaatgattcataaacatatcataaataagattaacattaataaaataatggtttttttacaggacgggtttggcgggacgggtttagcagaacgttacttaataacaaatgtaaactataaaataaaaatattttataaatagttagaatttgcaaaattttatatataataactttaaaatataaattgtctccacggtgtaccgcagattaaaatctagttttttaataattttctaaggaagtcatggacctttgtcattcgtttatttcggttaaccaaaaattcacataaaaccaaaaaaaagaaaggatttagaatctttcttaacataatatatataaactatgtacggccacggcaatgttactaattcaacgtatttagggtgtgatattggttggggttgttactgaagtttttaactataaaattggctgcaagaaatttgattattgcaacttgtttgttgttaactatgacaaaaacaatgaaacaagaaaatatgaaccagaaataaaaatttgaactttgagtaacgttaagaaatgtgagaaattttagtaaataaaaaaattgattggtaaatcttccctatataattaataaacttatatcggtctttatatcaactcttaattaaaatataatgcctcaagatgtttcctaaggctttatatactagttaatcaaccaaaaaaatgtgattttagttaggttgaatttacatatgttttcttgtaatcgatcattaaaacaaagttgctcttcttgtattatgttcagacaacttggctgtattaatgacgagttagaaaagatgtagaagttgtgctcgaacttattttggaaacacgttttcataaagttaacaccaccggtctggcctaaacatagcaacccaataatacatagaacaaatactttttctttctaaacaaaactaagaagaaaatgattcttttctcctatagttttgtgtataacaggttcatcaaattaagtcttttagcacaaaaataaaacaaaagagatcatgtaatcgaggcaaatgagcttttgtttgcgaatttaattgatagagaaatagatacttgagaaaaataaaaaagctactagagaattgttacaaccttcatgttcacgaggatcttgtttctttttgttgaaccaacacatcaaaatcactcactgtccactcagcagtttcttgtctattgctaacatatatatctgtaacaacattgatcgatgtccacattcgctttgctggtttggttcccgggtactcctgtctacaaagacagattagtttaatgctaagtccaagtcttaagatatgtgcacataatcattataacctggtagaagtagagacggcttgatagagctccattgacctcccaagttcttgaatcaccaatccaaccatttccttgcttaattctcgggataaaattggctgtttggtcctgtggtgggtttataatgttgtagagaacattatagagacaaagaagtaaactaaaattggattctacaaactttaaaagactatttataaactaagtctcagtaacttcttgtacacgcaactcgaaatggtatgaagtatgaacacaatgattctcatgcttcatgatctcgtttcgtagagaatcgcaaaataaaatgacgaaagtaacgaatgatcggcgagcaatacctgcgaggatcaggcaagagagatcggcgcaatcagcgagtctagggttttccattgaaggagcttcgttatcaacttcattacagagattccaaacttctaatacgattcttcatccctctgtctcctaacgctgagacatatctctccgccgcgcagttttgaacggaggaagaagaactctccggtaggagaagcagagcaagcaagagtgaaatcgcaggcattgaaggagcaaacttaaaagcgcgtgaagttgaaggaatggtataggcgcgtgagagtggagaaattcgcgcgtgatttattgcggtaaaaaggtaagatgtcgcattctggaaaatctgaatgattgcttttctctgcttttggaagaatctcatttactccgtttagtatttatatttacatccctacactcttcataaattacaaatagacatataaatttcacttaattacaaacataacccggtactttttcacctagagatattccaaaaagcaaaaagaaacgtcattttcagaaacagaggaccctctgtttcgttcagtgagtgtttgagctgtctctataggcaaagaaacgataattggggaccatatgttcttctttttccagatgaagacgaagccttttagtccacgaagaagacaatgtcttctaagtggtggaacattttcctttcttcttctttaaatctttctgattgcctcttaaattttctgggtccatggcaagtttgcaccttggaggtgcttcgttgatcaatgaggtcgtttttggctcctccttgattggtttcagaagtaaacggtttaaacgagcttcagaggttaggttacaagcaaagtgcaaagattctaattcctttttgagttttttagtttaattattgttgatttgttgtttggtattgtagagatgtaggttttgtgttcaacaaatgtcagagaatgaacagagaactaaacacgaactggctcgttctgctaaaaggtgatgactttgttctctatgtgtgatttgtgttaaacttcatcactcattagtgagtaatgtacactgaactgtgtagtcgatttgagctagttatgataagatttgtgtggttctggtgatttattttttcatttagtggttgttgctttgaaaacgtttgttacagtttcattagcagttttctcttttgtgacatgataagttgtgtaatagaaccgtaccaaatgcataagaataatcaaagtttcaatttttggataagtttggcaaatgtttcatagaaatagtttctctaatgttgcagaagcgagtctttgagacgtattttaaagcaatatggagtatctgtagaaaaccctgaagaaagtaagacaagtagtagacttgatgacctagattgtgaagagaagcacgatgctgttacttcttctgtcatagatgacgactctaagatggtatatatcacagaacttctggatttgtacttgatatatcttgtcacttgaatggtattatatgaaatggggagattctgactctcattagtctttggaaaattgatgagtactgacagaatacaactgaggagttgcctgatttacgccgggtagagaaatacactgagactgttggtactgcagataatctttcaggacaaaatcaccaaattctcccccatgtaagaacatatccctatagatttcatgttcttgtcttattggaacccttttagtatattcagttttcttactgtgtgttttggatccatgtgtttaagtgatgctggaggtgctactataaaccctttcattagattctttgtagatctcaactcaaattagaattgcatattcttagtttgtttttcaactagtaataatgtctctctttagttgaacacaggtgttttgttaacttctctgcttcctgttcttggattctgcatcatatgcataattgggacgttacacacaataatctccagaaagacatcacaaggtcatcatcatggctccgaaaggtggagaaccgcattaatggattggaacgagccgcttgcttctgatggacatgattcgatgtctccagaatacagagtcagttacatacttaagttctgagttgtattcgtttacagattttttcctcggtttttaaagaagctaactgcatgcaggtcgcttcaacgaatcaggaagctaccgctactgatgaaatgaatgaagcatatagcagagtagagctcgagtacaagagatttctattagaatgtggggtgggtgaatcttagactctggtctccttaaggctcctacaagtagttcttgagcaaatcatggctactccagagtctctaaggactttttgtttggtgattactgggacactgcatgcatttaccatataagactttgtaattgtgaatataaagggtggttaaatgcgatttgatttggatacatcacattgtatggagcaaattgggattattaggtaaaagcttgattgataatgaaatgaatataaagtattggctctacggaagtgaaaaaatgaacagaattacaaaaagagaaccaaaaccgtgcgcagcagagtttctcaaagcaaaggggtaaaatatccattcaatagaaacggttctggaaactctgcaattttgggagaggctcaattaaagccgtacatgtcaaaactcttgtcgtcaggtggtcttgtgttgttgccaccttcaggtactctaaagctgtccattggaggtggccctgcggcagctggtgccgttggtggcacccaatgcggggtggtaggaacagagaagttagatccagaagcctcttgatgtaagacaacaacattaggatttgcttgtggtgagtttcctgtggttcttcggtttgaggaatttgcagaagctagagacgatggatacgattgttgttgctgattcttcattggtgatttgggccgcagcgattctatatcgggagtagtcacaacaagatgcggtgcgtctggaggtggatttcttcctcctcctcctagccacactttaccctccttgtctgcgaagttcctcacataagcctaaagcacacaatatccaaaacagatcaaacagtcaaagaagctccttgcataggtctaaagctcatataaacaggaggtggatagatgtctacagagcgaacatgagatcttacctgtggctcaaagtttgaggacgaaaggccttttccaacagtaagccagccagctcgaatattgtggtcttcaccgaaaagctcaagcctccggcgaccaagtgcaaaatgctctattatcctatacatatcttcaggcttctgagtcgaacctggagttttgcaacgtaaagaaatgcagttaagcaaaccagcttgcaataataggaggatacaaattcactaatattttagacatggcaatgctaaaatcaaccacagaatctaatgtatttctcaatgaaccagcttacagtgtggataacccaagactaatccagcaaactaatcacgtgtaccataaccgagagccaaaagaaacataggtctttgttttcgagaacccaaaaccttgcctcccaacactagtaccaaatacaaaaacactcgataccttaatcacattaagcaacgatcctatttatacacaattgattgctgatgtactagcatgctcactttaaaagaaacaggatgctggaagcagaacagagagaaggaacatgatatgacaagcaagacactctcgattttatcagtctatcaggaacacacattttactaaccataaggaggctcttcagcaataattacgtcagtgtcgatgttagcatggattatatggccatcagtgctacgtcgaacagtaccctttatccccatcaagcagtgctcctatacaaagagaaaccaatacaaaagattaagcaaaagatatgcaacacggaaaacaaaagagaaggcaatggcagaccatactggaccttggaacgctgaaacacagtacgagaatcatgtcgcaatgttggtgctgcattacttttgttggttttcacccagcaaatgtcttcacaccttctgaaaccccactgtcaaacccaaacaaaataaatacagattaagtacatactgtcaagagaaacaaatccaaaacaataaaggaaatgcgatttggtttggatcctgtacctttttcaggcattggcgcccttgctcaagcccaacaccatcaccaacccagaggaagaggaaggatggagtgtcagctattgcctacatatacatggaagaattcacttttgttataaataacaatgatggcaaacaaccttacctacaaggtctacacacaagttaaaatactatatgtttcgtaccagctacatcatctaggaaaccgtacccacaagatttacagacaagttaagttactatatctatatgttgagtaccactacgtcatctaggtaactttacccacaaggtcctacacacaagttaaattactatatgttgagtaccactacttcatctagataatactcagatgacagatgatatatgctaccccgctattagatctattgctaagcaaagagcaattgaagtataccaacgagcgaatgcatgtaccctaaaatcctatgagtaattgaagagtgtagaggatagtcacctcaatcttgagattgataatgtcctcaaatgtccaatactccatactatcagaaacaccaggagctctatggacatattcctcccatggtgggtcaacaagaataacatcaaactttgttccaaataactcgggagataactcaacttcatgcaagtcgcctttcagatacattggtgcagaagcagaattagatacaatctcatccttcttctgtatgagctctctaagcttggggtagtcttccacattggtaagctccagctcccgaatgaaattctggggccgcattccagtatccacaaagttctgggaatagtcattttgctctcccctagaaggagctttaccaggaggtccaccacctcgaggaggaacccatccccctgaagtcttatcagatggcattccacgtcccatttgtccagaaatattggacccaggaaagttaggaggccctcctctatcagaacctggtggagtaaagaacatattcgggtttggtggtgtgccgattgaaggaaatcttgggcctgatggtccgggaggaagaggtgaaagaacaggaggaacaggtagcatattaccatcaacacctcgggccccaggccatataagagttggggcaaatggaggcatgaagacaggggtgacagaagtgcccggaattggcgacatgccaggagtaagagaatgaatgggactgggtggtggcattccaaggtttgcaaatggtgaccccatgataggcattggaatggcaccttgttggttttctctgccaccggcaggtcttcctttcccaccccttaagggtctgttccctctagtgccttgtggagtctgataaccacgattaggggtttgcacaaaattagttctaccaggtgttgaacctctctggtttcttgctttagcccctgagtaatcagaactggcttcaccagcttcatctctcgaatcttccccataagacccaaaaccaaaagtttcacttctctgtctaccttcctggttgtgagcccactcttcctcattattactaggttttttaggaggttgctgaccagattcagtcatacgagcaaagttgggtcctgattctcccctgacataatcatgtggcttggtttgtatctcaatcacatcataattctcatttgaaacgccaccactggacaaagctttaacagcttcccccctgtttccatctttcctcccacccaaacgaccatgagacctctctccttcactcctttcacgtccttgcctaggaaattcccgttccctaccacgatcataaagcaagtccccatctttctgatctttatcaccactactagaatgccttctcttccaattatccttcaaaccttcttgatctctatccctatcagaccacccatcatccctacctctagacctctcatcttttcgactatacttctccttctcataatccgcatccggtgttttcgacctattagatcgacccacttctctaactacctcagaaccatccttaccactagttttcttcaaaggactacctctatcatcatctttcacaccacgactcttactcttctcatctctactactagtcttcaaactcctatcagacttcaaatctctcctactctcaccatgttcattactaacactaactctttctccaccactatcatgtctagaatcagaaagcttactacttttatgatcaccatcattaacaagaccacctgcttcatcccatctcttcctcttactcgaatcagaagaagatccatgtgttcgttctctcccatctctttctctcttggaatcacgatcttgatgctcaacatcaacaacagacttattatcttctttgcttttacttccaccacttcgagaactactctcaaagtctgatgctttaagactcattcttctcttctcacttctatctccaccgtcttgctctccatcttgataccaagtacttagcttctccaacgaactctcttcttgtttcttcttcatttttttgcgaaaactgtgctacaaaaccctaaacccacgaaattagggtttcgacattaccacgatcaattcgggttcgattttctataactgagtttcgttacttaaaacatccacaatagagtttggattttcaattccaaaatcgtttcgagattacagatgaaaaatttgagtttagaaatgaaattagagcgaagaagatcggaaaatgttgggtcggagaagatgagtgagtttgtgagagagagagagaacacggcgaagtgcgaggaacacgaacgacatacacagaagtcaaaatggattgggtgaagcccatttactccaatttacctagtgtctaaaaattgtgttattgggccaagcccatttattccaattcacctaaacaaatggggaaaattgtcaaaaaaatcacgaactttcaaatttgggaagatttaatcttaaacttcacggaagacaaataaatcgtaaagtttttgttgattttcgaaataaatgacaaagtttttgttgacttcccatttgagtcatgtcgttaaataggttaacagaattattttacggcgttaatgtctcgtgtatatgctctgttagaacaaaacgacgtcgattattgagagacaaaagaacgtcgttttgtctgttaaaacaaatttaaaccatgaatctccaattcgattttattatctgcgattttgaggtcaaggtgggtctgtgatttcgagataatgaaatcgatttggggatataaggtttaaatttgtttcaagacaaaacgacgttgttttgtctctgcaataaacgacgttgttttgttctaacagagcaaataaacgagtcattaacgttgtaatttctttttgtgaacctatttaacgacatggctcaaatggcaagtcaacaaacactttctcatttatttcgaaagtcaacaaaaactttacgatttatttgtcttccgtgaagttcaagattaaatcgtcccaaatttgaaagttcgtgatttttttgacatttttcccttaaaaaatcccttaaaattggctatttttgtaactttacacaaaattatcatatgaaatacaaagtaatacgcaatatagtcttttcgttattgtcataaaattttgataaataatatatcaaatcgaagttctcgatatgagtatttcaactatatatttagaattttcaaaaacaaaggtatgagatcatgaaaacgtttataatatatgtaaagttgcaaaaaaggagtatattgcgtactattttgcattttataagattattttgtattttttggatgtagggagtaaagttgcaaatattggcgattttgagtttttttgcataaaacccttgtttaaatataaaaatgattggtagaaatttataaagtttctaaagtttggttatttatctttgctcaaattttagtagtttttgttttactagtttattatatatgcatacagttataaaaatatatgttatatattacttatacaaaataaatgtatcgtaatgtctctacataaattgatcaccacgactcatagatgttcacgtttaccgtttgtagatcaattttaattgatgttatgtgtgataattgattttatatgtataactaatgaagctagattagattagattggatcttattaaccggtcttgattagacttttccatcggcattggagtttggttggtggtatgtattgtttttgtttgtgcaaaaaccttgttgtatacgaagtgtttgagcatagatataaatttgactgttaatccaattgttcctttgatatacatctactctccgattgttcatgatttttctccctatactcgttaatcttcaaagttcaaacttgcatatgctactatctccaatattatgccttatgtaaatagacatcaaaataagatttcaaccacgtagttttggtgtcttgggcgttttggctactataactaaaccaattcgatgatttggccattataactaaactaatatatcaaaggaactttcgttaataaagccgaaaatgataatatcatcgatcttaaacattggtctagccgattggcacaaaggtcggctctggtctaggtcatcgatccttattctaaaatgtgaacagttctagtttccaccaatagtaaattacaacacctacaatttaactgttaccatagttaattataaagtcaaactttattctcatctacaaattatcatatttgactttatatagtaattttataaccattagacaaaaagatccaacaaaaatttcattactttattataatagtaacataagttttattatgggaacctcctgtgatattgcaaccgcaccacaaattggttaaaaatagttaaggaggttgtctgtctgggccgcatacactacaaagacacctcttagcatctttaaattggccgtagcaatgaccaacagtatactttcctggccatttttgcttacacatacgatcacaatcttctttaacacattttccagatttttgagataaaaacctagaacaggtagttaatttttctggcgctactcctgttatttttatatatgaaacatgaaatctcagttttagtaatgaaaattgtaaagaattagcatttttctgttgcgtgtaagtaaatgttttgaaataacaaatattttcttaaaaaattctttaattatttttaacaaaacacaaaaccacaacagtgtaattaagaacagttatattgaggtaaatttaaacatgcatttagttgtccttacacaactcttgttatatggtttaccaaacaaaagaaaatgttttgaaataacatatattttttaaaagaattcattgaatatttttgataaaaccacaacattgtaactgaagagatttatactgaggtgattttaaactatcatataaatttataaaataaaaagtgtagcttaacacactacgtatgggaacgaaactaaaataaaataagaaataatatgttggtgaaaaaaatcaagaaaaagaatttaaatcagtaaaatcaatttctaatacaataataaacacaaatatttataatgaaatgaccaaagttttgtcagagaaacacacacacatttgagggttggtttcctagtctaattgtagctcaatttttctaggtctattatgaagtttctatataaaaagagctaaacccaatactatggaattcagcaaaggtaaaaataattatgacacaaagtctatacaacatagttgaattgatagcttgaagaaataatatggtattcaagtttatcacttttagaacgactacatgtaatatattaaaatgattctaaatgaatttacatacctatcacaagaatggtgaagatagttagaacagtaaacgtgaatagaaatgatttcttcatcttcgaaataaagagattgtattttaaaagtaagttaatagacagaaagaaaaagtgtacgtaaatataagaattgcatgtatcccatattctattataagctagttacctgcctaaattcagatatagaagaatgtggtcttacacaatttcaggttttttgctcatctcatatgttaaattaaacagttaaagccttaggactcgctcatcttgacatcgaatatatataggaggttaccctctctcacttctccttgtgtcatctctgcatccacaactatcatttaaccagttttacttacatgattagtttcttttatagaggagtatataaccaaagggtataacgaatatatgagttactacttttgtattttctcgtaacagaaattcattatcttttgtaatatatatagcaacacattaatattttttttatgaaacgagtcaatcaaaatttaaataatcactaaaaccaatttattttttaaaaaaaaaaataattcaaataaatagtttaaactcatagaaaaaatatataaaatcaaaagacttcaaactagttggtagagcaaaaaattgttttaaaacttatagtaatacataattaaaatactaggtttaagtgtttcaactctattaaaaaatgcttaaacaatttaccaattaaacaaaagtattagcaaaacataaagtcaaaaaatgattttaaggacttttcgagccagcccaaccttggacttagcccaagtttttaatttttatgttcatatattttaagtccggatctactgttttcgggattggtttggacttgcccgctaactttcgtcctatttgatatccctatgtagccttgtgttgttgccacttcctgcaactcgaactcccaattaaattcgtatacacttaaaagttatatacaattatggctacttaacaaaggtgtttactctattttgaatcggatactacaaatttttatcatcatataagagtttttttaattaatctcggtctgagccagatttaaatttctttttaaaccacaagtgagcaaagaaagttttgctaaaccttaactgacgaaaagcttcaatatttgatttcattaaattttggatcataacatggtaaagattaaaaaaaatatcagatagaaaacgataagactacccgaaatcacggttcaaggaggaagacgataagaaaagagacgagtttggtcttcttctttttttttgtcaaagaaaccttttttagtttcattatttttaatttttttttgccataacttaattattatatttttgaaaacgaaaagaaaaaatttatgcataatagagactcttgggtgattcgatgatttggccactataactaaaccaatataccgaaggaacttttgtgaaaaagccatgcacaaattattaatattatcagcgataagcatgagtttggcccgacagacgacagtctaaaagccagctctagtttcattcatcgtcctcaatctaaaaatttgaacaattctggttcccacaatagtaaaccacaacacctacaatttaattgtttttttgctaagaacaatttaattgttaccacaattaataataattttaaactttgttctcatccacaacccacacatacaaattatcaaatttgaatttatatcataatttaatattaaattactttattataatataatataagttttattagctaaaaaaaaacaattaaggaggacgtctgtctctgccgcatacactacacatgcagtttgtaggatttgttgctgggaagcctggcccaaagcatacaccactactttcctggccactttttgttacacatacgatcacaatcttcgttaacacattttccaggttttttaggtatcaacctagaacatgtagttaatttttctggcgccacttctgttatttatagatatgaaaaataaatatcagttttttgaaatgaaaatggaaaaaaagaatactagcatatatctcatgcgtgtatgtaaatgtttgaaataacaaatattttcttaagaaaatcattgattatttttaacaaaaccacaacattgtattaaagacaactatactgagagaattttaaacaatcatctaaatttaatttatagctataaaccattaaatttataaattgtatcttaacacactaatatatatgggacacgaaaaaaaaagaagagaatgttgttggtgaaataaaaaagcaagtaagaacattgaaatcagtaaaatcaatttatatcacaataattcattgtatatatatatatatacttataaatgatagaaattaccaaaatatatatatagaacaactatatattatgaaaaaaataattgagaatctgtttcgtagatgtaattaagctcaatttttctaggtatatcatgaagtccacaatttatggaatagaaaggagaaacataattagggcacgatcaaattctatataacatatagttcaattgatatcttgaagatataagatggtattcaaatttataacttttagaacaactatatgtaatattttgaaatgtatctaaataataacacaaacctgtcacaaaaatggtgaagatggttaaaacaataaacgtgaataaaaagagtttcttcatcttaaatgatagaaataaataggttgtcttgtaggagtaaaagaaaaaataaaaagtgtacgcaaatataagaaatgaatgttctctttattataataagtttctccctaaattcagatttagagggatggggtctaacacaatttcagttttttttgctcatctcatatgttaataagttaaagccttaagactagctcatcttctatatatagtaaattcatatgagttactatttttgcattctgtcataaaaagaagatcattatcttttgtgaggatacgtagtgttataagcaataacacatcaatattttctcttataatctagttgtatatcctctagattattaattatataatagactccacaacaagttatctacacgagtttctaccatttgagattgtataacgtaatatttacttggagatatgattaataatcggaaaaatcatccaacaaagataagtacaaatgtattgatttttcttcttctttgccatcatttatttgataaagtgaaatgaatatctcatagtaaaagatactgcacatcagcacatctttagatattcttaaaagacaaatattgtgaaaaattccatgagacactgttcttaaaaataagaatatatctctcatatgagaaaaggatgagacacatcatttggttaatgaacacaataattaaaggctttagagaaacaagtttcttgatgcttaaaggcataagattgacacacaacgtatgtattaaaatatatctctcttttcttcttgattaattgtatcatacgaaacataaaatggcaaaagtatatttgaagttttactaatttgatagaataaactagatcaatatcgaattctcatttccgcaacttcaaagtcctttgccaagttttcttgttattgttctttgcacttttctctcattgtacaatatcaaaagcggcgactgatatccgccggacaaaacggtgtaccgaagctagcccggtggctagggatgttgaaatgcctaagtcttccttgctgctctttcatgtaccctccacacaagaacgccaccgagaactcgtcctccaccggccggttaatatcgtgaacgaaaacatcagtctccccaccgtcataacggttacgagccaataaacccgcagtgtaaatagcgctcatcctccctggagcttcatcgtggtaaccagtgggagcatcgaccattatcacatcccattgcgtctcgtacacgtcagctggaaaacccttgagagacagagcacatttggaatctctaggatcagacacggctttgcaatcctctgttctctttagctccataagcttgttggaatctttcacttttgtgtcgtatacgacgtggtaggattccaagtttgggaatttcttagttactgtctcaatccaagcttcatcttcctcgaggaacactagcaatgtaagaagtaactttataaatgaaaaacagagatatgattaatctttatagatctgttgttatgaaaagcttacaagtgcgtccaccgtgattgagagatgcccacatcaagctatcgtgtcctaagccaaagacgaggaagttacaaggagacttcttgtccaagactctctttgagactgagacttcatcaaacgtttgttgtggtgtgatctctgaggtgacatagtgaaccaatgcgtcggatagagaagtgggcaatttggtgcattgttgtggggttgatgggcacttcgatttctggtgatattcgtctcgaatggttgcggttgaattggaagagaagcttgctcttttcaagaagagaatgaacaacaccaagattgagcaacaaatgaatataagctttgagctgatgaatgattgggatttattcctcatgttttcctttctctctcggttttagcgttttcgatatgttttgacaatggtgaagatggtgagagatagtcttgtgggtgaatagatgcatccttaaagagagaatgattctggaagttgaggatgacatgacggcgactaaggttgctgttgaaccagaagttggtggatctgttgtatattattataatgtctgcaatgaatgattggaacgatgtgaaacgtagtgggggaggctttgttatcaaactgatgcttgaaagagaagattcttataccaaaacacaaaaaaaaaagacatgtgttttgtcttgatatacaatatttaccacaattatatacatcacaagttttaagagaaagggccttgtatctatgcatccagatcctgcattgtcatatgtaataagttgagtcttttagaaaacttccatacatttcagatctaactttctatctaaagatctgggaacatgccagtaatttttatcaacttgcgatacctaccgactcatcatatattcaaaagttcagattttgaccatgtatgtaacttccatgtcaaccagtttctcagtattgttaaaacatgtggactcaaaagcttgtaccttgggaataatgatgtataggttctatggactatgcaaatgctgctgaagaatatgtcttgaagaggtaagccagaatcttctcgtaatcacctaattggacaccggtgtttggatcaaccaagaatggaacctgtaaattatattgagcatcagcagttgcagccttttgataagtgatttgtaagattgtagattctgatatagacaaagagcggacgagaaaatggaccttattggatcctgaagcatttagaagtgatttcatccgtgtggacccttctccaatgttgtgtaatacatagggaagctccagctcacacagtgcttcacgcaccaaccgtgaatactgggaaggaaaagaggaatcaaaaccgttggtcaccaaagtgtcaccaaagttttctccggaataggaaagatgatatgagcactaatagtgaattatttactccataataacaatgcatagatttaaattctcgagaagagtcttggatacaagaaaggaaaaaagcatagtaccgggttgttttcgtaagagaagagctcgagcattttaggtggcagatctgttgaagccttatcccacaatgacatgcctctacctgctcggagaagagttggcatccatccagtgaacaaggtgctggacaattctaatgaagtcagtgatacaattaaaacttattcacgctaggagctggagactacacatcccagatagtttgaccaagtataccagattctgagaatgctcacctttccagaagtcctgtggaagggcctcttccatttccatattgtttaaataggtactttacgatgtcacctaaattcaaagagagaaaagaaccgatgaaaagatatccagagaaaaacgacaatcaggtattgatgatggaacttacgactcaccactctcatacattaaagtttcagtattcgggtcgacgagaaatggaaacctgcagattttcattctcagaagtttaaagactgacgacagaaggaaaacaaaaactgctatggaatgatgaaaacgaaaccaattgacagaacaagaacgtaaaattacatctcttttccgccagatcttctaaccagttctctgtgtcttatagatcctttaggacaaggataaacctgaacaacaagtcaccaacaaatgtcaggataaactttgtatattgcttaatgagccatctctctggaaaatatgattcggttcttacttctactgaaaggtctagctcagtcatggcttcccgcactctccgacaaaagggacatgcctctgttatccaaaaaccaagaaaactctcacaaatgtaaaattagctttccactaatgctctttgtttacatggcactaacaaaacataccaaattcaaaaagctgcaatcgcaaaggcggattagaagagacatcctggttatctatactcccagttgatactcgagatccccatggaagtcttgcaacagatgccaatgaagaagttgcaacctgtattcatgccaaccataagataaatcaaaagaaattaagagctcttagtcacgtaaccaattgtaacaaatcagtaaaacaatattctataaacggctctaagaaagttcagaaaacgtcatcctccctcacaacccttctgctaagtctaagggaccatgaaacggtttacaatgctaatatccaaacaagctttatagaaccagtaaactaaaacctaaacacttccacaacagtcaaaccccattaggctcatgtcaaatcttattcaatgttttttttttctctgagttatctaattgacttgttgatacacatttggctgcagagccttgttttagagattacgcccaaaaacataagtgttgcaaaacatgaacataattatttgactaaatgagaaaacaactccatgaattaaaaacaggactaacctcgagagcatgattccgctgttgagaaggatcacctccctggaaacaacagctgagaaatattagagaaacaacatcgaacacaaaaatgaacaatacacacttgatgagaacacaacagcataaagtttcaagtaacaagagccaatcaaaaactcaaaattgcgaaagaaagaagcacttacagagaaaactttaagcaatggacagagaaaagacaagaagctagatgtattattactgctcgatttctgtgctgcttcctcctttttaccttctgagttactcgatttcacataaagtcttctcctttcgcgaacccaattcccgttccctgatattctcttcgagaatcgattagaatgaaccatggatgacggaaacgacgcagtcggatggcagagactgctatcaaccaccgaaattgacattgttcctatcaaaaactggattctacagaaaccctaattcgatatcgaagaaaggagaacaatcgattcaccaaagttccaaaagtttggcgcttggcttgactcgaaacaacacagtcgacgagttctcgatgtcaatgacatatttaccctcagatattcgacaagatacaaataaagtccgttataaagaagggcaaaacacgtaaatatgtccttcttcttctctctcacaatagtttcactttcttcagtccccattcgagtttgaactttagttttcgatggttctgttggctcttcgtgtgaaatttcttgttttgggtcgccttcttcggttatagaggtagtgaagaatattgacgacattgcagccttaagggttaaaaacctttgatgggttttattatgtacaagacatgttgcttttgattgatcacttaggtgtgtcactgttagcttatttagttggcttgtttgtatagaggttaatgactgtagaatcttctagctacatattaagttgcacaactaaacacgattgctaaatatgcacacttgtttccttcctcaaaccacatgtaatgctggtcagacagagaaaactgaaatttccatgtacaagaaccacatagtactaacagatcttactaccacgaacataactgtggctttggcttgcttaacattgtgtaagactaatgtctatttcaccgcagaatcgaatagcagagccgatgataccatcttcgatcttcgttcttccagttcaggtaatcttttttcttgtttcgatgttagcaaggtttcatccatgtcttctttcactttacacatgttttgttatttttccttgtagcagatttctcaagccgtgatttccttacagcttcttggatttgtctctcatggtctttcaatatgtcctcaatgtttccaccaggaggcatcaatggtcccgaacaatgcattctgttcttcttgcgtacgtatgtctgaaaccacacgaaaaaaagaacatcttaggatccatgtaatctaataggaaaaaagtgtattgctaatatcttttatatattaccgttgtggtttgtacggctacatcttctttatgtgaaggagacaagtatctcccagtcatgggcacattgcttgatcgagtagcctttagctcaactacattgttcctacagctctcatttttactccatgttgctgttatgcttggatgaatcattgaattggtatgagaaaagcctttctgatctctgtcgcctctcaagcctgttctactgtcttcctgaggattgaatctcttggtggtgattgtgtcttttgactgccctgaagcaacgaactctggtgttgtagcagtactcttgaagtctctcgaacctcgtctcacagattcaggtccacgacccttcaccgtttcagactttttcctgaatttatatagaacttgtgtttaggaattcacatgaatcattttggtgcaataatacttgtataaggagtttttatcacataccttcttgcttcttcatcacggacctttgcatcaagttccttgcttggaggatactttggcaaacttgatacattacaagggagtggttccatagtgaagaactagagaacaaaagaagaagaaagaattgagtttgcattgaggaggtgaatcaggaactgctagttgaagaaatataaagctaccttgctacttagtgtcgaagaagccgtgccacgcttcgctggttctaaggatagaagtttgtcaacaagagctagagcagaaggtggtaagttcttgaaagtctctagaaggacacgtttataaggttgttgcggcttgaaacttgttgcaagtggtagctttgtcttttgccagtaatcatcacttggtgaaccacaaaacttgaagatcttatgcatttgctccacctaagagacattctcaaagatatcaataatttgtgcttaatggattcaaagaactgattgtctgatgaatctacatgtaactcacctctgttcttcccggcatgattggtttccctaaaaacagttctgtgagaatgcaaccaacactccacaaatctatccctggaccatattctgtagctcccagtagaagctcaggggctctgtaccacaaggttactacacggctcgtcaaaggttgatcttgttctggatgatagatattcgccagaccaaaatctccaatcttgaggactccatcattgtttaccaagagatttggacccttaatgtcgcggtggaggattccacggctgtggcagtgctcaagcccgctaagcaattgtttcatgtaacatttgatctgcaagaagcaacaagaaacaagatttgtctccctattagtccaagatttctctgttacctttttcactataatcaaacccttgaacgtacctgagattcagtaaattttacaccgggtctaagagcgagaccggaaagatcatgctccatgtactcaaacacaaggtacaagctaccagagagtttagaggtcacaagacattcaagcttcataacgtttggatggtctagtttccgcaagatgttgatttctctagccatgaatctcacgctttccggatccatattaacgaacctgaccttcttcattgctaccattttaccggtctcaagatcccgggctctgtacacgctactgtaagtcccttgtccaatctgttaaaagagacaacacaatagaaacgttatagcaatcaagaaacattaaaaatagtaacaaagagagtataaggaactaactttgtccagcttctcaaaagactctgctcgtcgtggaacccaacctttgatggcttcacctgcaacagaagttaaccaagaaggccatccagctgcaataagctcggcctcagggctatgtggaacacttgtgggaatattactcggtggaaaaatattgaatcctcctcctcctgttccaatatctgcagttggccatctcctgtgacaccttgtaggtctctctacaattactgttttaccgtcactatcatctacaggaacaatcaatccactagctctagcggatggtttatgtgctaaaccatcagctttacgtccaccagagcttccatcaacggatttatgtgaaaactcatctttcttggaagttacaggagcaatcaattgaactgaggacgttttgttccaattctcttttggtttctcatgttggtcactaacttcttcttctgcagttccttttgagcaaatgcagcccataatactcaaagaccgtttcacgatttttttcgcatcaagaacaaatcttatcctgaatgattcctaagcataaaactcaggaatctcaggtttattagctaaagacacagaggaggacgatcagattttgctcctcctctaagaaaattaatgcaattctcttcaaatgttatgtgtcagggatcttttgatcttatatgatcccaaatgaataggaagaagatcttttaaaacctagaaacaatgaggattaaagactttggaggcagagaaaagaagacttgtggttcaagaaacgagagagatgatgagagaaagaactaagaagcagaggaaggagagaattaaaaagactttggaggcaaagcaatagcaaaattcagaaagctaaacaccaaaatacaataagagagattaaaaatcagagaagagaagacttgtgattcaagaaacaagagaaatttcagaaatcctctgtgtttttttttccgttatctcactgcaagatagaaaaaacgttgcagcaaattctgttcgtcgataacggaaaatgcggaaagagaaaaatgacgaacagaatgtagttaattctgatatggaaatttctttaggaatcaggagagatgggatttggtttttgtgtcgccggaaattatggagaagccctagattctccggaagaagacaactcacaatatctcatctttttctatttttgaaatgttaggaaacagactaacgaatttgcatgaagtgaagatttgatccaacggtcgaaaatgaagttgttttgtttgttgttgttacgacaatgacccacgtaggatgttttgtcggagatcgtgggtcccacttgatatattttcatctacctgcaagaacatttatcccaaagactcttctaagttcaagtctcccacaaagtatctacattgtcctcgacatcgtcgagtagattattagaaaataaatgtatgttgcacaatgataagagactgcataacgacattgatatcaactagttatatgattctttttttttaaaatatcaactagttataaactacgaggtggaaattttcaaaaggatatcttgtgaagtgagagactcttgcaaaatagaaaaagaaaaacaccttcataatgtatctatatcttctagaagctcatgatctctttgtctatagaaatcatgcattgatttcaaatcaaacaccataaaacttaatccttgaaacaaaataaaaataataagaacttctaaaaccttttgttgtagcaatgatcatttcaaaactcatatatgtactgattgggtccagatttcagaagctcatgccttattttgtatcacattaagcacggccttgggatagtctcttgtttgcaacattttaagagaattattataacctatgatctgtctgatcaaagtttcttgttaagtaaagattaacagtagagagaaccaacattaactaattaagtataaactaggtcttacttatggccgcccatagacccactaaaagtgaggttcaaatggagcttgtacgtatgcataaatcaatatccgactaagaccaaggaaacatatattaaaaacgttacaggaaaaattgttaaatacttttggtgggttacacttataagaccaagaaaccaataaccgaatctttatttcaaatggagcatgtgtacgtagcacgaacttattgaaccagtcaaccagatgcaaaacagccaacccggattaaaccggaacatgagcttcacggttttatcttatctaaaactcaaaggaacaagcacgtggctctgtacctcagtctgcatgcagccatgttgttcaccatccatcactatacgtcaaaatccgccccacaaatattaatattttcatattctcaacaaagaaaaaaactccattttaatttaactgcattcctcctatctttcttcttcgtttctatagcctcactaaacatctcttgttattttcgaaagtgaagagaaaaatggtggatctattgaactcggtgatgaacctggtggcgcctccagcgaccatggtggtgatggcctttgcatggccattactgtctttcattagcttctccgaacgggcttacaactcttatttcgccaccgaaaatatggaagataaagtagttgtcatcaccggagcttcatcggccattggagaggtactaaaattaagaataaaactacttactctcctgcaaaattattttctttaaaaccatattaattcctacaaaatggttattgtattttcaaaatatatggtgttgctttgttaaaattcttaattacaaacaaatcgatgaataacttggttagcaaatatgtttttggagagggaggtcataatacatatgttgtcaaaggccgatcataggttaagtgagattatgtttatcatgagtttctcaattttgcatggatgctgatgatcttggtaatgaaatggaacgcagcaaatagcatatgaatatgcaaaaagaggagcgaatttggtgttggtggcgaggagagagcagagactgagagttgtgagtaataaggctaaacagattggagccaaccatgtgatcatcatcgctgctgatgtcatcaaagaagatgactgccgccgttttatcacccaagccgtcaactattacggccgcggtacactactttctcgccattaccacataaaatgcgaaggataggttaacttgtaggtcaagcaatatttttggttttaacgaaaatgttgtttgtgcttgatgatgaattcgatgcagtggatcatctagtgaatacagcgagtcttggacacactttttactttgaggaagtgagtgacacgactgtgtttccacatttgctggtatgtgtatcttcggtgtttgtatcgtgatttgatcacatttcaatggcaacgatactaaagtttgagattcttgagtaggacataaacttctgggggaatgtttatccgacatacgtagcgttgccataccttcaccagacgaatggccgaatagtcgtgaatgcatcggttgaaaactggttgcctctaccacggatgagtctttattctgttagtacttcaaatgtttaccgctcctactttcttctatctcgtaagagcatacataacgttaattctctttgtgtaggctgcaaaagcagcattagtcaacttctatgagacgctgcgtttcgagctaaatggagacgttggtataactatcgcgactcacgggtggattggcagtgagatgagtggaggaaagttcatgctagaagaaggtgctgagatgcaatggaaggaagagagagaagtaaaacttttacaaccataaatatgattgcattaactaaaaaattcccaaagacttacttacattatctgtaggtacctgcaaatggtggaccgctagaggaatttgcaaagatgattgtggcaggagcttgtaggggagatgcatatgtgaagtttccaaactggtacgatgtctttctcctctatcgagtcttcacaccgaatgtactgagatggacattcaagttgttactgtctactgagggtacacgtagaagctcccttgttggggtcgggtcaggtatgcctgtggatgaatcctcttcacaaatgaaacttatgcttgaaggaggaccacctcgagttcctgcaagcccacctaggtataccgcaagcccacctcattataccgcaagcccaccacggtatcctgcaagcccacctcggtatcctgcgagcccacctcggttttcacagtttaatatccaagagttgtaataaaaactggatggaggaacaagaggtgaggtcggtttggtgtgtagagtgtagagtgaacttgagctttagaactttctctgaccaagtgaaccacaaaaaaagaaaagcaatgtaaaggacatcgagtcaagaataataccggatgatacagccatatgatgttacttctgaattacttatgtcacacagaacattacacggacacagtgttgatgtatatgatattgtatctgtcaactgtttttagacctaacttctccacaagtattacacagaaaaagagccgaaccaagaccgttcagcacctctaggctctgagaacctggaaagaagatgacaagatcctgaagagaccatccgggttatccgtgtgaacctgaacggacacaaccggaatactggtttacgggttcagtaatagaataacaaagatgaagcaatgtagaagcagatgcgtagttagtttaatttacccaatgaccggcatcttccaagacatgcatttctacaccaccgccttcttcagaggctagctcttcagcggcgtggattcgctgaaggtcttctagggcccaacggtgcaagcttctttccgctttcagaaaattcacatgtactcctcttggaagattctcaacaaagttcctttattttgtagaagcaagtttgcgtataattaggtaagagctcatacaagtttgttccactaaacacagggaggttagaagattaccatagatttgtctcttcgtaagactggtaaagttcagcgatcccgtctaggtcaaatgtccacgagaagctagaagctgatggtccagtaggtctgagattggtaatgacccactgcacaagaaatatgctcacatacatcaagattgtgcaactcgacaagtgtcagcagaatcaaacatacggtcttaaagctagttaaaatctgatagaaactactgagcaaatggttattattgtacctgtgcgacatcattggaaaacccttcatttataagagctttaagaacctcgcgctttgacaagaccttttaaaccaaacagaaaagatgttcataagcttaaactgtctagatcctttggttcttctgacttctaagaacatgtaggtggttcaaactgcttattgcaataaatcaataacactcttcttgtaatgtccagcaaaattcattcttgtaatatttgtacatgcatgttcaattagcttaccacttttggcaatttacgtagaaatgatataagctctcgtggatgatcttctccatctcctcctgcacgaactttaccaggagtagcatccaatacccaagcctaaattgggtataatttaggggccttaacataaaccctaccaacattgcgatatagacatcggataaacacttactcggactggtcgtggaagaggcttagctgcttgctctaccatgcttaatacaactacaaagatcatagaaaagactcatcaggaatgttatcacgtctgagcaaataatctcgatgaagcaatttcatatagacgtcaagtcacctttccccccaaagctatgaccaacaaggacccgaggtgttaacctcaactgaccaacctaagaatggcagaatagagaaaaatggtatcagaaaagtcacctaccatgaataatccagtactgtgttgcttgagaaagaaacttacaagttttagaacatcagaagcagtagtagcaaccgagtgtggacctctcttcttgagagatgttgaatccccatggcaacgcaggtctaccaatagaaactatgaagattgaattaagaggagaagattagttatttgcaagccaataagtgtgcacctggataaacaaatacctgccacgttgggaattcatgagccaatctacgagcaaaagtgcctagagtagcaagacccaagaaggaaaataagggtattatgattagctagagatctttccacactatacagctaaaccgtaaagtttgaacaaaagagaaacaaaactaaaaacactgagaaggcattaacaatccctttcgaacaattcagcgattcaaaaagatcgatgatctttttgcttgccactaacaggcacatgaagagattcaggaatgactttactggtttcatagttccttttataatattgaagaaattaagtataagccaaacttgaagcaatttacaaggaaccacacaacactgaccccagtttttcccgctccctaaaattccgtgtaggagaacagcagtaggtgtatctggaacagatttgtcatccttccatctccatttcacctgcgtatgtataaatcatttcagtccacaatcaatctgaaaaacagataatctctcaaacttatgttatcaagttcaatactttttccttcacacacaaagattaaacactccagtgaagaaatataaaacagactggctctcagataacttacaagtgctccttgaacaagatcatacgcctgcaaaacaatggcacaagatataatcaatcatcaaagtccatgaattcacatcaaaatgtgttcaagtctcaaactttatgtaccaggacccgaggaggctcagcaacatctttgctcgttgattgtctctcctcaactaatgccatacgtacagatgctcctttcactttacgagttccatgtaccaattccaaacgatgattacagaatctgtcactcttcaagtagcgtaaaaagttaaagttaggaactttatacttgttgatgctagagagattgaaacagagagaaggaaaatctcaaaacctgagaatttgtcccaattctgatgaaattaggagaatggattgatgtctttgatcgaaacctaaatgcacatcctccgctagaactcgccgtggagcacgagaccgccgacattacaacaatttcaaaattgggaaacgacgaattcgcaattacagatcaaagaaacagagattcacgagacggagattgatgaaggaagttaaagagacggcgacaatgtgcttcttttcctcctctgtattttttttttcttggtatctccgtcgcctttgttttttactccgccgtatgtttttgtttctggtgaatctcaggttgaaaacagagtgaatgacagatttgccccttttgtcggctttgcacagacttgaatcgaccacttggtcggtccagagtttctcacctaactaaacaccctcacatctctctttttcttgtatcaaaccttaaataatgttgtaaacgttataattaggggtgttaaactatattttagtcccaaaatcttaatcctacaaacctaactaaacctagtaaataaatttgatttgatttaacttttttaaatttttttccatgattatcccattagccatttatgctcggactttcaatgttaagctgactgattgttatcaaaaattagtctcatgaaaaaaggataaaaaaggattattatcaaactgaataaagagatagtaaaactaaaattgatttggtttaactttttaaaaaattagatgagttttatttttttgctaatttatgtttattctttatttattattgtattgttaataaaattagatctataatatgtaattacaatttttatggttgaattcatttgtaactcaaaatatcaatttatatattttcatgtataaagctgattatttataagatttaatattttttcactatcataaatacatataacaacaatatatgatattttgatacaatttatgtgtaactatgttaattgtatggtttaaaatttgtctaactcgattataaataaattaattccttgttttatgtactgcaacaaattgtgatagacttatgattaaagtttgaattgacatcaactgaacaagatctcaagagtattcaaatgaagaaataaaaatatagcaaaaattgaatgtcatttaagtcaacacttttgaatattctatcattagaaatatgatcgtgtcttggatgatttgaaaacggtctaacttgaatatatatatatatatatataaactatttttttttttatgtattcttctaatatagtattccaacaacattgttatacactcatgattaaatgtatagaattgatataaactaataagatttcaagagtattcatatgaaaagaataaaaagaaagcaaaagttaaaatattatttaaatcaatacttttagatcttctatcattgcatatatatatccatataaaagaaatgatcgtgtattaaattatttggtagctctaatgtcttaaaggtttaatatttgaacaaacttgaatgtcaatgtcatcaaagactcaaaataaaattatatatatgaaagttgggcaattagtactataaagactataattttagtcattatagagtagtaattattgataataaaaaattattaaaataaaaagagtataataaaagtagtgcttaatttttaacataattttttatttatttatttatttttatttagaaaaaatcaattaagagtaggattgatgatacaattaagttgcttatttaatttttaatttaaaaaatataaaatgacacatgtcatttttcttgtgtgatgatgtgtcattcatatggagagagttggccaacttcatatatatgattataatcgagaaaaagagccaaaacgagttaggacatcttcaaaattactctttattttcaaatatgaattttttttgtactagaaaaataacttcaaaactttaaacttgactcccaaaaataacttcttttttttttttttgcatttcagcgcctacacttacttatacatcaaacaaataagtttactaatcttattgtttatcaatttaattcctaattttagatttcataactatttcacatatatccttataaatttaattttatacatataaaattaaataaacaaaataaatttaaagtattaatagaaaagaaatcctacatattttttttcttcacataacaatattatattaaacaaatttaatacaaaatgtagtaataaaagaaataaagttacatgaacacataaatgttacaagaaataaaatactacaacaatacaaaggtcaccaaagtattatatatatacaaatttgatgtgatcgaatgtttttttttttttttttgaattttgtttttgggtatcattcttagtagttcaaactgaataaactcattaatttttatttttattttgctagattttgcatatgttgttgagctatctcatagctctttcccttagttgctgcacttttattagtagattaagaatttattcatttgatgaaaacaaaatattaacatgtggtttattactttcggacaatgtgatgaaatttaattcaccctcatctctacttaaattgatttgaaatgaaaacatttatagagattgtgatgttagagagtacatatgatgcacaagtttattcagtgtttttgtattctatttggaagttgtgacttaatttgtgagtttattattattatttatatgtaattttatattgtaatgtaatgttttatttattaatcaatttgcttataatatttatttaatgtatgttttatagttatatatataagcttttatgaactaaacaatatgataactataatgcaaaatacaaattattttgaagttgaatttgaagttttatcattgacgagaacactttcaaactttaactatggagttctgcaactgacaaaagtaaaatatccatgtctgcttaaagaagtaattgatttcatttctaaaatcgtgatgatattccaatattttcggatccaaagatgatacagattttgcagaagaaataaaacgaactgcccaagagtaaaagtggacaaaaagataattaggagaaaaatggtatttttgcaaatttctctaaagttttagagttaaataaggattattaatttttccttttttttacctgaaaaatagttgagtcattgttagtttgttactcattttacttataaaacttttaatcatttttacttgaattacatttggatatatcatatatgaaaataataatatctttggtgtgtataaaacttctagaacatgaaaatttatcaatcgtgagttgaatgtttcactaaactttttaaacaattaaaagaatgacaaatatagatttccataaatgaaaaaaaaagaatggacttgcatattttcatgtgtgtatatatgtattttatttttaacacttttggcatacctctttaattaattggttaacttctaaatattactatttgagaagtgagtttacaacgaaatttgaaaattaaagctgtgaaaatgaaagttggaatgtaaataaaacccgtcttaaaattaccttttactttgggagatttgcaaaactaccttttttgtttttttactatttttcactaaaaataatatttcattaaataaaaaactatatatagtagtcaagaaaatatttttgggttataaatataaaggttgtaaaaaataaaaataaaaaaaaacaaatatgtgaattttaggcccgaatatttactttctgagcccatttgtaagcccacttcctaaaccgagttttataaaataataaaaaaaaacagaaataaatagtcaaccgactcaaaataaaccactatttagacgccacgtgtacccagaacaaaacgtatggcctgtgtatctctcacgccacctctatttttcttctgcctcctcgaaccttctttttctcacttctcataaaaaaggtcatttcaaaaaaaaatcagaaaccgtcaaaaagccaccgttgatatttcttccttgttgcttcttcaatggcgtcgttcgacgaagcacctcccggaaaccccaaagccggtgaaaagatcttcagaaccaagtgcgctcagtgtcacaccgtcgagaaaggtgccggtcacaaacaaggtctgttcctctgattctctcttagatccacaatattctgtatcatcatcgtttgattttatttggttacgctttgttcgaatctggatctaccacatgcgtttcgttttctcgtattgatcttcgtttgtgtttgtttaggatccgtatgtctttattttgaattttggaattttgttatgaattcaggaccgaatttgaatggattgtttggaagacaatctggaacaactccaggatattcttactctgctgctaacaaaagcatggctgtgaattgggaggagaagactctttacgattacttgttgaatcctaagaaggtatttgattgctctttaatctttaatggacttcgatcatagagtctggtgattaaggttcttgattgttcataagctaatttgtggattagtggtctttagttttagaatatttgttgcaaaaggaattatgagtctttataccttcttaagtattgttaggttgatctagaaacacaatttgtttgttcatttcggtttggtgcaaaaatctccatatttgtgaaattggacatcatctttcaaaatggtacactaataagtgcaacatctcaatgttgtgccatttgttttctattgcatgttcaagaatatcaagcaattagcaacatttgttttggttaatacttgagtctttccttcactcttgtctattgtctctttattgagctgatttgtggaattttccacaaatcttatgattcatctttcactctttaagctggtgcatcataacctgtgtgtgcatcatcatctcaacagtgttccaatttattatattgcatattctagaatatcgaaacataatattgtctgtcaagaaaatgctgtttggctaatactgactcctttcttcacacttttgggtcgcttgtttctttttgagcaattatgaagagataagatctcaatttgattgaattggtgtggaatttctttgcttgttacagtacatccctggaacaaaaatggtgtttcctggactgaaaaaaccgcaagatcgtgccgatctcatcgcttatttgaaggaaggtactgcttagacaggctcgtccagatatatgaagctggcatttttttttctcacagctaaataaaatcagaccaaaaatattatggtcatgaactgctttttgtatggtcttttattctttctttctttttacgttgttgaagaggctagttgcctcttataaagtggaatattcgttattgatgtgaagagctaagaaccaatttccaccacgatagtcatgagattttcctaattcaacttgcctacttttgttacgagtttagaatctttttttcagttgttcattttcatttcaataattagacaaatacgtaagagatgcgcataattcagctaaatcagtagaacataaaagacaacataaaggaaaatctgacagtgttacattcattttggaagataaagttgaagcattttggcataaaataaaaatggtggatcattacgagttgccatatgataagtggcataaaagattatttaccacctaagatgcatatataaagtgaattcctatgcagcatagtggttctataattaatgcatattattagattttattaccccacaagaacatttgccacatttaagcttcaagaacagcttttggttctttacttggaagcttgcagcctaatgaagagtcttgcagagatcttggtttgtctctcaaaactccttccccaaatactcgcaagcaagattgacctgtttttttatttttctttgtctaaatatcattgggatatcctactatattatttgggaagtacattttaaatataacctttgtaagtaattacataagtatgccattagaaataaaatttaaagagtaaattaattcatctctttaaaaatttaagttaaatactaatttaattaaaaaacgaaatacattattaatttccaaaaaagtaaccaatcaaaatcaacaaattagatttgatatctaaattttatattaattttttattaattattatagttcacctctcatctttatatgattctatttttgcgaaaaaataatatcatcgttataaaaaaataattagagttgcttcgcatataccataatttgaatttttaaaaacgaatataaactgttcaatacataaaaaatattataacggatcaaaaatagatttaagaaaattttctactgagtattgggtcataatttgaatatttatattcaatttcatacatattattttaaaaatttttaatcttatatactacaataattaataacatattagattttttttatgtgtatgatgtgattcaatatttaatagaagctggaaaatcctagaattgacgggtttaagggcttgattggttctccctttaccacccgcaaacgcagcgtttgcgattggtagcgattgttagcgattgacaccaatcatagaaaccgctagacatcgctttggaccgctcgaaatcgcccgttttcaaaagctccttcccgcaagcgtttgcggttgcgggcggtagcggttaggttaaaaaaataatatttttttaattaaattaaataatggtggcttccacccaaattctaatcactataattaaaataatctaatcttttatatatcttatttttatcagaaaaccttaatcaatatattgtaaccttattatctcaattatggcattcgatgaaaatcaaaatcaagaatcaaacataactatcatctatccttttattcattcattagctagtgtaattctttaactatttcatagcatcgttgtttattcattcaatagtttagttgttttggatatttaggtccaaatttaattgacatatttagatttataattataatcttagataattagataatattacgattaaatataattaatattttggatgttaaattaatgtttgggtttttgaatactctttttgggtaacgggtaatttccgggccaatcggatatccacgggtttactaaaactctacccaataaggaattttcaaaacgcttgataacgcttgaaaccgcaaccgcccgtttccgcaaactcccgcaaccgcaaccgcacccgctgcgtttaaaacagtcaggccctaaatcgatattaatacaagatggtatactacatgtgaaactctaaaattaacaatcaaaatacaagtgtataattttaaacactaaataatatgtttttttaaacactaaatttttttgaataaaaagtagttagtaaaacatatgttttttttaaagagtttttagataattaaatcagagaatattgggcatatgagtaacccattcgagttcgggtagaacccgttcgggtttgggattaatgggtatatgatttactacccaatagaataattataaatattcggttctggttcgggtctgatccagttgggtttgggtcagtttggataaaaagtttcagaccctaaaaatacccaaaaaaatagaaacggtaaatttgtatgtagatagcgcatctccaaacaaaaaaaacttttaaatttgttaagttttaataaatttaattatatctgaatatattttactaaattttgacaaacataataaataatttttgaatagtttagttgttttggatatttaggtccaaatttaattgacatatttagatttataattataatcttagataattagataatattacgattaaatataattaatattttggatattaaattaatgtttgggtttttgaatactctttttgggtaacgggtaatttccgggccaatcggatatccacgggtttactaaaactctatccaataaggaattttcctaaaaatttaacccgccctaacccaattttttggttcgggtattgggttggttatcggatccgttttttcgtcacccatatcaaagataatctaatataggccttaattaggtccacaaatataacaaaaatagtatacaaagactaattctaagttaggccaaaaattagatcctctaatacaaagaaaacatgtttcttaccaaaacaacttgtatacaaattttacacatttacttaaaactacatatattatatttattataaaaacaacatttttaaacaaaatcaatccaatgcaacattatatgcaaatagtaaaaacagtaaataatattatggcataacttttatactatacaatttcttatgtaattcaaacaaaagtatacaatttaatttatacaaaatattaatgtccgtgttgtatagcacgcgttatgatctagtttttgtgtataaatcaatgtactatcagatccattttatagtagctttggtgtaatattgatgatatatatactacatatttgaaagttagatttttcatatatcgatcagactgattttaccttttctctttgctatcgcaaaacggcggcgtatcagtaggcggtattcaacaagtttgtaatggctgcttctttatccaattcttttatgtatatggaacgataatgtgttcacaattcgcttgggaaattcaagatcattccaaattgcacgaccaacaaaagaaaccaaaaacatgtcttcgatggtcaaaactatgccaacacgtgtaatttctagccttattgagacaacactttttgttaaaactttatcttcttttcctaaacaaaggatatattaatttctaagtcgaaatttttcgattagtacgagcgttacatatatggctaagaccagattcaccagaaagaaagaggctaataaaacaatcctcttgcctgacttgtgggtcactcattaccaaatcagtagaagcggtcgagctattaatccgatatattcataatcttatatgcattgattacgcttacatatgtcttcatgtgattctgttgcatttacttatcctttcatggcatctataacctcttgtgtttgatttgtgattttaagctgaattatatatgatttttatttagatatgtgatgatacgtttgtatttggagctttttaggtttaattagtttgtaacacaactcttgtacttttgggattgaatgagtttcttatataacaatctctatagtgttactgatctatatgctaagatgtatgagtatattaatactgtatattgtgagatttgcaacattttggaattttggttttcggacaagtgagatttcatcttgtagaaaatgtatgatgacacgagtctggattgtaaaatttagtatcattagaagaatcataagctgtagatttcatttcaaattcgtgtttatccacttatgtggcaaattgctcatattcgagccctagcttattgctaataagaaaaccattcaacctatgaattatgagtaactcgtgttgtgtgcattagtagtttacttttcatggacttttttttatgcatgtcatattaatctacttgctaagtttgaagtagggttagagtttttttaatttactttgctgttaaataccctactattgaagctaaagggtttgagatttttcctataaattaggtatttttgcaattgaaaaaattattctctattcgatttttatacccatgactctaggtgagattcgaaatccaaaataaaaactatatcactaatcgagtgaaggataaattttgtacaaacttcacactatcacactatattagtgcaaattggatacataatttgaaataattaaacaactaatctattaagctaactttaatgggaagaaatacataccctagagaaagatggagaaattcatgagtatcacaaatattgagtgcctactatatgtgctctttcacttagccattaaggttgtgtaaatttgtttagttgtttttttcactataattagctaccactaataataactagtgataacaatagtagtaggagtaatcaattatatctttaatagttgaagaaaagaaagtgtcgtcatttattcaacgcaaaaatggattaatgtaattagccaatgtgaatatttcaacgttaattcctgctcaatctaaatcagtccattatagttaacttaatccgaattatatcgaacaatttcttacgttaattattctcgcagatgaacatttcgtcaacttcttaaaaaaaaaaaaacaatggtttaaacaaaacaaatctgtcaataatccaaagatttcggtattttttataactcatcattgtaagcattaataagatttattttttcttattttttcactagtttcttttctccaaaaaataaatcttattaatgcttacaacgatgatccacaagaaataccaaaatctttggatcattgacagatttgttttgtttaaactttttttttttggtttttttactgttttaaaaagttgacaaaatattcatctgagagaataattgacgtaataaatcgttcgatatagttcggattaagttaactgtaacggactgattttgattgagcaggaattaacgctgaaatattcacattggctaattacatcaacccgtttttgcgttgattaaatgacgacactttcttttcttcgactattaaatgatactcttattcatatcatgaattaataattatataattaaacttatatatatatatatatatatatatattataactttataagtttataaagttatattatatgtaagacaatttagtggtatatgactatagtattgtttgtattccttaaatttgtattaattcttggtagtgttcttttttcttttttaacgtaataattattttttacttgtaattggttataaaagaatattaattataacgaaaagctaatctttagatagaaaagttttaaaaaaaatataaattagtcaaatctctatataaattaataattattaaattttaataacttttagcttcttctataatttttaattattactttattcgatagatttcgtacctttataaattacaaaaatttccagtgtccagcaattattattaatttatagtagttttactctattttcacttacttaatttcaatatcctgcttcagacttatataataagacataataataataaaaaaaaattaacccgattctatgtgatggccaaattaactaaaatctagattttcttggtttgcgttcgggcgtaataaaagatggaaaaatatagaaagtgattttaatctttttactctgttttcttcttgtattgccaactccttaacacgagctagagtttgttaattctgtttattcataaacggacaaagcgaaacaagtgagtagagccacacgacgactttggcattgtccagtgatggctgcttcaagtcttagtctgttgtgaaggtttccacattcctggtatctgtaacaaacgaatcatataatcagacttttaagactaaagttgcaaagaaagagtgatactgatacacaacacagccacaaacctcaacaccatgaggaccaattctgttacgtgatatgaaattcagaactagattcgcaaactcctccggtacatcttcctgtattccacgtatatcatcattgcataaaagactcgacataaagatcattaggcgatcgcatttatacctgtatggcatgtccggtgtgtttgaccacaatcatctgaaactttccttgcatttgaccaattgtgagggtcctaatccaatccatcaacatcgttattacaaaacactacagatttcgattcaatttaagttgagacctgagttccagaggggggtagaggaatatacctgtccaacctatcagttccagctaatagcaagagtttcggaactggggatgacaaaaacttctctgagagaccatcgtacctgcagggcaactaacattgttcgaatcaaaaactattcaagagaggtaaatgtttgcactcagattcacaacggcaactgttgcaactaacaactcttaatattcaaccgtctcaggaatacaagaggtaatgatggtcataccagcctttccaatattgctctgtttcctctagacgtgttcggtaaacgtagctggacaaaggttcatatttccactcattatgaagcaaaaatgtgaaccctcaaaacaggaaaaatcagtaacaatacgcaccaatgctttgaatcatcatatttgagagttgtggggatagagacacgggctgaatcaatgtttcttaatgaccctcctctaacgctgtattcaatctgcaaagatgaatcaagtccaactgatttgttattaaactttggtttgtaatatatgcatttctttgcagcttataggtatccatttttttgcttcgtttacaaaggattagctttagctcaatatagagaaatcatggcgataaggggagactttgaaagctgaaaggccaaaattttcattgacaatgcttgatgtctttttcgtatatacaatcaagcgttcaaaatttgcttactgctttttcgatgctgggaaaatgttgcattctgtttgaaagaattttctgcatgtgaatcaatgaggaaatagcagtaccctgtaatgaaagtactttggtcatttcatctcacgagagtgcagaccaagtgagacttttctataagaaagcaaacctcaacaacatccacaacgacaagcccagccaagctaggcaatgttttgtttgcagcaacttgcacagcgaccgaacctcccatgctgtgtgttaataacatgaaaccaattcatgaacacagaacactggatcacactacttttatcctacaaatttatgcatgtgtctatcactacaaccctataccgaacgaagcctataaatgttccatacttaagaatctaaaacataaccatagtgtcagtagacaaattgttgtacaggtagatcataaacaactaaaatcttaaactttcttacaaatgttacaggtgtgaaaatatattcgcaggcgcactggaaaaatattgatgtactcactattgaccagccatttacacgttaagatagagatcgaaaacagcataccgatatgacaaaataaaatagagaaagagaaaaaacctgtgaccaactagcacaatagctggaggagagtctccatacaattccttaatgacagccaaaacatcattgctcattgtctgcattttcatcttactacatcagtctcaattctcaaagaccagctaatgtataattccataagcaaatccagactctcaaaaagaacagggatgtcatacctcaagcgataactccaattcgttctccgaaaccgatttaccgtgccctctcaagtccatcgcaaccacacgtgctttctccttaattttacttgctactatagaaaacgagagcctaacaagaacagatgaaaccattatacaatgtatgccaatctagtttcatattatatatacatgctaagctgaaagaagtgagttctcattaaacactcacccagagtagccaccaccatggagacaaaagacaacaggtccttcatttcctgccatatacacatgaaacacctaaaaaatgataatacactccattagagaccaaaaccaaaaactttctagaaacttagatatcaaactcgttaaacgttacatcatcagagccagtgattgatatatcatcttctttatcaaaatagcttttccattctacaggcgaatacttctccgacgaattcctgaaacaacaaaaaccaatttcacgatgaaaacgagatcggaaggagaattgagaattgaaactgaaactaacgtagaaggaggacgaagaggacgagcggcgaagacagacgccggagcttctatgggttctaaatgttcctctgaggtatcttcacgaagaggattcaaatttgaagacgaatccattgttgaaagctttttagaaactgatcaaaatcgaatataataatctcacagatcttctcagtatcactcttcttcttcttcttcttctacaatttgcttttttcagttttcagtcaaaattcaataggaaggtgacacctcgatggacgtagaatagtatgggcttttatctcttgttgggccattttaggcccatatgatttaatatcacttgtctcacccaccatgcagttttcaactttcaacgggtcaatatgactaacaaaaagggtcgtcaattgtgggaaaagagtagtgtttgtttagttccaagtccgacttagaagttagaagtgattttggatccaaaatgttgttttatgatgatttataagaaatttgaagaaagaaaatatagaacttttccgaaatagggttagaatctccagggtgcaaataagattttgtgggaaaaaagtagtgtttgtttagttccgagtctgacttagaagtgattttggatccaatatattgtttttatgtcgatattagaaatttgaggaaaaaaaatgtagaacttttccgaaatagggttagaactctccggagtgtaaataagatttcgtgggaaaagaatagtgtttgtttagtttcgagtctgacttagaagtgattttggatccaatatgttatatttatgtcgatattagaaatttgaggaaaaaaatgtaaaacttctccgaaatagggttagaactctctgggatgcaaataagattgtgaggactaactcgatcaagagattttgttaaaggatgaacagaagaaagatgttggctttgttcgtttgccggtcgttgtttgtttgacggtctatgtgttgttcgttagagagttgctttgattatagtaattatccgtcaaagtttatgttattaagtttaagtcaaacttacaaagattgaatatatgacataacttatgtattaaaacaacaatttacatcagttccattagtgattctattaaatagatgaccataaactatgtataaaaagactacaattttttaaaaaatttatattaaaatatacacaaatggaccttggctttcgctttacaattcaatatccagttataaaatgccaaaacggtaaagaagaccggaatcggaaaaagagatcggacctctgctgatggacgcaaacaaaagtgaccagagccttagatccggcgtactcaagatttcaaacttctctgatgcctcgaaagatcgatgaccaccgccggaagagaggcaaagattgcttgggacattatttcctcatataaagctggtggtggtttactacttgaatgataaatttaacaatctaaaattgtgaatgtgaggttaaaagttttaaaattatgagatcgaaaaactcaaaatttgatgtgaatgctctaattgttgtttatttgtttttctcttttaaatgttttttagtaagacaataacttagtaacgtacaaaatttcacgtttatggtatgtgccttaaaatatagtttgtaggaagaaaatgtccactgtttttttttctgtttttttttttccgattttacaatatgccaaacctcaacaaccaagggtcctaccataccctatcttatttcttcaattgttttgctaccaaaagaaatctagatcttgataaaataaagcttgctattcttcaatatatcaaaccccttctctttgctttctcacactgaaatcaaactcctttggtaatactactctcacttttgcttaaatattaatatgatcttcttcatacatatatttgtgtcatcatcagtttcaagcttttctcgttttcttatttccctctctgtctctccgcaaataaccataattctcagcttttaatagtagttactctgcaggagttgtttctccactcaaaagctgacatcattttcttaataaatctcaatctcatatgcaaaattttcaaactttagcttatcttttggattttgttttccacttttcatggtacttatcaagctttctcatagtaaaaaaaaaaaatccttttgcaatacatgtttccatttaaagtttatgtatcttttttgttccatgtgttataaactctttccatgaccagagaatcttaatctccttataggtaattaaagatggagaagaatggtcacacggaaagtgaacttcaaactcaaatggtaattcatttgtctttttatatcaaatagttaaatctttcaaaaaaaataaaatcatcgtcatgtcacaatcaaattacgtgtctaaaagtattttggaccattcgtttcctaaatagtaatgaagaatgtgaactcttgctagctttttactcttgaaaagtatgtcagtgtcatttttatttcaaagaaaaaaaaaaaaatcttatttgtttcctttgtcaacacctgtttacttacaattttactatatttcacgttatctttgaatttgttttcgtgtagtttaacctcttggtggttcatatgagtttaaacatcagatcatgcgttctaatactaacttaataatgcaataagttttaaaaaatgttttatcacagaaagataaaacaaaatgaagatattaagtatctgcctacttcgaataaagtggaagatgatatataataaggtctctcgaacaaaatggatggtaattagaggtcttgaatatattaactctatatataaactaatgagactacattaaaattatccaccaagtggagtttgcattagtaaacatatatattaactaatgatatagttattaatctatcaaattaatatgaaaatcattagtgaaaatgacaataaaatgagctgaaattggtaacgttgcaccatcacgataaatattaccaatttaccatgctatttatggcactagttatactatattgtggtaaaaagttgatccaaaatagaagaattgactgtacgaaattgtatactaccacttttgtacaataatcatttgagactgtatatagtatacttaggtattatattttaagcctagtttaaaattttaaatttctttttctataccaacatttttactaatcaaatttatatttgtatcattctatggtcattttctttttaccgtcatttcttactcgtactatctttaatatctctccattgccatttttcttccgccaaaagaaattttcattcttgtcttgtccccaatggggattccaagagtggggacagtagagagttatggaagagcctttagagggtttaaagatgaagctttgttctttgctaaaataaaatttacactttcctaaagaacataattagagcaagcgactctggattaggcagtgttgcagttgttcttcgataaaccctccccactggccacaatgtcgtcgcaccgactcgccactgcctccgccactcgtaatctccccagacccgaaaccacaatatgtaatattagtttcgtcccaagcgtcattcgaaccgacgacttctaaacttcgcctaggatttttatcaattgagctaacaacacttggtcatctttattattcttttgtttataaaacatttcttcataatcaaaacaccatttttgaatccttaagttattaattcattatgcggaacggtcaaagggaaactgaacttcaaactcaaaatggtagtagtaattatatctttgtctttctatatcaaattgttgatgttctgtctcatgtcacaagatagttatgacttatgaacatgaaacatttggtactaaatacgacaattttttctttgattattgatataatcatgcatgttaagcaaaatttgattatgaaattttttaggttggaaatgagagactacctcaagtaacgtggcaacggaagttgaacagcaaagtgaagaacccttctgagttcaagatgagtataagagatgttcttcatctggtacattctttttatagttagctaaaatcaaaatgacaaaagtttataagacaaaaattttttttttgatgtttggatattaaaacttgtggcttttttgaagtttcctctaggctatagattgtggcgttacactaaagaagaggcaaaaaaaggaagagtgagttgctttatattcacaaaaacatttgtcttttgaaacaaattctcaaacgttatcttcttaatttactagttttcgatgtacgatatcttcaaaaagcgccatgtaagaggcgaccatggtgtcccattaggtggaattgggtatgtataaacacatgataagatcactttttttctataagcaacatgttgatcttctctaggaatgttgtaaattttacacaaacgcgtatttttagtggaggaagcatcggaaggagttacaaaggtgaatttcagcagtttaagctcttccctaaaatttgtgaagaagctccaatcctcacaaaccagttctctgtaagtctctcttgtactcacacttacaatcacaaagatatacttacttgttgattacgttttgataatgtttaggtttttgtgtcgagacccggtggcttgagctactccactgttctatgcccaacaaagccaaaatctgtaaagtaagccacttaatagctttgtagcttattataacagttataacttatgctgtatatgtagaggtaaaacagaggatttaggaatagaatcatgggactggaacatggaaggggacaaatctacctatcatgctttgtatccaaggtcttggaccgtatacaacggtatgaaatgacataattatggttcattatagatcaaaatgtttcagattcatgatttctaaagattatagtgaaatgtgttcactttggagaacagagcctgaccctgaactcagaatagtttctcgtcaagtgtcgccttttatacctcataactacaaggaaagcagtcttccggtatcggttttcgaatttacggtaagaatattccgagaagaggaaagaatcttctttttatatgactttatctcaggacatcataacacttttgtaactttttggctaatgtttcatagatgagtaaccttggaaaagaagaagcaacggttactttgctctttacttgggaggtaacttatttcaaacaaaatgatgactatctgtttcatatcttttgaattttcaagaccatttttgtttgtgtgcttacttagaactcagtgggaggagcttctggtttaactggagaacacttcaactcaacaataatgtaagaatctacatctcaatctctattgtcacagcttctgttctttagctctgacttctaacacaagaaactgatttttgatgtgatacatcagggaaagagatggagtacatgcaatagttttacatcacaagtaaacctcttttacttgagccttaagtaactgaaaaatcatctgttttagccatttgaagcggggtttagtgccggtttccggaagatttattgcgtcgatatattgcaactgtgatgaaatgaaaacttgcaggacgggcaatggacatccgccagttacttacgctattgcagcgcaagaaacagaggatgttcatgtctctgagtgtccatgcttcttagtttctggtcactctcctaaagaaatcacagcaaaagagatgtgggatgagattaaaaaggtttcatatctttttgttcacttcttccgcaaccttttttccaaatctattcaaagaaagctctaaatgttttgaattctctttcagaacaaatcattcgacgagttaaacagcgaaccaggctcaccttcgagacccggaacatccattggagcagccatagctgctaaagtgaaggttcctccaggttgtgaccgtactgtcacgttttcactctcatgggactgtcctgaggtgcggttcaatgaaaagacttaccacaggtgtgacttcttgattcaaatttccttgtatatatatagtttcatcttaacctaatgtgattactcatactatacagacgatacacaaaattctatggcaacttagggatgcagcagtgaaaatggcccgcgacgctcttctaagtacgcgtgcaatttgcttttgttttcggtttcctctttggttttacttgcaaaaaagtttcatatgatgtttctttttcttgaaacacaagattacgttgattgggagtctcagattgaagcatggcaaagccctattctctcagacactacacttcctgactggtaaactctatattactttcaagcttctcttctactccgcaatcgataaccgatgtgtattttaggtaccgagttactctattcaacgaactatactatttcaactccggaggaactatctggacaggtaatacacaaacaactcatacattgtttgactatttcatcaatttctctgatgttatatttttcactatccatagatggcttgcctcccaaggaaagcatagaaagaagcaaggttacaaatacagaacagaacgacattgttatagacctcttccagaaaatcaatgcggtttgtgagcagatttattctcctcaatcctcgaactcggaagagaacattggccaattcatctacctagaaggaattgagtatctaatgtacaacacttacgatgtgcacttctattcttcatttgcacttctcagtctctttcctaagctcgcactcagtatccaaagagactttgcagcaacagttctgattcaagatccaaccaagaaaaagatcatgagctccggtgagtgggttacaagaaaacttcttggatctgttcctcatgatataggtctaaacgatccgtggctagaactaaacgaatataacttcttcaacacggatcgttggaaagacttgaacgccaagtttgttcttcaagtctacagagacgtggttgctactaacgatcagagttttgctaaagcggtttggccgtctgtttacacagcagttgcttacttagatcagttcgataaggacgaggacgggatgatcgaaaacgaagggtttccggatcagacatatgatgcttggagtgttacaggggttagtgcttattgtggcggtctttgggtcgctgctctacaagctgcgtctgcatttgctagtattgttggggaaaacgctgttgccatttacttcaatgcaaagtacgaaaaggcgaagattgtttacgagaagctatggaatggttcttacttcaattatgacgatagtggtagtggctcgagctcttcgattcttgctgatcagttggctggacaatggtaagactcaaccactgtgtttgtgtttctcattacttgtcccatacgctaatgaagtagcgattgttttgagtttttgttaggtatgcacgagcgtgtggattgaagccgataacgaaagaagaatggataaagaaagcactagagacgatctatgagttcaatgtgatgaaagttaaaggagggacacgaggcgcagtgaacggaatgtcaacggaaggaaaagtggatacaaattcgttggtttcaaaggaagtttgggctggtactacttactctgttgcagcttgtatgattcaagaagggcaaagagaaaaagggtttcagacagcaagtggaatctacgaggctatttggtctgatcgtggtctcaggtataagaaacatagctcactttctgcttcattatacaaaacaaaagtttcaaaaatcttattttctgtgagtgcagttgctcgtttcagacaccagaagcgtggaacatgaatgatgaatacagatctctgtgttatatgagacctcttgctatatgggctatacaatgggcattgacacgaacacaatcttttggagaagagaagcaaaagttagtggcaggagatgaagaagaagaaagtaatttgttgttaagacaacacaaagggttcaaagatgtggctcgttttgtgaaaatagtaccaacgagcaatgtgcatagaagccgtctccaacacacgtacgagaccgttctcaagactctccgcttgtaagcacaggatgcaacaattatatacatcataagttattatttgtcttgtgtatcattagcgtttcttgttaagtgaggaacaaaatctaaaattctgatagtaagacgtcacaagtcacactattatctctggttttgggaagacaaatcttttgaagcatgaacaacgaaaataaatataatagcttaactatcagcaacagttcaacagcttaaggtcaacagcgattacaatgaagcattcaaggagaaagagtcagattaagatccaccttttcataagaactgtcttaccctccaactgcgtgagtgcagcaggtctagcaactttgcaacatttgatgattctcttaacgtggagttgcgtaaacctggcttgcatcgtattgagcatacgcggactggggtgattgggttttcactggtgcggtccctggagcagtcgcatacactgcagcttgagttgcaggctgttgctcatatcctgtttgagtaggtgctgcttgtgaataagcggcttggcttcctggttccgcaccatatcgttagttaggatcttgagagcttgtgttgtatccatagttttgggtctgagatgtaccataagcaggctgtgaggttggatatgtgtatccaccggttggagctacttgcccaccgtacccagctgctgcagcctgctgtgcaccagtctggtcataggtggaagaagctggctgaacactttgctgctggtaagctggaccagttgcaggtgtttgtgtaccattgttgtaagcgtcagatggtggagcggaactataggaaggatatgtttgctgttgcactggcccatcacttgacgtgtagccatattgttgttgttgtggagccatgttagtactgccatatgacggtgctgctggagttgcaccttggtaaggcacatcaccggaagaagctgctgctgcaggctgtggaggcccatatccttgctggacaggaccttgttgcatcccataaggcctaacaccaggttgctgcatttggtaatagcctgactgaccaccacctgctggtggatatgaacctccataaggtggctgcatcggaggattactgtcatacttaggctgttcatacgtctgcccgtaagtctgctgataaccggtctgggagtaaggagcagcatgtccatactctgggccatggctctgaccgtaaccataacttacctgcgaaagagggggaccaccaaaggcaggggagggtacagggccagaaggaggtggaactgggccagcgctttgagctccttgtcttccataataattgtacggaccagaatacggaggtctttggtcccaatcagtaccatatccacctctaggaggcatatgctgtggaggatagccaccgaaaccgggagaattgtaatatgaaccttgagatgaatatggtccacgagggtggtaatcatagggatggggagcatgaggacctcgtgaaccccattgaggtggaccgcctggcccttggggacggtaggcaggctgattatagccaccggaataggatgatggccttgcattctacaaaaaaacacaacaatgaaacttcccatcagagacaatagagatcaaacatttcaaacagtaaatattatcagagaacatgattctattaggacaaagaagatgaaatccatggcacagcataaataatagatattactaaaaagtgagcaaagaacaaagcaagacagcatgaacaaaatggatctcatcacagcagtcaggtgcacatgacattcaaaagcaagtgccacacgtttaagactcctatatgcagtgacagctctaatcttacaaataacatgccaaactatttcaagtgaacagatttctttttgcctcagcttggcaccatagaataattgaaaccgcagtgatgcttggaaaaaaataaaattagatcttcatgtaatattatagccattttcccattacactctcccctagccattccatgtaagttcaggcatatcttatgcaattttgttacactaggttgcaaatcgagttacagaactcccccaatctcaatggtaaacattaggtgtgcatcttcaatgatgataatttaggaagagtaaacgtctcagaaaatgaagttctgcctgctagatttacactaaagtaatggtcctggagttggtaagtctcaaacctgcaagcctgaataacattgccagataccttcttctgtatacatcaatctactgaacaccaacgaggcaacgctgaccccatgtgaacggtaatagcgaattctgcatttttaaagccagcaccaattcgagatcggcaccttcaacattaaaaaaaatcatggcaaccgacatcgaggatgaaacatatattgttcttagcaagtttaaatgagcacatgagttttttcaagttagtgttcttatggcagcagtagatcaactaatccttacgggggggtgttcacagaacatgcagctatttaatgaccccaggagaaggtatgttgagaatacattttccatatatattagacgatggagagtaataaggatttcatagcttagcattattcgcaggagagtaacataaatctaagaaggaagcactatcttaaacagcacaacatgagtacattattcaggtaacacttaacagacctagctagttgtactgccagttatggaacatagcaatacgaacaaaaagtgcctacaaacactaaaacagatgatgggaaactttatgcaaacacacatatatattacctcaaacaaaatttatgcatagtaaaattgaagacagtatcaaccaccagcataacatcccaaccaaagacgaaatgaaacatatgtcgcattcaggcacatgatagcaacaaaccaaactcaagaaagaatgggagcatgcatcgttgagagtatagtattagaaacaaacctggttcataacatcttttatcatgtcagttgctatatcaatctgcatcttatctccagatatacggacagtcctctccttcaatccatcaccttctgcatgttgtggtattaactacacaacaaattttaaaatcagttgtcacatagaatgagacaaggtaaacacgtttcctaaaatttaaatactttcagtcagtttctatttttaacatcatacacaagtaaccacctgagtacgtgctcctgaccttgtctgcatattcttgattgtctcgccacctcggccaataatcagaccaacctgtcagttgaagctgaattagatatgattaaattgttgctggaaagaataaactagggaataccttatcatttggaactttaatctctatctgttctgggatccctatcgcatgagtggaaggatggcccctagcaactagggcaggtgaacctcctgcttcagcctaatgtagtacgagaagaaattcttgtaaccaaatatcttacagatacaaagatgccaaaactactgaaaaaaacaactgttaacctctgctatgactgcactgataagcttctcagcactttcaatgcatgcaacacttccaattatctccactggtcttaacgctgagctcggatcagcttctgaatccctcaaaatttggattttggcaccagagttaaactgaagataccgtatagtctccccacctttaccaatcaacacacctacctgcaaagcattgtgataagcacgtcagtgaaagtattccgaaagaaaaaaactcacagaacagccaaaaatgaaaaccaaatcatatcacctttgaacttgggacatctatcctacgagttgtcgactgtgtgccatcaacctccttctgagatttttcaccatccacttccttattttcttctttaccattctcttgagaactaccatcattcacttccttactatcgtcatcaatcaccttctgatgttcaccaccattgacatcctcaatacaaccttgttggttatcctcaggcttaacctgatcatctgttggctgatctacactacaaatcttattttcagactcatcagcatgaataggatcctgaacttcctcaacaagtggtacagaatcttgattctcttccttaggttcctgaagctgttcttcctcttttacctccattgaagacccattttcttgtgtattcccataatctacaacaaaggccgaagaacaacaatgagaaagactgatttatcaacaaactcaaagaaatctctttttttgaaaactataaccatagaacatcataaaaatcaaaactttagtttataagaagccaaagagacagaaacacctaaaccatcttgagcttcatcttctagcttcgctcgtttagcctgagaagaatcagatgtttgattgctatcatccacgatatttccattaagctcaacttcgtcgagctttcgcttgagatcgacaggcggcgtagagataacaacaaaatcttcctccgtcatctggaaacgaatcgtccggcgaggaatttagggaaagctgagtactgtagggtttggggaagaagagaattatctccggcagtgaaaagagtttgggttgcgactctgaacggtggtggagaagtaacgtttaaggctttaacgtctatttataatgttcgggcttttattgggcctaaaaatgggctaccagttttttttttaaagttatcaaaaataatgatgttttctttgttgatcgtcgaggggatgttgttgagacgatagcttctactcaaattttgtagaatcgacaacatagtagaaatttgtagggtctttatttccattgtagtggttttatcgactttggactatgtcctcctctctataatagtttacaagcttgaaaccccaatgaaatccataacaaaacccacatatagcttatgaaattcttaagatcaaacatagaaaaaggcttaccaactgggattttcagtctctgaacatacataaatcgctacggtaatcactctgcagtgtatcccacggttgggacacgactcacatacgcgatttcataagatggtaaactactacttatgcataggtacgacataaacacatgtatttgtattcttacggtacataaagtgatggacattgtatgattgattctccactgtgtctaggtattgtagaaaacggcttctcatctaaggctcaaaaccggccatgcgccaggcgatggtagagcagggcggatcacagggacccttcttacctctgtgaacacttcattgagtcgagcagcctgactcatcacccgcgacgccttctgcacagatcataaacaacccaagacgtgataatgatagaagtaaaccaacaccaaacaaataccaaccaagcaaagagatgtgcgctaagggaaaatatcaaatcacagcattttcagcggatgatgcctcagtatttttgtacttaattcagacagattacaagaacatattaactacaaaatctatatcttagaggggggtattggacataaattctagattttcaggtataataaaagaatttcgaatctttcttctcaattcaaataaatattttgcagtatttttaatagaattctactagaattaagaagataaattactgaaatcttttgttccacaatgctctttatcgggacagccaccatgcccaatctctaaaaactgtactttttccttcacaaacctcttaacccagaaacaatctacgttgacgtttacatgaaatggaagagatccatattttgacaacaacgacaacgacgtcatcacaacctccgctcatctgctctctatagattaacgcactctcctcatatataatcgaacgaatgatgatccgaagaataaaccggatcgaaatcacagattctaataaatgtgttaaacactctccctcagatttgagaattttttttgtatggttgaagcaaatcgatgaaagagaaaaaaaggatggatgtgttatattctatccaaatctcaactcaaaaactcagaatttgttcttcacattttagaccaatttttctattaaattcttgtgaagtaacgttgtcaaacaaaactaccgaaaactgaataacacttgcaactaatagaattaagaaatgagcaagttaaataacacaagaatttaaaagaatttgtgaaatgtctaattgaataacactagaatttaagattctattgaagtctatcaaattcatgcgtccaatacccccaccttaatataaggcaggacaagacaagaactaaactaaacttgaaattctacggctcaagtcagaccaattgcatcaacacaacatagagtgtagctaactcctaaaacgtatcaatctagaccagcttaccaacttcaagcaaaatgaaaacacaagggtcaatgataatatagtgtaccttatcgtcaatcgtaactttaagatggaacctttgagctttcttcttcatattatacaatctacgtcccaagagaaccaaacccatcacagcagcagccatagagacagaccaaaccggaccaatcctaaacacagagtacttaagaagcacaaatggcatcttccaccacacagtctctctacttttaccctcaccaccagaactcacgcctccaacttccacagtatctcctccacttccctcaattacttcactagaagcaactacactatcagaaacaacttctttttcaccattcacaaccccagaatctcgagaaaccaattcatttccccctaaatcagaacacaacttgctcgaatcctcaataggttcttcaacacccgattcgttctcaccgtgccttccatcaacgaattcttcgagattctctgtttcatagtgagatacggttccaccagttaattcagtagcagcttcgctctcaacatatttctcattggcagcttcaaaatcactaagcctaacctcaccatcacccaaaattccagtttctgaatcataaaccccaaattcatttctgacacaatcatcacccgattgactaacactgaactgatccaaaccagaatcaacactaacctcacccggattcagacactccgacccgtaatcaacccgaaaagaatcaaaataacccgattcaatcacccgatcagtagcagagaaatgatcagaaagaatcataccgtcatcgattacgcttgaactctctaatttcgtctccgatgtgattgaatcagttgattctgtatcagagccatgatgaagaagctcccaatcatccatgatgatcgaattcgaagatttcagattgggattgcaataatcagaaaccctaatggataaaaccccaaatattggaaaaggatcgcaacaaattagagcggttgatgatggaaaagaatggttcttatccactttgagaaagtaattacgtggaggtatctaattggttgcgtgtcaatctcagtcctcaactaaattttttggcattaaagtttagtagattcagagaactatagtatttattcattttgttctttcatttttattttattttttaaaacgatttaattaggattcggcaataaatcgtatggtgcggatcaaatgaattaaacaaatatgtatcggttaaaatagagtagacgatgtaagaaaaatatatataatcaagattcaaacggttgaggtgggttttgcaaataaatccatcggtagattgaaatattttcttatttattatttatagattagtatttataatagtactgaccaaaaatatagaaaaaaaaaatcggtaaaaactttagaccgattttatatagaaataaatttagtttataacggattattgtccgctccaaaattaaatggtttagtctctaatagtttagtttgtttcgaaaagaatggttcttatccactttgaggaagtagttatgtagaggtatctaattggtcacgtaacattctcagtactcaactagatcttttgacattaaaggttggtagattgagagaagtatggtatttattccttttgttctttcatttttttggtttttcacaatgatttaattagggttcacgacgaatcgtatggtgcagatcaaatgaattaatcaaatactagatgatttacccgaactatgtacagggagaaatagttatatgaaatatataaacaagtttttggaaacagattttatattatcacttgatatataagtgtgaatatttgaatatgatttagtaactgatatattttggagattttattagttaggaattaggatattctatatttggaataagattttaaattaaaatattgacccaaaagaaaatctgaaatatcattcctataattcagaaatatattcgaatattttttgtattttataagattttattttggaaacaattcaatataaaaactgaaaagagtatgaataattatgttttaaacgtaataaatttttgattatcttttattattcttcataattctatgtagttaggattgatttattgcatatcccttattttattaatcaatttatattgttacgataaggttttgggttgtaaataaattttaactaaaatgagtaaatgactaattaaattgaataaactgtgtaaaagttttaataaattgataaggtaaaaatttgaaaagaaataatattgaaagtaatcagtaagcggatacatttttaacatagattaatattgaaatattgttcatagtgaatgtgtaataaatgaaatgttactaactaatttatgtaaaactatgttccgaatatattcaagaatcatatgggctcacatatacatttagattttttgcaatttataacaaaaaaatagaatgtcatatatgttaaaattctaaatgttttctataaaacctaaaaaaataaagtacgaaacatataataaacatttatattatatgttgttcatcataatttatgatatatactttttacttgtttgctcaaatatatatggttttttgattaattttctttattaattgctactctcttaaatgtagaggaaaaatatgcataagtaccactaatggcattatatgtaattagtctagtaaatattggataactattaagtttgttgaaagtttttctggttacgacatgtcagcatgatagtcttgtaaatcacacgtgaatgtaaggttttttatttaaaatacttctcaattaatatataggggatgtatcagttaaaatagagtagacggtctaaaaccatctccaatgcacacctctatttttttctttcattttagagacaaatttattttagaggaaattagattttgctccaatgtattcttctaaaatagtttttttctccaaaatagagaaaataaatagattttactctttatatagattaaaacgtaagattcctttattttagagaaaaatctattttagagacatatattgaagcaaaatgtatctaacatagaatcacctctaaatggagaaaaaaaatagagatggacattggagatgtttagaagaatatagattcgagcggttgaggcgaataaatctttctgtagattgaaatgtttattatttattatgaataaattatcatataatagtgtaaaccaaaaattatagaaaaaaccccgctaaaactacatacccattttctagaaataaacttaggttacaacggattgttgtctaccccaaaatttggatggtgtaatctgctaatggtttagtccgcttcgagtaacatttaagcaaatcgttagtataaaatgggtaaaataagtgatactcaaatacatattaaataatgtcaactttaaaatattttaaatatttttcatgtttcaaataattttcttacaaaatatatcatttaaattcttaaagaataaacaaattttaacaagaaagtaaacgtgaaccatacttcaattcttagtccaaatgtagttcatacaaatatgacaataatttaacaaaaaataagaaaaagtattcttccgggttaaaaaaatagattcgatcaaacttaaggtcttttttgttaaagtcttcttttcgcaaaaacctaaaatctcctctcctttgtactctcaagcttcgttttttcttcttctccgtccaaatttctccatggatcgttctttgaatctcctcgatttagccttagggttcgatgagcagctagctattccatcgccactaaatggaaaagtaatactaatagaagactgtgtagagacgagtggttcctttgtacttcaccagctaatgaaacgtgttctctcctctaactcctccgacgcacttatctttctcgcttttgctcgccctttctctcattatgatcgaatcttgcgtaaactggtaaaagtttcaatcttttttactgttttgtctccatggctttctacaagggttgattctcagtgtcttactgtgttacagggatgtaatttagctacccataagtcgaataatcgattggtgttctttgacatgctcatggttaagtgttcaggtgagacttatcaggtaaaacaatctatttgattagcattagtgtttagctaatgcttaatgttacaataagcttagttagtctttgataaaaacaaacttaattttggatggtttggtagtggtgccttggctttagagagtgttaagatatctctagaacaaatcttcttactagtggttttggtaatcgatattgtttttgatcattggttcttctatgtaagtgactagttaattacatatagtagcaattgtctctgttctgtgcaaatcagattctgaaccaggaagttgtgttttgaacacaaaatgatgagtttttgtgaggctagcttagattctacctttagattctacttagattttggatggtttgggagtgccttggctttagcgagagagagtgaggatatctctagaacaaatcttcttactagttgtttcggttttggtgatcactgcctcttttatgtaagtgacaaattaattacatatagaagcagttttctgtgagtctattatctgcaaaacagattttgaaccaagaggttgtattgtgaacacaaatgatgagttttggtggagctagctttgattctatctcaatatattacttttataattaaacaaatctgattttatctacttgtggtgtgcgtttcattgttttgtgttgtgatctttaaacctttttgtaaggtaccactgccaataactctgtttctcagatatgtaaaaaactttattttactgaaaaaaatcttttagcagatggggatcaaatggaagacaatgtgagtgcagttgcgaaactatttcgggagatacaagaaaccgttcgaaagc

SEQ ID NO: 561 - DNA, 85907 bp, Arabidopsis thaliana
gaattcgcaattacagatcaaagaaacagagattcacgagacggagattgatgaaggaagttaaagagacggcgacaatgtgcttcttttcctcctctgtattttttttttcttggtatctccgtcgcctttgttttttactccgccgtatgtttttgtttctggtgaatctcaggttgaaaacagagtgaatgacagatttgccccttttgtcggctttgcacagacttgaatcgaccacttggtcggtccagagtttctcacctaactaaacaccctcacatctctctttttcttgtatcaaaccttaaataatgttgtaaacgttataattaggggtgttaaactatattttagtcccaaaatcttaatcctacaaacctaactaaacctagtaaataaatttgatttgatttaacttttttaaatttttttccatgattatcccattagccatttatgctcggactttcaatgttaagctgactgattgttatcaaaaattagtctcatgaaaaaaggataaaaaaggattattatcaaactgaataaagagatagtaaaactaaaattgatttggtttaactttttaaaaaattagatgagttttatttttttgctaatttatgtttattctttatttattattgtattgttaataaaattagatctataatatgtaattacaatttttatggttgaattcatttgtaactcaaaatatcaatttatatattttcatgtataaagctgattatttataagatttaatattttttcactatcataaatacatataacaacaatatatgatattttgatacaatttatgtgtaactatgttaattgtatggtttaaaatttgtctaactcgattataaataaattaattccttgttttatgtactgcaacaaattgtgatagacttatgattaaagtttgaattgacatcaactgaacaagatctcaagagtattcaaatgaagaaataaaaatatagcaaaaattgaatgtcatttaagtcaacacttttgaatattctatcattagaaatatgatcgtgtcttggatgatttgaaaacggtctaacttgaatatatatatatatatatataaactatttttttttttatgtattcttctaatatagtattccaacaacattgttatacactcatgattaaatgtatagaattgatataaactaataagatttcaagagtattcatatgaaaagaataaaaagaaagcaaaagttaaaatattatttaaatcaatacttttagatcttctatcattgcatatatatatccatataaaagaaatgatcgtgtattaaattatttggtagctctaatgtcttaaaggtttaatatttgaacaaacttgaatgtcaatgtcatcaaagactcaaaataaaattatatatatgaaagttgggcaattagtactataaagactataattttagtcattatagagtagtaattattgataataaaaaattattaaaataaaaagagtataataaaagtagtgcttaatttttaacataattttttatttatttatttatttttatttagaaaaaatcaattaagagtaggattgatgatacaattaagttgcttatttaatttttaatttaaaaaatataaaatgacacatgtcatttttcttgtgtgatgatgtgtcattcatatggagagagttggccaacttcatatatatgattataatcgagaaaaagagccaaaacgagttaggacatcttcaaaattactctttattttcaaatatgaattttttttgtactagaaaaataacttcaaaactttaaacttgactcccaaaaataacttcttttttttttttttgcatttcagcgcctacacttacttatacatcaaacaaataagtttactaatcttattgtttatcaatttaattcctaattttagatttcataactatttcacatatatccttataaatttaattttatacatataaaattaaataaacaaaataaatttaaagtattaatagaaaagaaatcctacatattttttttcttcacataacaatattatattaaacaaatttaatacaaaatgtagtaataaaagaaataaagttacatgaacacataaatgttacaagaaataaaatactacaacaatacaaaggtcaccaaagtattatatatatacaaatttgatgtgatcgaatgtttttttttttttttttgaattttgtttttgggtatcattcttagtagttcaaactgaataaactcattaatttttatttttattttgctagattttgcatatgttgttgagctatctcatagctctttcccttagttgctgcacttttattagtagattaagaatttattcatttgatgaaaacaaaatattaacatgtggtttattactttcggacaatgtgatgaaatttaattcaccctcatctctacttaaattgatttgaaatgaaaacatttatagagattgtgatgttagagagtacatatgatgcacaagtttattcagtgtttttgtattctatttggaagttgtgacttaatttgtgagtttattattattatttatatgtaattttatattgtaatgtaatgttttatttattaatcaatttgcttataatatttatttaatgtatgttttatagttatatatataagcttttatgaactaaacaatatgataactataatgcaaaatacaaattattttgaagttgaatttgaagttttatcattgacgagaacactttcaaactttaactatggagttctgcaactgacaaaagtaaaatatccatgtctgcttaaagaagtaattgatttcatttctaaaatcgtgatgatattccaatattttcggatccaaagatgatacagattttgcagaagaaataaaacgaactgcccaagagtaaaagtggacaaaaagataattaggagaaaaatggtatttttgcaaatttctctaaagttttagagttaaataaggattattaatttttccttttttttacctgaaaaatagttgagtcattgttagtttgttactcattttacttataaaacttttaatcatttttacttgaattacatttggatatatcatatatgaaaataataatatctttggtgtgtataaaacttctagaacatgaaaatttatcaatcgtgagttgaatgtttcactaaactttttaaacaattaaaagaatgacaaatatagatttccataaatgaaaaaaaaagaatggacttgcatattttcatgtgtgtatatatgtattttatttttaacacttttggcatacctctttaattaattggttaacttctaaatattactatttgagaagtgagtttacaacgaaatttgaaaattaaagctgtgaaaatgaaagttggaatgtaaataaaacccgtcttaaaattaccttttactttgggagatttgcaaaactaccttttttgtttttttactatttttcactaaaaataatatttcattaaataaaaaactatatatagtagtcaagaaaatatttttgggttataaatataaaggttgtaaaaaataaaaataaaaaaaaacaaatatgtgaattttaggcccgaatatttactttctgagcccatttgtaagcccacttcctaaaccgagttttataaaataataaaaaaaaacagaaataaatagtcaaccgactcaaaataaaccactatttagacgccacgtgtacccagaacaaaacgtatggcctgtgtatctctcacgccacctctatttttcttctgcctcctcgaaccttctttttctcacttctcataaaaaaggtcatttcaaaaaaaaatcagaaaccgtcaaaaagccaccgttgatatttcttccttgttgcttcttcaatggcgtcgttcgacgaagcacctcccggaaaccccaaagccggtgaaaagatcttcagaaccaagtgcgctcagtgtcacaccgtcgagaaaggtgccggtcacaaacaaggtctgttcctctgattctctcttagatccacaatattctgtatcatcatcgtttgattttatttggttacgctttgttcgaatctggatctaccacatgcgtttcgttttctcgtattgatcttcgtttgtgtttgtttaggatccgtatgtctttattttgaattttggaattttgttatgaattcaggaccgaatttgaatggattgtttggaagacaatctggaacaactccaggatattcttactctgctgctaacaaaagcatggctgtgaattgggaggagaagactctttacgattacttgttgaatcctaagaaggtatttgattgctctttaatctttaatggacttcgatcatagagtctggtgattaaggttcttgattgttcataagctaatttgtggattagtggtctttagttttagaatatttgttgcaaaaggaattatgagtctttataccttcttaagtattgttaggttgatctagaaacacaatttgtttgttcatttcggtttggtgcaaaaatctccatatttgtgaaattggacatcatctttcaaaatggtacactaataagtgcaacatctcaatgttgtgccatttgttttctattgcatgttcaagaatatcaagcaattagcaacatttgttttggttaatacttgagtctttccttcactcttgtctattgtctctttattgagctgatttgtggaattttccacaaatcttatgattcatctttcactctttaagctggtgcatcataacctgtgtgtgcatcatcatctcaacagtgttccaatttattatattgcatattctagaatatcgaaacataatattgtctgtcaagaaaatgctgtttggctaatactgactcctttcttcacacttttgggtcgcttgtttctttttgagcaattatgaagagataagatctcaatttgattgaattggtgtggaatttctttgcttgttacagtacatccctggaacaaaaatggtgtttcctggactgaaaaaaccgcaagatcgtgccgatctcatcgcttatttgaaggaaggtactgcttagacaggctcgtccagatatatgaagctggcatttttttttctcacagctaaataaaatcagaccaaaaatattatggtcatgaactgctttttgtatggtcttttattctttctttctttttacgttgttgaagaggctagttgcctcttataaagtggaatattcgttattgatgtgaagagctaagaaccaatttccaccacgatagtcatgagattttcctaattcaacttgcctacttttgttacgagtttagaatctttttttcagttgttcattttcatttcaataattagacaaatacgtaagagatgcgcataattcagctaaatcagtagaacataaaagacaacataaaggaaaatctgacagtgttacattcattttggaagataaagttgaagcattttggcataaaataaaaatggtggatcattacgagttgccatatgataagtggcataaaagattatttaccacctaagatgcatatataaagtgaattcctatgcagcatagtggttctataattaatgcatattattagattttattaccccacaagaacatttgccacatttaagcttcaagaacagcttttggttctttacttggaagcttgcagcctaatgaagagtcttgcagagatcttggtttgtctctcaaaactccttccccaaatactcgcaagcaagattgacctgtttttttatttttctttgtctaaatatcattgggatatcctactatattatttgggaagtacattttaaatataacctttgtaagtaattacataagtatgccattagaaataaaatttaaagagtaaattaattcatctctttaaaaatttaagttaaatactaatttaattaaaaaacgaaatacattattaatttccaaaaaagtaaccaatcaaaatcaacaaattagatttgatatctaaattttatattaattttttattaattattatagttcacctctcatctttatatgattctatttttgcgaaaaaataatatcatcgttataaaaaaataattagagttgcttcgcatataccataatttgaatttttaaaaacgaatataaactgttcaatacataaaaaatattataacggatcaaaaatagatttaagaaaattttctactgagtattgggtcataatttgaatatttatattcaatttcatacatattattttaaaaatttttaatcttatatactacaataattaataacatattagattttttttatgtgtatgatgtgattcaatatttaatagaagctggaaaatcctagaattgacgggtttaagggcttgattggttctccctttaccacccgcaaacgcagcgtttgcgattggtagcgattgttagcgattgacaccaatcatagaaaccgctagacatcgctttggaccgctcgaaatcgcccgttttcaaaagctccttcccgcaagcgtttgcggttgcgggcggtagcggttaggttaaaaaaataatatttttttaattaaattaaataatggtggcttccacccaaattctaatcactataattaaaataatctaatcttttatatatcttatttttatcagaaaaccttaatcaatatattgtaaccttattatctcaattatggcattcgatgaaaatcaaaatcaagaatcaaacataactatcatctatccttttattcattcattagctagtgtaattctttaactatttcatagcatcgttgtttattcattcaatagtttagttgttttggatatttaggtccaaatttaattgacatatttagatttataattataatcttagataattagataatattacgattaaatataattaatattttggatgttaaattaatgtttgggtttttgaatactctttttgggtaacgggtaatttccgggccaatcggatatccacgggtttactaaaactctacccaataaggaattttcaaaacgcttgataacgcttgaaaccgcaaccgcccgtttccgcaaactcccgcaaccgcaaccgcacccgctgcgtttaaaacagtcaggccctaaatcgatattaatacaagatggtatactacatgtgaaactctaaaattaacaatcaaaatacaagtgtataattttaaacactaaataatatgtttttttaaacactaaatttttttgaataaaaagtagttagtaaaacatatgttttttttaaagagtttttagataattaaatcagagaatattgggcatatgagtaacccattcgagttcgggtagaacccgttcgggtttgggattaatgggtatatgatttactacccaatagaataattataaatattcggttctggttcgggtctgatccagttgggtttgggtcagtttggataaaaagtttcagaccctaaaaatacccaaaaaaatagaaacggtaaatttgtatgtagatagcgcatctccaaacaaaaaaaacttttaaatttgttaagttttaataaatttaattatatctgaatatattttactaaattttgacaaacataataaataatttttgaatagtttagttgttttggatatttaggtccaaatttaattgacatatttagatttataattataatcttagataattagataatattacgattaaatataattaatattttggatattaaattaatgtttgggtttttgaatactctttttgggtaacgggtaatttccgggccaatcggatatccacgggtttactaaaactctatccaataaggaattttcctaaaaatttaacccgccctaacccaattttttggttcgggtattgggttggttatcggatccgttttttcgtcacccatatcaaagataatctaatataggccttaattaggtccacaaatataacaaaaatagtatacaaagactaattctaagttaggccaaaaattagatcctctaatacaaagaaaacatgtttcttaccaaaacaacttgtatacaaattttacacatttacttaaaactacatatattatatttattataaaaacaacatttttaaacaaaatcaatccaatgcaacattatatgcaaatagtaaaaacagtaaataatattatggcataacttttatactatacaatttcttatgtaattcaaacaaaagtatacaatttaatttatacaaaatattaatgtccgtgttgtatagcacgcgttatgatctagtttttgtgtataaatcaatgtactatcagatccattttatagtagctttggtgtaatattgatgatatatatactacatatttgaaagttagatttttcatatatcgatcagactgattttaccttttctctttgctatcgcaaaacggcggcgtatcagtaggcggtattcaacaagtttgtaatggctgcttctttatccaattcttttatgtatatggaacgataatgtgttcacaattcgcttgggaaattcaagatcattccaaattgcacgaccaacaaaagaaaccaaaaacatgtcttcgatggtcaaaactatgccaacacgtgtaatttctagccttattgagacaacactttttgttaaaactttatcttcttttcctaaacaaaggatatattaatttctaagtcgaaatttttcgattagtacgagcgttacatatatggctaagaccagattcaccagaaagaaagaggctaataaaacaatcctcttgcctgacttgtgggtcactcattaccaaatcagtagaagcggtcgagctattaatccgatatattcataatcttatatgcattgattacgcttacatatgtcttcatgtgattctgttgcatttacttatcctttcatggcatctataacctcttgtgtttgatttgtgattttaagctgaattatatatgatttttatttagatatgtgatgatacgtttgtatttggagctttttaggtttaattagtttgtaacacaactcttgtacttttgggattgaatgagtttcttatataacaatctctatagtgttactgatctatatgctaagatgtatgagtatattaatactgtatattgtgagatttgcaacattttggaattttggttttcggacaagtgagatttcatcttgtagaaaatgtatgatgacacgagtctggattgtaaaatttagtatcattagaagaatcataagctgtagatttcatttcaaattcgtgtttatccacttatgtggcaaattgctcatattcgagccctagcttattgctaataagaaaaccattcaacctatgaattatgagtaactcgtgttgtgtgcattagtagtttacttttcatggacttttttttatgcatgtcatattaatctacttgctaagtttgaagtagggttagagtttttttaatttactttgctgttaaataccctactattgaagctaaagggtttgagatttttcctataaattaggtatttttgcaattgaaaaaattattctctattcgatttttatacccatgactctaggtgagattcgaaatccaaaataaaaactatatcactaatcgagtgaaggataaattttgtacaaacttcacactatcacactatattagtgcaaattggatacataatttgaaataattaaacaactaatctattaagctaactttaatgggaagaaatacataccctagagaaagatggagaaattcatgagtatcacaaatattgagtgcctactatatgtgctctttcacttagccattaaggttgtgtaaatttgtttagttgtttttttcactataattagctaccactaataataactagtgataacaatagtagtaggagtaatcaattatatctttaatagttgaagaaaagaaagtgtcgtcatttattcaacgcaaaaatggattaatgtaattagccaatgtgaatatttcaacgttaattcctgctcaatctaaatcagtccattatagttaacttaatccgaattatatcgaacaatttcttacgttaattattctcgcagatgaacatttcgtcaacttcttaaaaaaaaaaaaacaatggtttaaacaaaacaaatctgtcaataatccaaagatttcggtattttttataactcatcattgtaagcattaataagatttattttttcttattttttcactagtttcttttctccaaaaaataaatcttattaatgcttacaacgatgatccacaagaaataccaaaatctttggatcattgacagatttgttttgtttaaactttttttttttggtttttttactgttttaaaaagttgacaaaatattcatctgagagaataattgacgtaataaatcgttcgatatagttcggattaagttaactgtaacggactgattttgattgagcaggaattaacgctgaaatattcacattggctaattacatcaacccgtttttgcgttgattaaatgacgacactttcttttcttcgactattaaatgatactcttattcatatcatgaattaataattatataattaaacttatatatatatatatatatatatatattataactttataagtttataaagttatattatatgtaagacaatttagtggtatatgactatagtattgtttgtattccttaaatttgtattaattcttggtagtgttcttttttcttttttaacgtaataattattttttacttgtaattggttataaaagaatattaattataacgaaaagctaatctttagatagaaaagttttaaaaaaaatataaattagtcaaatctctatataaattaataattattaaattttaataacttttagcttcttctataatttttaattattactttattcgatagatttcgtacctttataaattacaaaaatttccagtgtccagcaattattattaatttatagtagttttactctattttcacttacttaatttcaatatcctgcttcagacttatataataagacataataataataaaaaaaaattaacccgattctatgtgatggccaaattaactaaaatctagattttcttggtttgcgttcgggcgtaataaaagatggaaaaatatagaaagtgattttaatctttttactctgttttcttcttgtattgccaactccttaacacgagctagagtttgttaattctgtttattcataaacggacaaagcgaaacaagtgagtagagccacacgacgactttggcattgtccagtgatggctgcttcaagtcttagtctgttgtgaaggtttccacattcctggtatctgtaacaaacgaatcatataatcagacttttaagactaaagttgcaaagaaagagtgatactgatacacaacacagccacaaacctcaacaccatgaggaccaattctgttacgtgatatgaaattcagaactagattcgcaaactcctccggtacatcttcctgtattccacgtatatcatcattgcataaaagactcgacataaagatcattaggcgatcgcatttatacctgtatggcatgtccggtgtgtttgaccacaatcatctgaaactttccttgcatttgaccaattgtgagggtcctaatccaatccatcaacatcgttattacaaaacactacagatttcgattcaatttaagttgagacctgagttccagaggggggtagaggaatatacctgtccaacctatcagttccagctaatagcaagagtttcggaactggggatgacaaaaacttctctgagagaccatcgtacctgcagggcaactaacattgttcgaatcaaaaactattcaagagaggtaaatgtttgcactcagattcacaacggcaactgttgcaactaacaactcttaatattcaaccgtctcaggaatacaagaggtaatgatggtcataccagcctttccaatattgctctgtttcctctagacgtgttcggtaaacgtagctggacaaaggttcatatttccactcattatgaagcaaaaatgtgaaccctcaaaacaggaaaaatcagtaacaatacgcaccaatgctttgaatcatcatatttgagagttgtggggatagagacacgggctgaatcaatgtttcttaatgaccctcctctaacgctgtattcaatctgcaaagatgaatcaagtccaactgatttgttattaaactttggtttgtaatatatgcatttctttgcagcttataggtatccatttttttgcttcgtttacaaaggattagctttagctcaatatagagaaatcatggcgataaggggagactttgaaagctgaaaggccaaaattttcattgacaatgcttgatgtctttttcgtatatacaatcaagcgttcaaaatttgcttactgctttttcgatgctgggaaaatgttgcattctgtttgaaagaattttctgcatgtgaatcaatgaggaaatagcagtaccctgtaatgaaagtactttggtcatttcatctcacgagagtgcagaccaagtgagacttttctataagaaagcaaacctcaacaacatccacaacgacaagcccagccaagctaggcaatgttttgtttgcagcaacttgcacagcgaccgaacctcccatgctgtgtgttaataacatgaaaccaattcatgaacacagaacactggatcacactacttttatcctacaaatttatgcatgtgtctatcactacaaccctataccgaacgaagcctataaatgttccatacttaagaatctaaaacataaccatagtgtcagtagacaaattgttgtacaggtagatcataaacaactaaaatcttaaactttcttacaaatgttacaggtgtgaaaatatattcgcaggcgcactggaaaaatattgatgtactcactattgaccagccatttacacgttaagatagagatcgaaaacagcataccgatatgacaaaataaaatagagaaagagaaaaaacctgtgaccaactagcacaatagctggaggagagtctccatacaattccttaatgacagccaaaacatcattgctcattgtctgcattttcatcttactacatcagtctcaattctcaaagaccagctaatgtataattccataagcaaatccagactctcaaaaagaacagggatgtcatacctcaagcgataactccaattcgttctccgaaaccgatttaccgtgccctctcaagtccatcgcaaccacacgtgctttctccttaattttacttgctactatagaaaacgagagcctaacaagaacagatgaaaccattatacaatgtatgccaatctagtttcatattatatatacatgctaagctgaaagaagtgagttctcattaaacactcacccagagtagccaccaccatggagacaaaagacaacaggtccttcatttcctgccatatacacatgaaacacctaaaaaatgataatacactccattagagaccaaaaccaaaaactttctagaaacttagatatcaaactcgttaaacgttacatcatcagagccagtgattgatatatcatcttctttatcaaaatagcttttccattctacaggcgaatacttctccgacgaattcctgaaacaacaaaaaccaatttcacgatgaaaacgagatcggaaggagaattgagaattgaaactgaaactaacgtagaaggaggacgaagaggacgagcggcgaagacagacgccggagcttctatgggttctaaatgttcctctgaggtatcttcacgaagaggattcaaatttgaagacgaatccattgttgaaagctttttagaaactgatcaaaatcgaatataataatctcacagatcttctcagtatcactcttcttcttcttcttcttctacaatttgcttttttcagttttcagtcaaaattcaataggaaggtgacacctcgatggacgtagaatagtatgggcttttatctcttgttgggccattttaggcccatatgatttaatatcacttgtctcacccaccatgcagttttcaactttcaacgggtcaatatgactaacaaaaagggtcgtcaattgtgggaaaagagtagtgtttgtttagttccaagtccgacttagaagttagaagtgattttggatccaaaatgttgttttatgatgatttataagaaatttgaagaaagaaaatatagaacttttccgaaatagggttagaatctccagggtgcaaataagattttgtgggaaaaaagtagtgtttgtttagttccgagtctgacttagaagtgattttggatccaatatattgtttttatgtcgatattagaaatttgaggaaaaaaaatgtagaacttttccgaaatagggttagaactctccggagtgtaaataagatttcgtgggaaaagaatagtgtttgtttagtttcgagtctgacttagaagtgattttggatccaatatgttatatttatgtcgatattagaaatttgaggaaaaaaatgtaaaacttctccgaaatagggttagaactctctgggatgcaaataagattgtgaggactaactcgatcaagagattttgttaaaggatgaacagaagaaagatgttggctttgttcgtttgccggtcgttgtttgtttgacggtctatgtgttgttcgttagagagttgctttgattatagtaattatccgtcaaagtttatgttattaagtttaagtcaaacttacaaagattgaatatatgacataacttatgtattaaaacaacaatttacatcagttccattagtgattctattaaatagatgaccataaactatgtataaaaagactacaattttttaaaaaatttatattaaaatatacacaaatggaccttggctttcgctttacaattcaatatccagttataaaatgccaaaacggtaaagaagaccggaatcggaaaaagagatcggacctctgctgatggacgcaaacaaaagtgaccagagccttagatccggcgtactcaagatttcaaacttctctgatgcctcgaaagatcgatgaccaccgccggaagagaggcaaagattgcttgggacattatttcctcatataaagctggtggtggtttactacttgaatgataaatttaacaatctaaaattgtgaatgtgaggttaaaagttttaaaattatgagatcgaaaaactcaaaatttgatgtgaatgctctaattgttgtttatttgtttttctcttttaaatgttttttagtaagacaataacttagtaacgtacaaaatttcacgtttatggtatgtgccttaaaatatagtttgtaggaagaaaatgtccactgtttttttttctgtttttttttttccgattttacaatatgccaaacctcaacaaccaagggtcctaccataccctatcttatttcttcaattgttttgctaccaaaagaaatctagatcttgataaaataaagcttgctattcttcaatatatcaaaccccttctctttgctttctcacactgaaatcaaactcctttggtaatactactctcacttttgcttaaatattaatatgatcttcttcatacatatatttgtgtcatcatcagtttcaagcttttctcgttttcttatttccctctctgtctctccgcaaataaccataattctcagcttttaatagtagttactctgcaggagttgtttctccactcaaaagctgacatcattttcttaataaatctcaatctcatatgcaaaattttcaaactttagcttatcttttggattttgttttccacttttcatggtacttatcaagctttctcatagtaaaaaaaaaaaatccttttgcaatacatgtttccatttaaagtttatgtatcttttttgttccatgtgttataaactctttccatgaccagagaatcttaatctccttataggtaattaaagatggagaagaatggtcacacggaaagtgaacttcaaactcaaatggtaattcatttgtctttttatatcaaatagttaaatctttcaaaaaaaataaaatcatcgtcatgtcacaatcaaattacgtgtctaaaagtattttggaccattcgtttcctaaatagtaatgaagaatgtgaactcttgctagctttttactcttgaaaagtatgtcagtgtcatttttatttcaaagaaaaaaaaaaaaatcttatttgtttcctttgtcaacacctgtttacttacaattttactatatttcacgttatctttgaatttgttttcgtgtagtttaacctcttggtggttcatatgagtttaaacatcagatcatgcgttctaatactaacttaataatgcaataagttttaaaaaatgttttatcacagaaagataaaacaaaatgaagatattaagtatctgcctacttcgaataaagtggaagatgatatataataaggtctctcgaacaaaatggatggtaattagaggtcttgaatatattaactctatatataaactaatgagactacattaaaattatccaccaagtggagtttgcattagtaaacatatatattaactaatgatatagttattaatctatcaaattaatatgaaaatcattagtgaaaatgacaataaaatgagctgaaattggtaacgttgcaccatcacgataaatattaccaatttaccatgctatttatggcactagttatactatattgtggtaaaaagttgatccaaaatagaagaattgactgtacgaaattgtatactaccacttttgtacaataatcatttgagactgtatatagtatacttaggtattatattttaagcctagtttaaaattttaaatttctttttctataccaacatttttactaatcaaatttatatttgtatcattctatggtcattttctttttaccgtcatttcttactcgtactatctttaatatctctccattgccatttttcttccgccaaaagaaattttcattcttgtcttgtccccaatggggattccaagagtggggacagtagagagttatggaagagcctttagagggtttaaagatgaagctttgttctttgctaaaataaaatttacactttcctaaagaacataattagagcaagcgactctggattaggcagtgttgcagttgttcttcgataaaccctccccactggccacaatgtcgtcgcaccgactcgccactgcctccgccactcgtaatctccccagacccgaaaccacaatatgtaatattagtttcgtcccaagcgtcattcgaaccgacgacttctaaacttcgcctaggatttttatcaattgagctaacaacacttggtcatctttattattcttttgtttataaaacatttcttcataatcaaaacaccatttttgaatccttaagttattaattcattatgcggaacggtcaaagggaaactgaacttcaaactcaaaatggtagtagtaattatatctttgtctttctatatcaaattgttgatgttctgtctcatgtcacaagatagttatgacttatgaacatgaaacatttggtactaaatacgacaattttttctttgattattgatataatcatgcatgttaagcaaaatttgattatgaaattttttaggttggaaatgagagactacctcaagtaacgtggcaacggaagttgaacagcaaagtgaagaacccttctgagttcaagatgagtataagagatgttcttcatctggtacattctttttatagttagctaaaatcaaaatgacaaaagtttataagacaaaaattttttttttgatgtttggatattaaaacttgtggcttttttgaagtttcctctaggctatagattgtggcgttacactaaagaagaggcaaaaaaaggaagagtgagttgctttatattcacaaaaacatttgtcttttgaaacaaattctcaaacgttatcttcttaatttactagttttcgatgtacgatatcttcaaaaagcgccatgtaagaggcgaccatggtgtcccattaggtggaattgggtatgtataaacacatgataagatcactttttttctataagcaacatgttgatcttctctaggaatgttgtaaattttacacaaacgcgtatttttagtggaggaagcatcggaaggagttacaaaggtgaatttcagcagtttaagctcttccctaaaatttgtgaagaagctccaatcctcacaaaccagttctctgtaagtctctcttgtactcacacttacaatcacaaagatatacttacttgttgattacgttttgataatgtttaggtttttgtgtcgagacccggtggcttgagctactccactgttctatgcccaacaaagccaaaatctgtaaagtaagccacttaatagctttgtagcttattataacagttataacttatgctgtatatgtagaggtaaaacagaggatttaggaatagaatcatgggactggaacatggaaggggacaaatctacctatcatgctttgtatccaaggtcttggaccgtatacaacggtatgaaatgacataattatggttcattatagatcaaaatgtttcagattcatgatttctaaagattatagtgaaatgtgttcactttggagaacagagcctgaccctgaactcagaatagtttctcgtcaagtgtcgccttttatacctcataactacaaggaaagcagtcttccggtatcggttttcgaatttacggtaagaatattccgagaagaggaaagaatcttctttttatatgactttatctcaggacatcataacacttttgtaactttttggctaatgtttcatagatgagtaaccttggaaaagaagaagcaacggttactttgctctttacttgggaggtaacttatttcaaacaaaatgatgactatctgtttcatatcttttgaattttcaagaccatttttgtttgtgtgcttacttagaactcagtgggaggagcttctggtttaactggagaacacttcaactcaacaataatgtaagaatctacatctcaatctctattgtcacagcttctgttctttagctctgacttctaacacaagaaactgatttttgatgtgatacatcagggaaagagatggagtacatgcaatagttttacatcacaagtaaacctcttttacttgagccttaagtaactgaaaaatcatctgttttagccatttgaagcggggtttagtgccggtttccggaagatttattgcgtcgatatattgcaactgtgatgaaatgaaaacttgcaggacgggcaatggacatccgccagttacttacgctattgcagcgcaagaaacagaggatgttcatgtctctgagtgtccatgcttcttagtttctggtcactctcctaaagaaatcacagcaaaagagatgtgggatgagattaaaaaggtttcatatctttttgttcacttcttccgcaaccttttttccaaatctattcaaagaaagctctaaatgttttgaattctctttcagaacaaatcattcgacgagttaaacagcgaaccaggctcaccttcgagacccggaacatccattggagcagccatagctgctaaagtgaaggttcctccaggttgtgaccgtactgtcacgttttcactctcatgggactgtcctgaggtgcggttcaatgaaaagacttaccacaggtgtgacttcttgattcaaatttccttgtatatatatagtttcatcttaacctaatgtgattactcatactatacagacgatacacaaaattctatggcaacttagggatgcagcagtgaaaatggcccgcgacgctcttctaagtacgcgtgcaatttgcttttgttttcggtttcctctttggttttacttgcaaaaaagtttcatatgatgtttctttttcttgaaacacaagattacgttgattgggagtctcagattgaagcatggcaaagccctattctctcagacactacacttcctgactggtaaactctatattactttcaagcttctcttctactccgcaatcgataaccgatgtgtattttaggtaccgagttactctattcaacgaactatactatttcaactccggaggaactatctggacaggtaatacacaaacaactcatacattgtttgactatttcatcaatttctctgatgttatatttttcactatccatagatggcttgcctcccaaggaaagcatagaaagaagcaaggttacaaatacagaacagaacgacattgttatagacctcttccagaaaatcaatgcggtttgtgagcagatttattctcctcaatcctcgaactcggaagagaacattggccaattcatctacctagaaggaattgagtatctaatgtacaacacttacgatgtgcacttctattcttcatttgcacttctcagtctctttcctaagctcgcactcagtatccaaagagactttgcagcaacagttctgattcaagatccaaccaagaaaaagatcatgagctccggtgagtgggttacaagaaaacttcttggatctgttcctcatgatataggtctaaacgatccgtggctagaactaaacgaatataacttcttcaacacggatcgttggaaagacttgaacgccaagtttgttcttcaagtctacagagacgtggttgctactaacgatcagagttttgctaaagcggtttggccgtctgtttacacagcagttgcttacttagatcagttcgataaggacgaggacgggatgatcgaaaacgaagggtttccggatcagacatatgatgcttggagtgttacaggggttagtgcttattgtggcggtctttgggtcgctgctctacaagctgcgtctgcatttgctagtattgttggggaaaacgctgttgccatttacttcaatgcaaagtacgaaaaggcgaagattgtttacgagaagctatggaatggttcttacttcaattatgacgatagtggtagtggctcgagctcttcgattcttgctgatcagttggctggacaatggtaagactcaaccactgtgtttgtgtttctcattacttgtcccatacgctaatgaagtagcgattgttttgagtttttgttaggtatgcacgagcgtgtggattgaagccgataacgaaagaagaatggataaagaaagcactagagacgatctatgagttcaatgtgatgaaagttaaaggagggacacgaggcgcagtgaacggaatgtcaacggaaggaaaagtggatacaaattcgttggtttcaaaggaagtttgggctggtactacttactctgttgcagcttgtatgattcaagaagggcaaagagaaaaagggtttcagacagcaagtggaatctacgaggctatttggtctgatcgtggtctcaggtataagaaacatagctcactttctgcttcattatacaaaacaaaagtttcaaaaatcttattttctgtgagtgcagttgctcgtttcagacaccagaagcgtggaacatgaatgatgaatacagatctctgtgttatatgagacctcttgctatatgggctatacaatgggcattgacacgaacacaatcttttggagaagagaagcaaaagttagtggcaggagatgaagaagaagaaagtaatttgttgttaagacaacacaaagggttcaaagatgtggctcgttttgtgaaaatagtaccaacgagcaatgtgcatagaagccgtctccaacacacgtacgagaccgttctcaagactctccgcttgtaagcacaggatgcaacaattatatacatcataagttattatttgtcttgtgtatcattagcgtttcttgttaagtgaggaacaaaatctaaaattctgatagtaagacgtcacaagtcacactattatctctggttttgggaagacaaatcttttgaagcatgaacaacgaaaataaatataatagcttaactatcagcaacagttcaacagcttaaggtcaacagcgattacaatgaagcattcaaggagaaagagtcagattaagatccaccttttcataagaactgtcttaccctccaactgcgtgagtgcagcaggtctagcaactttgcaacatttgatgattctcttaacgtggagttgcgtaaacctggcttgcatcgtattgagcatacgcggactggggtgattgggttttcactggtgcggtccctggagcagtcgcatacactgcagcttgagttgcaggctgttgctcatatcctgtttgagtaggtgctgcttgtgaataagcggcttggcttcctggttccgcaccatatcgttagttaggatcttgagagcttgtgttgtatccatagttttgggtctgagatgtaccataagcaggctgtgaggttggatatgtgtatccaccggttggagctacttgcccaccgtacccagctgctgcagcctgctgtgcaccagtctggtcataggtggaagaagctggctgaacactttgctgctggtaagctggaccagttgcaggtgtttgtgtaccattgttgtaagcgtcagatggtggagcggaactataggaaggatatgtttgctgttgcactggcccatcacttgacgtgtagccatattgttgttgttgtggagccatgttagtactgccatatgacggtgctgctggagttgcaccttggtaaggcacatcaccggaagaagctgctgctgcaggctgtggaggcccatatccttgctggacaggaccttgttgcatcccataaggcctaacaccaggttgctgcatttggtaatagcctgactgaccaccacctgctggtggatatgaacctccataaggtggctgcatcggaggattactgtcatacttaggctgttcatacgtctgcccgtaagtctgctgataaccggtctgggagtaaggagcagcatgtccatactctgggccatggctctgaccgtaaccataacttacctgcgaaagagggggaccaccaaaggcaggggagggtacagggccagaaggaggtggaactgggccagcgctttgagctccttgtcttccataataattgtacggaccagaatacggaggtctttggtcccaatcagtaccatatccacctctaggaggcatatgctgtggaggatagccaccgaaaccgggagaattgtaatatgaaccttgagatgaatatggtccacgagggtggtaatcatagggatggggagcatgaggacctcgtgaaccccattgaggtggaccgcctggcccttggggacggtaggcaggctgattatagccaccggaataggatgatggccttgcattctacaaaaaaacacaacaatgaaacttcccatcagagacaatagagatcaaacatttcaaacagtaaatattatcagagaacatgattctattaggacaaagaagatgaaatccatggcacagcataaataatagatattactaaaaagtgagcaaagaacaaagcaagacagcatgaacaaaatggatctcatcacagcagtcaggtgcacatgacattcaaaagcaagtgccacacgtttaagactcctatatgcagtgacagctctaatcttacaaataacatgccaaactatttcaagtgaacagatttctttttgcctcagcttggcaccatagaataattgaaaccgcagtgatgcttggaaaaaaataaaattagatcttcatgtaatattatagccattttcccattacactctcccctagccattccatgtaagttcaggcatatcttatgcaattttgttacactaggttgcaaatcgagttacagaactcccccaatctcaatggtaaacattaggtgtgcatcttcaatgatgataatttaggaagagtaaacgtctcagaaaatgaagttctgcctgctagatttacactaaagtaatggtcctggagttggtaagtctcaaacctgcaagcctgaataacattgccagataccttcttctgtatacatcaatctactgaacaccaacgaggcaacgctgaccccatgtgaacggtaatagcgaattctgcatttttaaagccagcaccaattcgagatcggcaccttcaacattaaaaaaaatcatggcaaccgacatcgaggatgaaacatatattgttcttagcaagtttaaatgagcacatgagttttttcaagttagtgttcttatggcagcagtagatcaactaatccttacgggggggtgttcacagaacatgcagctatttaatgaccccaggagaaggtatgttgagaatacattttccatatatattagacgatggagagtaataaggatttcatagcttagcattattcgcaggagagtaacataaatctaagaaggaagcactatcttaaacagcacaacatgagtacattattcaggtaacacttaacagacctagctagttgtactgccagttatggaacatagcaatacgaacaaaaagtgcctacaaacactaaaacagatgatgggaaactttatgcaaacacacatatatattacctcaaacaaaatttatgcatagtaaaattgaagacagtatcaaccaccagcataacatcccaaccaaagacgaaatgaaacatatgtcgcattcaggcacatgatagcaacaaaccaaactcaagaaagaatgggagcatgcatcgttgagagtatagtattagaaacaaacctggttcataacatcttttatcatgtcagttgctatatcaatctgcatcttatctccagatatacggacagtcctctccttcaatccatcaccttctgcatgttgtggtattaactacacaacaaattttaaaatcagttgtcacatagaatgagacaaggtaaacacgtttcctaaaatttaaatactttcagtcagtttctatttttaacatcatacacaagtaaccacctgagtacgtgctcctgaccttgtctgcatattcttgattgtctcgccacctcggccaataatcagaccaacctgtcagttgaagctgaattagatatgattaaattgttgctggaaagaataaactagggaataccttatcatttggaactttaatctctatctgttctgggatccctatcgcatgagtggaaggatggcccctagcaactagggcaggtgaacctcctgcttcagcctaatgtagtacgagaagaaattcttgtaaccaaatatcttacagatacaaagatgccaaaactactgaaaaaaacaactgttaacctctgctatgactgcactgataagcttctcagcactttcaatgcatgcaacacttccaattatctccactggtcttaacgctgagctcggatcagcttctgaatccctcaaaatttggattttggcaccagagttaaactgaagataccgtatagtctccccacctttaccaatcaacacacctacctgcaaagcattgtgataagcacgtcagtgaaagtattccgaaagaaaaaaactcacagaacagccaaaaatgaaaaccaaatcatatcacctttgaacttgggacatctatcctacgagttgtcgactgtgtgccatcaacctccttctgagatttttcaccatccacttccttattttcttctttaccattctcttgagaactaccatcattcacttccttactatcgtcatcaatcaccttctgatgttcaccaccattgacatcctcaatacaaccttgttggttatcctcaggcttaacctgatcatctgttggctgatctacactacaaatcttattttcagactcatcagcatgaataggatcctgaacttcctcaacaagtggtacagaatcttgattctcttccttaggttcctgaagctgttcttcctcttttacctccattgaagacccattttcttgtgtattcccataatctacaacaaaggccgaagaacaacaatgagaaagactgatttatcaacaaactcaaagaaatctctttttttgaaaactataaccatagaacatcataaaaatcaaaactttagtttataagaagccaaagagacagaaacacctaaaccatcttgagcttcatcttctagcttcgctcgtttagcctgagaagaatcagatgtttgattgctatcatccacgatatttccattaagctcaacttcgtcgagctttcgcttgagatcgacaggcggcgtagagataacaacaaaatcttcctccgtcatctggaaacgaatcgtccggcgaggaatttagggaaagctgagtactgtagggtttggggaagaagagaattatctccggcagtgaaaagagtttgggttgcgactctgaacggtggtggagaagtaacgtttaaggctttaacgtctatttataatgttcgggcttttattgggcctaaaaatgggctaccagttttttttttaaagttatcaaaaataatgatgttttctttgttgatcgtcgaggggatgttgttgagacgatagcttctactcaaattttgtagaatcgacaacatagtagaaatttgtagggtctttatttccattgtagtggttttatcgactttggactatgtcctcctctctataatagtttacaagcttgaaaccccaatgaaatccataacaaaacccacatatagcttatgaaattcttaagatcaaacatagaaaaaggcttaccaactgggattttcagtctctgaacatacataaatcgctacggtaatcactctgcagtgtatcccacggttgggacacgactcacatacgcgatttcataagatggtaaactactacttatgcataggtacgacataaacacatgtatttgtattcttacggtacataaagtgatggacattgtatgattgattctccactgtgtctaggtattgtagaaaacggcttctcatctaaggctcaaaaccggccatgcgccaggcgatggtagagcagggcggatcacagggacccttcttacctctgtgaacacttcattgagtcgagcagcctgactcatcacccgcgacgccttctgcacagatcataaacaacccaagacgtgataatgatagaagtaaaccaacaccaaacaaataccaaccaagcaaagagatgtgcgctaagggaaaatatcaaatcacagcattttcagcggatgatgcctcagtatttttgtacttaattcagacagattacaagaacatattaactacaaaatctatatcttagaggggggtattggacataaattctagattttcaggtataataaaagaatttcgaatctttcttctcaattcaaataaatattttgcagtatttttaatagaattctactagaattaagaagataaattactgaaatcttttgttccacaatgctctttatcgggacagccaccatgcccaatctctaaaaactgtactttttccttcacaaacctcttaacccagaaacaatctacgttgacgtttacatgaaatggaagagatccatattttgacaacaacgacaacgacgtcatcacaacctccgctcatctgctctctatagattaacgcactctcctcatatataatcgaacgaatgatgatccgaagaataaaccggatcgaaatcacagattctaataaatgtgttaaacactctccctcagatttgagaattttttttgtatggttgaagcaaatcgatgaaagagaaaaaaaggatggatgtgttatattctatccaaatctcaactcaaaaactcagaatttgttcttcacattttagaccaatttttctattaaattcttgtgaagtaacgttgtcaaacaaaactaccgaaaactgaataacacttgcaactaatagaattaagaaatgagcaagttaaataacacaagaatttaaaagaatttgtgaaatgtctaattgaataacactagaatttaagattctattgaagtctatcaaattcatgcgtccaatacccccaccttaatataaggcaggacaagacaagaactaaactaaacttgaaattctacggctcaagtcagaccaattgcatcaacacaacatagagtgtagctaactcctaaaacgtatcaatctagaccagcttaccaacttcaagcaaaatgaaaacacaagggtcaatgataatatagtgtaccttatcgtcaatcgtaactttaagatggaacctttgagctttcttcttcatattatacaatctacgtcccaagagaaccaaacccatcacagcagcagccatagagacagaccaaaccggaccaatcctaaacacagagtacttaagaagcacaaatggcatcttccaccacacagtctctctacttttaccctcaccaccagaactcacgcctccaacttccacagtatctcctccacttccctcaattacttcactagaagcaactacactatcagaaacaacttctttttcaccattcacaaccccagaatctcgagaaaccaattcatttccccctaaatcagaacacaacttgctcgaatcctcaataggttcttcaacacccgattcgttctcaccgtgccttccatcaacgaattcttcgagattctctgtttcatagtgagatacggttccaccagttaattcagtagcagcttcgctctcaacatatttctcattggcagcttcaaaatcactaagcctaacctcaccatcacccaaaattccagtttctgaatcataaaccccaaattcatttctgacacaatcatcacccgattgactaacactgaactgatccaaaccagaatcaacactaacctcacccggattcagacactccgacccgtaatcaacccgaaaagaatcaaaataacccgattcaatcacccgatcagtagcagagaaatgatcagaaagaatcataccgtcatcgattacgcttgaactctctaatttcgtctccgatgtgattgaatcagttgattctgtatcagagccatgatgaagaagctcccaatcatccatgatgatcgaattcgaagatttcagattgggattgcaataatcagaaaccctaatggataaaaccccaaatattggaaaaggatcgcaacaaattagagcggttgatgatggaaaagaatggttcttatccactttgagaaagtaattacgtggaggtatctaattggttgcgtgtcaatctcagtcctcaactaaattttttggcattaaagtttagtagattcagagaactatagtatttattcattttgttctttcatttttattttattttttaaaacgatttaattaggattcggcaataaatcgtatggtgcggatcaaatgaattaaacaaatatgtatcggttaaaatagagtagacgatgtaagaaaaatatatataatcaagattcaaacggttgaggtgggttttgcaaataaatccatcggtagattgaaatattttcttatttattatttatagattagtatttataatagtactgaccaaaaatatagaaaaaaaaaatcggtaaaaactttagaccgattttatatagaaataaatttagtttataacggattattgtccgctccaaaattaaatggtttagtctctaatagtttagtttgtttcgaaaagaatggttcttatccactttgaggaagtagttatgtagaggtatctaattggtcacgtaacattctcagtactcaactagatcttttgacattaaaggttggtagattgagagaagtatggtatttattccttttgttctttcatttttttggtttttcacaatgatttaattagggttcacgacgaatcgtatggtgcagatcaaatgaattaatcaaatactagatgatttacccgaactatgtacagggagaaatagttatatgaaatatataaacaagtttttggaaacagattttatattatcacttgatatataagtgtgaatatttgaatatgatttagtaactgatatattttggagattttattagttaggaattaggatattctatatttggaataagattttaaattaaaatattgacccaaaagaaaatctgaaatatcattcctataattcagaaatatattcgaatattttttgtattttataagattttattttggaaacaattcaatataaaaactgaaaagagtatgaataattatgttttaaacgtaataaatttttgattatcttttattattcttcataattctatgtagttaggattgatttattgcatatcccttattttattaatcaatttatattgttacgataaggttttgggttgtaaataaattttaactaaaatgagtaaatgactaattaaattgaataaactgtgtaaaagttttaataaattgataaggtaaaaatttgaaaagaaataatattgaaagtaatcagtaagcggatacatttttaacatagattaatattgaaatattgttcatagtgaatgtgtaataaatgaaatgttactaactaatttatgtaaaactatgttccgaatatattcaagaatcatatgggctcacatatacatttagattttttgcaatttataacaaaaaaatagaatgtcatatatgttaaaattctaaatgttttctataaaacctaaaaaaataaagtacgaaacatataataaacatttatattatatgttgttcatcataatttatgatatatactttttacttgtttgctcaaatatatatggttttttgattaattttctttattaattgctactctcttaaatgtagaggaaaaatatgcataagtaccactaatggcattatatgtaattagtctagtaaatattggataactattaagtttgttgaaagtttttctggttacgacatgtcagcatgatagtcttgtaaatcacacgtgaatgtaaggttttttatttaaaatacttctcaattaatatataggggatgtatcagttaaaatagagtagacggtctaaaaccatctccaatgcacacctctatttttttctttcattttagagacaaatttattttagaggaaattagattttgctccaatgtattcttctaaaatagtttttttctccaaaatagagaaaataaatagattttactctttatatagattaaaacgtaagattcctttattttagagaaaaatctattttagagacatatattgaagcaaaatgtatctaacatagaatcacctctaaatggagaaaaaaaatagagatggacattggagatgtttagaagaatatagattcgagcggttgaggcgaataaatctttctgtagattgaaatgtttattatttattatgaataaattatcatataatagtgtaaaccaaaaattatagaaaaaaccccgctaaaactacatacccattttctagaaataaacttaggttacaacggattgttgtctaccccaaaatttggatggtgtaatctgctaatggtttagtccgcttcgagtaacatttaagcaaatcgttagtataaaatgggtaaaataagtgatactcaaatacatattaaataatgtcaactttaaaatattttaaatatttttcatgtttcaaataattttcttacaaaatatatcatttaaattcttaaagaataaacaaattttaacaagaaagtaaacgtgaaccatacttcaattcttagtccaaatgtagttcatacaaatatgacaataatttaacaaaaaataagaaaaagtattcttccgggttaaaaaaatagattcgatcaaacttaaggtcttttttgttaaagtcttcttttcgcaaaaacctaaaatctcctctcctttgtactctcaagcttcgttttttcttcttctccgtccaaatttctccatggatcgttctttgaatctcctcgatttagccttagggttcgatgagcagctagctattccatcgccactaaatggaaaagtaatactaatagaagactgtgtagagacgagtggttcctttgtacttcaccagctaatgaaacgtgttctctcctctaactcctccgacgcacttatctttctcgcttttgctcgccctttctctcattatgatcgaatcttgcgtaaactggtaaaagtttcaatcttttttactgttttgtctccatggctttctacaagggttgattctcagtgtcttactgtgttacagggatgtaatttagctacccataagtcgaataatcgattggtgttctttgacatgctcatggttaagtgttcaggtgagacttatcaggtaaaacaatctatttgattagcattagtgtttagctaatgcttaatgttacaataagcttagttagtctttgataaaaacaaacttaattttggatggtttggtagtggtgccttggctttagagagtgttaagatatctctagaacaaatcttcttactagtggttttggtaatcgatattgtttttgatcattggttcttctatgtaagtgactagttaattacatatagtagcaattgtctctgttctgtgcaaatcagattctgaaccaggaagttgtgttttgaacacaaaatgatgagtttttgtgaggctagcttagattctacctttagattctacttagattttggatggtttgggagtgccttggctttagcgagagagagtgaggatatctctagaacaaatcttcttactagttgtttcggttttggtgatcactgcctcttttatgtaagtgacaaattaattacatatagaagcagttttctgtgagtctattatctgcaaaacagattttgaaccaagaggttgtattgtgaacacaaatgatgagttttggtggagctagctttgattctatctcaatatattacttttataattaaacaaatctgattttatctacttgtggtgtgcgtttcattgttttgtgttgtgatctttaaacctttttgtaaggtaccactgccaataactctgtttctcagatatgtaaaaaactttattttactgaaaaaaatcttttagcagatggggatcaaatggaagacaatgtgagtgcagttgcgaaactatttcgggagatacaagaaaccgttcgaaagctacagagtgtaacaagtggtaacataactgttatggtggatgacatgtctctgctggaaattgctactaccggcagcaactcagatcacgtattggacttcttgcattattgccacacattaagttctgaaagcgtaagccagaggctataaccccttctgaaactatattattgtgtttttcttctttgtgagtctttaacggtttatttttctctgaagacagaattgttcattggtcatcctcaatcatgaagatatatacgcgagcatggagagacctgcatttttgctacagatggtatgccttgcagatgttgtgataaaggcagagcctttagcctctggtttagcaaatgatgtacatggccaagtaagttatcacaagactctttttcctcaaatcattaattgaacctttgttattttcttggtgtctaattgatttttggtggcttattgcatatacagttgactgttctgaacaaagggataagcaactcaggtagaggaagctcgaggaacaagttgcagaattttcaattcaggatcaaagaaaatggtatcgactatttctatcctggttgcagaagctgaggattagacaccgttctgagcattagcatggtagtgagatgtttttctagacagttttgttatttgcgtttaggttaaacagagacactctgttaaacatttttactttagtgtctcttctggttgtaacttgatgacttagctaaagttgaatgcttgagacacagaaacttgtagacatggaaaattagtaacattctatatctttaagtaattgacttttgattgaggtaaagcactatagtgatcactcgtcatgtctcccatgagagagacaagaaccctatataatggagtacgtctttccgtcagatgaacaaatgcaacgatcatgaatagagaaaaaattatatattccatcccaattgatctcggaggtccatatttggctgtcaagatttcacagagttgttcttgaccaggtcctcgactcttccacgtctcttattcgcccttgaacaaagcaactatgaatggctcttctgctcatcacctcaccccaaaaatccatatgacaagtctagtgtagtttcggtcgattttcatacttttaggctttgattggtaagacgcataatgacgttttctaatgcgattatgcagaaaatttaccaataaataaaatctgcataattgcattagaaaacgcaaaaaacgcaggatttttatttttgccgtttacatgtaaaaattcattatgaaaaaagtgggtatgtagttgtttgcataatagatttgtttttattctatacatactaaatattagcaattataaaagaaaaaaaatacattgtttacacaaattatatcattaataatacaaaaaaatattttcacaacttttaataaattttaataatcttacattttttaaagcattattttgtttactaaggataaacattattttaaaaaatattatattaaggataaacattatttttattaaatataaaaatatatatatatatattatattaacaatattaaggataaacattatttttattaaatataaaaaaaaatatatatatatatatatattatattgttaatataatatttattttgtcattctgcaaaatatatccgattaacatatgttttaaaaaaatttattttataatttttcattttgcaagtttttattctgcaatttatgccattaagatattatgcaatgttaccgataggaaccttataaaagaatttgggcttcccatttcaccagcaccagtatagcccgatggacttcgtatagaaaccaaaattggccgacaaaaaaaaaaaactaaacccaaaatccaggttggatacgtcatcatttccaattgccctagtcaaagacatggtgggggcattttagtaaaactaatagtttgagatgacgtagctcatgtgtgtggtattcaccagagaaatggtcgtcgctgactactaaccagagccatcggtggttgatttcgcgatttcgagctccattcctacttgtctcaccttaatctccggcgatcgaatttcacggttccggttaatcaatctctccgtaaactcttctttcctgtatatctttcgagattcataaatcttcttcattttgagaagcatacgtgattattcatttcctggttcaacatagaaatcgcatctcttagatccattaagtatttgttcactgaatcaaagatccaattatataggcatgtcatgactcagactagaacaattcacatttggagactctttgcttctcttttcctgttgtgtattgagactcaatcattgtgggtgctttcaggtggccatggacaaagaagttacaaagattgaaagtgatgacacttcatcggtggagatcaaagtgttgttattcgccagagcacgagagctcacaggtgtgcctgatctaacactgaagatgccatcaggtagtacaacacagaaatgcctggatgagttggtgcttaagtttccaagcttggaagaggtacgtagctgtgttgttctcgctttgaacgaggaatatacaaccgattccgccattgttcaacatagagatgagttagccatcatacctccgataagcggcggctaatgcatcgacacttcttaaatccctttaactcgggattgtatctcattggcgatgatccaaaatgtaacttttgtcataataacacagaaatatctgtcttttataatggaaagaaaatgttacatcagttctactaaacttctagtttttgctgtggttctctttccatgatcttgatattgataaccattgtaacaaacagaagagcaagtgttgtcactggttcagtagcgacgtggtcttgaatggttgatactatctagtgccgaaccaagaactcttctactatactccaaacttgctccattcgatactcctggtggaggtggttctacaaaaatgcacaaaaacaaaaatacagattaaagttcagtaactctcatactcagaaagacaatttagagtgaagtaaaggtttttgatatggtaatccgtatcgaattcggcatagaagcagctaaattctcataactccagcagccaaactgatgatagccattagattaagcaaacagaccaagtacattaagtcttatacttagaatgacaactagattgagcagaaggttcttgatttagtaatctgtgctatattctcataactccagtagccaaactaatactagccattagattaagcaaacaaaccaaagtcttatacttagaaaggcaaatagattgagcagaaggttcttgactccgtaatctgtgttaattttggcaaaactaatcatacattgcgacagccatcaagattttggtttacttatatcaatgctataaacaaaagcttctcgatcttttcgcttattcgatatatcaagagagataagtaaaagagaaaccttgtgtgtaatccagaggcagtggtgaaggtggagaaatcaattgcgacgaaaatctctccaagtgatgatacgcagctctatccgaatgctcgaaagccaaagactgaggtctcgctcgatgaccggaatttgcagaatttgattgtaacttatcctgtccagatatctaaaatccacaagaaccacaacaaaatcaagaacaacaataaacatcactatcaattcaaagatcaaaagacacagaaacaagactcacagcgaatttcaaagttcgattgtagagagaaacaagtccagagaaaagcttaacggcgtaatcggcgatttcttcagtctcatactcagcgaaagcaaagcctttaggtttatcagtttctttatcacgaggaatgtgtagatcgattactctaccagcttgaatcatgatatcatacaaaaccctatcgcttactctttcgtcaacgttccctgatttttcaaaatcaattggttttcgagaagtttttaacagtcaagatcaatggaaatgttgaaagagaaacttacctatgtatacggtgcaattggaagtcccagacatagtgatcggaacaatcgaaaccctaaagctgagaagaagatgaatcgagaaatcaaaagcttaagttttaaaaattgaagagaagatgaagaaacttcgagagggccgaattgtaatttacaagattttgagaaaaattgttgttttaaatgagaaaatgactaaattaacctctatattttaaaagtattcaaaaaatctttaactagattttttacccgcgctacactgaacgatttataaaatttagtatataaaaaaatttgaaaattgtatgtatttataaagaaaaaatatatctgatagtttacaattgttattaagtaacatcccgccaaaaatctcattagttttattattgttagttttatttattatatgattatgaattattatttaaactttttagccaatgtatgatgttaaatccacacatttttcatcaattgattaatatatgttcgtttttaaaattttgaatcagtgaaaaaatttaaaaatctttcttaccttaataaattatatgatgtaatatccgttaacggctcttaagtcgcgtgttcgaatctaccaataatttaaagatgagtttatatcaaaaataggcattttagatttagtaatttcaaaagaagtatgttgcacagttgaatgcaacagtggccgtttatttttcaattttggacgattttaaccttctgcagtaagcggctgtagcacaaagctttgatggtggttcacgggtttgatggtggagggtcgccaatggcatcaatggtggatggtggcaaacagcttcagtggtggtgcagcgcttcttggtgtctcaaagcaacgacagagaaggtccttcgcaacataattttttgtttttcacaaaacactatactctagaattggacttgtaaacccaaaccgtttagtcgacagtctgcgatgcatacatagacacaacgacacaacactacaacactaattaaactttctcgatttgagaagatgactcaaatgaaatgaggttagagatgatttttcacatgagagaaatacttgttttcgtaaagacatatcagaaatgttttaaaataaataaattcttaagacaaatgtctattttgtaattaactttttaaagataatttatttttaggccaaaaaaaattaaatgaggtatttttatttctaaccaaaaagtattggatagtaaacatacaaatgaaaaataaatggagctgttttttgaagattttccagtaacatttgccataaacaaaactatcttataacttcaaacttagccattggtgcaaggaaaaccatgttttaaataacatgtgcaccgatgcttgtccacattgttgcgtcgatcatcccagcacttgcagtgggtaatagttttaaccacatctttattaaattttcgttccatttcactaaaacataacttaggtccgtcatgcccacattttccgtttgccgacagtccaagcgggcatggtggttttttttttccctgccctattttcaatcaataaaaaagtataaaatatatagaatttagttgataatacaaaaaaatgaaagctctatttttaatgcatatttgttttatagatataatcaatgttttcgatcttgtgaataaggtattagttaaatcttaacgagactaagatattacctttaacattgttcataaggaggaacatgagaaaacaataaattataagtgaagtagcatttttcatgattcagatttgtaaaaacgttttgtatcttacttggaacgttgtttttttcttaataaatatacttaacacatactaaaaatagatttttattttattcaaaaactaaaaatagaaagcagatataccagagaaggtcaaccagctagaaaaaaaattagtgtgttgtaagaattgattgatatttagaaaattaaagttgaatgcgtcaataaaaattaaaaaattgttttttgtcaatctatctttatttagagctcaaaagagtcaactctaagaaatgttgtttgcatatgtgatatgatacggttagatatcgagaaaggtagaaaaaaaaaagaaatagttgtggttggaaaaaataatgagattttcttttcattgatagtatattagtatgtggttaagaaaaatatttgactgcatcggaaatatgtggttagttaatatttgaacttttattttcaattgcctattttatctgcttgtatgattggtaaatagtaactaaataagggttatatctttaactgtctttaatatgattaccaatgaaagcaacaattaactttttgactgttgggaatttgggctgagctttacactcttaaaagaaaaagattgatgtagaaagaaagaaaaaaaaaacaccaatacataagtttcaccgcaaaaaaaattcagtgtatcatccatcaataaactgacaaacaatgagccctatataattaacagatttactctaataaatatctgaaaaatctctactggattgaagaatactttgaagttgtcacaataagtctaagagtctctttcggtgggcaagtggacgttatcctaaatctgtgaataatgggtgtgaaagctttacttaagaactagaatcgtagaaagagtcgaatggtcacaaagctccttacccgtttttggatattccttgacatattcattatggggcttgtgtagtaatgcatttcattttatcttttaaatattatatcaaagtccaatatagacacaagattataactataatttgcttattttataatataactggtagtttggaattttaggttttggttataatcttagaaaacaatgaccctaaaatttatgtcaatatcaaattcccaaatattataaaaaaatactattataaacaaattattacacattaaaagaaatgaattaagagggatcacagtttagttttcgtttcattcatatttttcttaataaaatgaaaatgataaataattggctaaactataataaaagaaaaactacatattttgggtagatgaaaaaaaacaatatccatgaatttgtcatttgttgttcactcgaataataaatttcatatttattgctatattacaattttgagtttggatatttcccctatgaaagaaaagaacatataacatctttgttgtctctttttccatgtcactcgttccaatctcatgatcccatttacactcaagatatattattgtgcaaatgagcatcaacatgatttatatagactttaaagtccatactatttcagttaacctttaccatctcctactcagattcttcttcaactatagaaaccattcacattagttttcgggtttgaagtggcttaaaggtatccaatttgtgaaagcctggaatatgctctgttccattacctccacatgccaaaaacagagctaactacatacttatacgactttaaatcccttttcttcacgtctctacctgcaataatacacatcatcatattacactcatctttctcaacctcaatcatattcacagaaaacaaacttggtcaccgtgtcgaaaacagggtttaatcgagttagttatttagaggttttggtcccgaacaaagacgttgaagttcagtgagagattgagaaggcagactcgagaaaacatgaggctatagaaacaagtctaatgggaacaaatgaagaaaaaggccttgtgccactcattattctctatctccacaaaagaaaagaagagacaaacttgaaaaaggaaatgggtgattcttattcttttagagaatctgataatgcaaaaaaacttactaaaaaagaagattctctttgagattaggacagaatatttgtctttccagagtttaacggttataacatgacgttgtaatatgccatctgagagatgataatacaaataacaagaaccacaccaaagttaagcaaatatttgaaattaaatatcaagaaataaaagagtaaagagaaaaaggagggaccttttgtatgagattataaaatgcaaagctaagttgatatacaaaactaggcctctcttccaccctatagctgaaggagattcggtatgtaaaatgccgaaaaatcgaatttgttccttttatctattgctgtgtgtatagatgtttatgtaaattttgtcaaaggagttttcagtgcaacaatcagagagatggcaagaaatgattggataaacagttacctggaagctattcttgatgttggaactagcaagaaaaagaggtttgagagcaactccaagatcgtccagaagcttggagatatcaacagtaaggatcatcaggagaaggtgtttggagatatgaatgggaaggatcatcaagagaaggtgtttagtcccatcaaatactttgtggaagaggtcgtcaacagtttcgatgagtctgacctgtataaaacatggattaaggttcgtttctaaatctgtatccttataccaaatggtataaatacaaaatgatagagagaaatgcttttacacataaatataaatacctgcaagtgatggtggagagatctttcacttcttgtggcaggtgatagcaacaaggaatactcgtgaacgcagtaacaggcttgagaatatatgctggcgcatttggcatctcgcacgcaagaaaaagcaggtttgtgtccctttagttcttcaactttttcacctctgcatcccttattaaaagcctaatgcatcagaaacacatacaatttccttttagaactgaatccttttttcgtgcttcaatttccttccacagattgtgtgggatgacggggttagactttccaaacgaagaattgaacgtgaacaaggtcgcaatgatgcagaagaggatcttctttctgagctttctgaaggagagaaggataagaatgatggagagaaggagaagagtgaagttgttacaactctcgaaccacctcgagatcacatgccccgtatccgctctgaaatgcaaatttggtcagaagatgataaatcaagtcgaaacctttacattgtcttaatcaggcaagtagagattggtttttctgacttatttgttgttttcaatatgctcgtgggacttacctggtgcctctatttggttccatgctttaccaactgcagcatgcatggactcgtgcgtggagaaaacatggagcttggaagagactctgatactggtgggcaggtatttagccatcttctagtagacctctttgtaaagcttaaactatttaaggtgcttcacatgtcgactctggctttcttaattttttatcaatctgaagtgtcttgttaatggacgaataggtgaaatatgttgttgagcttgctcgtgcgttggccaacactgaaggtgtccacagggtcgatctcttaacacggcagatcagttcaccagaggttgactacagctacggcgagccagttgagatgttatcatgccctccagaaggtagcgacagctgtggctcctacattatccgcatcccctgtggttctcgggacaagtactatcacataggactcctttgaatttctgtattcaaatttcgactttgcgaaaaaacagctagtttttctatactcatgtttgttaaatgcaggtacataccaaaggagtcactctggccccatattcccgagtttgttgacggggcgctaaatcacatagtgagcatagcaaggtcgctaggagagcaagtgaatggagggaaaccaatatggccttatgtaattcatggccactatgctgatgcaggagaagtagctgcacatttggcaggagcgttaaatgtgccaatggttctaactggtcactctttgggaaggaataagtttgagcagttgcttcaacaagggagaattaccagagaggatattgacagaacatataagatcatgaggagaatagaagctgaagaacagagcctagatgcagcggagatggtggtgacaagcacacgacaagagattgacgcgcagtgggggctgtatgatggttttgatatcaagctggagaggaagctcagggttagaagacggcgtggagtcagctgccttggtagatacatgccacgaatggtggtataagtcctttcccgcctctcacatcatctgatagatgacaacacgattattatcaaattattttataatcacatagacactgcacttgactggtgcagctaaaagaacagcaaatttaattaaaagtagagtcattcaccaatctgacctgtctttgtggcattaggttatacccccaggcatggatttcagctatgtcttgacacaagattcacaggaacccgatggtgatcttaagtcgctaattggccctgaccgaaaccagataaaaaagcctgtgcctccaatatggtccgaggtactctttttcattattgtgtaatatccaatctcatgcaagaaaggttacactcttgttttctcccatctttcgatccattgagcaagtaattacatgaaccttttacctgcagataatgagatttttctcaaatcctcataaaccaaccatacttgcgctgtctcgtcctgaccacaagaaaaatgtcaccacattggtcaaagcttttggtgaatgtcagcctcttcgagaactagccaacctggtaggtatctcagcatttattacacatgcgttatccagtgaactcacatatgtataagaagattgtgaatgagcatactactagtccacctaaattgctaataaaactgttccaggtacttatactaggtaaccgagatgacatcgaagagatgcctaatagcagctcagttgttctcatgaatgtactaaagctgatagaccagtacgacttgtacggccaagtagcttatccaaagcatcataaacaatctgaagttccagatatttaccgcttagcagccaaaactaaggtacttaacacgaaaattctattaaacaatatgagtatatgactcatattgtttactactttcgtgattccagtagaacatgagacttttataatgcagcatctacaattattagttccatgtgcgtagacctttggtagtttctcctgagtctacatggtacaaaaacaatgttatcgttagtagtttaccagaactcttagctcatccttctttgcaaaatgaacaccgtaataataaggtggttttctctcttaaagggggttttcatcaatccagctctggtggagccgtttggtctcacgctcattgaggtaactagcaaatatgtcaatgtgtttcccttatgagatacacaaccttgtgagatcttcatgccgcgccatttgttgtgcatatgacaggcagctgcttatggtctgcccattgttgccaccagaaatggagggcctgttgatattgtgaaggtaatcaaatctcttattacaaagcaaactgtataaagacatagtcacacctcactgatcccataaagctaattaacagtgcatatgttgtatcgcaggcactaaataatggtctcctagtcgacccccatgaccaacaagccatttctgatgcccttctaaagctagttgctaacaaacatctctgggctgagtgtagaaaaaacggactcaagaacatccaccgtttttcatggccagagcactgccgtaactacctatcccatgtcgaacattgcagaaaccgtcaccctaccagtagtctcgacatcatgaaagttccagaagagctcacaagtgattctctacgagatgtcgatgacatatctttgagattctccacagaaggagatttcactctcaacggagaactagatgcaggtaccagacagaagaaactagtcgatgccataagtcaaatgaattcaatgaaaggttgctcagctgctatctacagccctggtagaaggcagatgctctttgtggttgctgttgattcctatgatgacaacggaaacatcaaagcgaatttgaacgaaatcatcaagaatatgataaaagctgcagatttgacatcgggtaaaggaaaaataggttttgtgctagcctcaggttcaagcttacaagaagttgtggatattacgcagaaaaacctgattaatctggaagattttgatgcaatagtttgcaacagcggaagtgagatctactatccatggagagatatgatggttgatgcagactacgaaactcatgtggaatacaaatggcctggtgaaagtataaggtcggtgattctgagacttatatgtacggaacctgcagctgaggatgatatcacagagtatgcgagttcatgcagtacaagatgctatgcaatttctgtgaaacaaggagtcaaggtagctcttttaaagaatatctttctcatcatgaatatatgtgtgaaactcgtattgatgtatatatgtgtgaatggcagactcgaagagtcgatgaccttaggcagaggcttcggatgagaggtttaaggtgcaacattgtctatactcatgcagcaacaaggctaaatgttataccactatgtgcatcaagaatacaagcactcaggttagaaactgtcacaaataaaaatttcttcaatcataaactctatgtgtaagatatcaacagtgaaaatgacacgacttgatgtgatggctacatgtaggtatctttctataaggtggggaattgacatgtcgaagactgttttctttttgggagagaaaggagacacagactatgaggacttactgggtggcctccacaaaaccatcattctaaaaggtgtagtgggatcagacagtgagaagcttcttcgcagtgaagaaaacttcaaaagagaagacgcagttccacaagagagccctaacatttcctatgtcaaagagaatggcggatctcaggaaattatgtccactttagaggcctatgggatcaagtaataattttctatttcagcttattatctcaagatcatatacttcaatgggttggtaaacagtgaaaaaataacaagactacatactttcatatattgtataccgaaataaaaaagttgaatattaactttgcttagtatagattcaataaaacaagtatgcacagcttctttagacgttcacacttagaaagattgatacctgaagaatcatggtactctatctagtgtggtatcgcccatccttcggtctaccatagaccaacaatttgttcctcatcacatccatatttggcagtgtaaaaacaatttctgccacaagtggaagttattgtgacaacaaaattgaaaaccaagttgagcctgaaaacaatattcaaccaaaacacaaggagacacctcaacaataacaaaagtgaatccagaaactattaacattaaccttgatctaggtctttcaacaaagtcgggactgcagtaacctgtatcagtccctgcagaaatcataccacttaattctctacatctaatctcaatcaatttcaccgtaaacatcagataaggcaagatataaccacagcaaacaaattcagtagaaaatggaaaataaattcaggtgaagaagaaataccattcttttgagaaagcacagtcctgatgtactactgcaagtacacctacatcacttcttctcagtcaggttcttatccgcaaacgtacgcacagtaaaactttaagaaggttctgaatcagatattcgcaagaacgcaaaaataaagataatttcacgtgaatattcagcttccagcaaatttaaaaggagacataactgaaaccagagagggaaaaaagagtagcaaaaccaaagggcccttttgtttctcattataatttaagttccttacaaactaaaagttgttcaacaactatattaaatgagtacaaaaaactcacaacagaaaagcttgcaggagatcacattggtcacaagaaatcatctccatccatacttttcctatatgaacctatccacacaatcacaaataaccatcctcaatcagaactcctcctccgaaccagaccatgacgatcacttcagtcttaaaaactcatcttgaatagagattactcaattctgtaccaacccaaatcaccaccttgctcacaatagaccatcctagataggaatcttcatatcagaatcaacccaaactcgtgttttcaaagaacaagaaccacaaggaagaacaacagacgccacaaaagcacccaatctcttaacataaacaaaatcaccatctctcaacaaagcaaaccccattgttcctaactcactagaatcaacacaaaagtaatcaccacacctacactgataaaaaagatcaatcacatcaccagtaatctccactgacatatcctcaatactaatctcatcagcagtgattccatcatgtcttgaagatctaagatcattatcataaactacacgtagctctgcatcgcttagaacttcccaagctttttgaatcttcagaaacttctcgtcgtctgagctagaacgagaagtattgttgagcttatctggatgagagtggagaatcgcagaacgatagctatttcggatttcttcatagctagcatcttctttcacggagagaatctcgtagtatgtctcgtgaacacaattctcaccgacaagcatgatttgttgaatcctccttaattcacgacggtgctagggctcaaaattcaccggcgacggcgagaaaattcggaggataaagagaccaagagtttttagtgtgttggtttcttcgtctgaccattcgggttttcgggtcgattcggatcagtctttcttccggatttcgggtaattctgggaagattgggtctatataaaagagaaccgaaattgtttcggttagctcggtttggttatggtattctcggattcgggttggtttttgaaatttgattaaaccccaaggtccccaacctatgattgaacgatattttgattcggtttttttaacccgaattattctataaaccatgaaagtcataaaaccaaacaattcaaaaaaacgtaacattttcaaagttttaaacatataaatctgaaccgaaccgaatttgttattttgagtcgattcagatattttagatccagtatactcaagactaaaatataccgttgaagtataaaatataccgttttgacaattatcaatcttaaaagtaatatcaaaagtgtcacttaaaacattacttttagtatttgtataatttttatgtactatatttccgtacatttttacattattccataaaaaattatctctcatgtttgtaattaaaatatttgtacagtcatatgttatccatcggacatatgattatcatatgtatattgttttgggttttttacgaagacatgttcgaattttagatctgacccggacaaaactgaaacccgaaacaattctaatttgggtatatgctaaccgataattgaaccggatttttcgaatcgggtcgcttaaatcattttgggatcttaaatgtttgggcttgggcctgatttaaaaaaatcaatacttgacccgattacgcaaacccgtttacggaaatacccatcttcaactggttccgtgaagagacgcgcaaaagacgatcgatcaacgttcatttgtgtgaaatctgttaactttttctggggagaattaattttcgtgaagattttgtagaatcgtgatgggtttatcaaaaggtagattaaaagcatggttcaataagaaaatcactgatcctcttctccagatcttgcgtaggtttgtcttctttgactctttgtctctcttttacatagatctgttaattaggactagtttggtcactcatattctgcttattgattattgaatcagatagatctcatgtgcaactttgtgatcattggtctttaaaagctgtagttttgcattttgcttcttgttggttacttaatttggaacattagagactatacagaatagttaaaggtagagtctttatacttgtagcttctaaaggatcttaaaaacatctgtttagttgttattggaacacaagagagaccatttagaacagctaaaggtagaggctttattcttgtatcttcaatgtagcttctcaaggatctttaaaacatcagtttagttgttattggaacacaggagagaccatttataatagttaaaggtagagtctttattcttgtatcttcaatgtagcttctcaaggatctttaaaacgtctgtttagttgttattggaacacaggagagaccatttataatagttaaaggtagagtctttattcttgtatcttcatgtagttttaaaggatcttgaaaacatctgtttagttgttattgtaacacaagagagaccatttacaacatttaaaggtagagtctttattcttagatcttcatgtggctcttaaaggatcttttgggcatctgttagagactgatgtatcagcacagttaaagacagagtctttatgcttgtatcatcatgtagtttctaaaggattttaagaaaatctctttctttgttattggaatacaagagagacccatttagaactgttaaaggcaaaagcgttatccttgtatcttcatgttgctcatataggaacttttgggcatctgttagagatagatgtatcaacatctctgtctctgttgcagaaaatttgatgttgtgaagtgatttgagtttgattttgtttttgttttcaattttcgtagaggtactgagccaaagcagcttgctttctctgctgcacttggtattaccttggggatatttccgatatgtggtgcgtatttctcgccattttgctatttcctaagcttactgcttcttgcgttgttgcgttttgagattgctatgtaccttatttggtgtggtttttgttataaaataggtgttcctgtgttactatgtggagtagcttttgccttgctcggatcatcttgtcatgctccgaccgtaatgttggctaatatcattgccactccagtggaactagcgtaaaccttatatcatttaaatcttttgaaattaccacttttatcgaaagacgatgcatatcagttttcttcctgacttggattttggatttccttttcatgtctttcttattgaagtctcgtggttcctttcctaagacttggtgaaaaagttactggtggacctcattttcctttgacatcagatgctctaaagaaggttttcactggtcaagcctctcaagaagtctttttaagcattggtaatgcggtaagtagctacaatgagtctcgtttctcttagctaatgggggaactatgtcgaaccgctttttgcattccctagcctaatcttttgtgctcttatcattagtaacttgcaagtcttattttaagtcctatggttattgcagttactagggtggctcgtagcaactccatttttctttattacgttatacgttgtattgctgccatgtttcacaatcctggtccgcaagttcggcggcgttgcttcaacccagaagctacctacaagtatggagacggagctcaacccaaagccaagagacgcttaaattcaacaagacttagaaacctcactgttctttttatcaacacgaagccctcgaaattgtaacataaatatgcatagagactaatgtatagcgtatataccacacttgcattgtcaaattctcacactcttgtttctaaactcatttgaaaatgttagtaaccaaaaatattggtggttacatttgaacgcctaaacttggtggtaaagcccattttttatgggtttgttcttatattgataactaaattgattgtgtttctgttagaggtaaccattatatcccaacccaaaaccaaagtaaaatccatgcacataactgcctggttaaagtattcttcaacctgatctgttcggtttggttcgaagtcgaactgaaccaataaccttttttaattacattaaaaccaaaccaaactactgtaatactaaatcgaacagaatccaacccaatatcgaaatgccacttcgaatctctctcaaagtaaacattggcctttttattgtggtgtaaaaatggtcctcttaagaactcttctcattcggatataccaacttggagagaacttataacaaaagccattgactttagaagttgacaatgaatatttcaaaagaagaatctgtgaaaagtgtctcttggttcgtaccaataaggtacaagaagcgttgacaaaactaaaaagcaaagcgagaaggcaaatctgcgaatctccgcgtccgtgggagtgatcaaagctgatgtgttcatcatccatatctgaatattctgtatatttttgtttatagaatgaatcctattgacattaaaatatataactttggatgagtctacgtatggccttttttgagatgttgctgacattatcatatactaaaataataaagtgcaatgtggttcactcgcaatagccgcattttgtcaccatttaagggaatttactatttttgtggtgaaattatgtaaattaccacatgttaaaaaaagaaaaaatattagatctcacaacttcatttgaactagggaacggttgacattgttttttttttaaatagttaagaaaatttggaaataattttgaaaagtaactttgacataaagaaaatcttgagaattgatcttttatttgttttcagaaatgattaattttatgatgatttttcttgaatcatagaaaagtcatataggaattgctccatgaacaaagcgacaagtttctccgtcatttagaagatctgtagataacatttgccaagaaaggactcacaatcacttctcaaaatgatccagctgacgagccattgatcgaaccatcttatagctgacaagacatttaatgaaagtcgcgcttacgtcacttacactcaaaacacgttcttctttctaagaaatcgtcaaaaaaaaaaaaaaatagattgcacgaaaatgccgagaatacaacttggaatgttttaactagtcccattaattcgatattttacctaggtcaagtaacactcttataaataatccttgcactctcgaagaaaaagaaatagggagtaaggtaattcaccagttcccaccttaaaagtaaacctaacttgctatatctaaatacaacaaaatttcactcatgaggaggagaacagttcacggatcatccaacttgttctctctcattccttctttcttattctcaaatggacatcatcgtgtttcaaagattttcagcacttattacagagacaatctacatttctacatctcattcattttgtcatttgtaatcaagtcattcaagttaaataataaaaagtgtgttttttctttcaaaagtttgtaatcttttgaagctttgtcaattcaagtttattggtgtgattccatagtcttgtttgattgcgtttctagtgtgtttgtgagattcaaacattctagttcgtgtgttgttgtggattcaacgacaaaacttccattttccatctctaccatcgttccatcgaatcattcaaaccgtaggccgagaaaccgagaaacataaaccttaggtaaattccaaggtttgcatcagattgctttgaccaaggctcataagtcattacttgacaccactctatctttcacgaatttaagaatttagagagactttgtgaccttttggatatggttagatctctgttattatttggttttgagagtcattggtaattgattcaacatctttatcacttaatagtgatactttttctatgtgtttttttttgttggttctatttggcttaccctttaagaattctagtggtcttgtatcttcctatatatctaataacatatggttgtttctatttcatttattttttatatttaccgcgacacgcatcagaaaacgaacttggcaacttaacaaattagctattaatcaatggacatgacatgtacatgccaaattaaattgggcttaataaaacacgtgttcgttggaaaaaattaaatatgttttgtatttttatagttaatagtgtaacgatttatcatgatctgcgccgaaattcacgctcagagttatatttgagttctttaaattattatttataaaaagtaagtcagaatatgaaaaaaccggaaacatcgatcacattaacttaaaagtaataatttttcattttaggatatattttggataccgacagctttgtcactacatcgaacaattttatgtttttttagaatttgttaatatgatgataccatttgatatccaataagatacttatttactttatattattagattagaatcatctacaacataaaatctaattatttagatgagtattatagatttgttacctctcgagtttaagatcgataactcatgttgttgaaacaagaaacataaaagatagttctgaaatttaaaacataaaagagagtttgaaattgaaaattatatatattgtagaaagtttatgacaagaggagaaagtatgattcttttagtatttgtttctatataatattaagaggaaaaagtaaagttcttatagaatatattctttcaagcaatttagctacttccagctaaatcattaaactcctttgactagcaaattaaataaatttaaatcatataaaggtaaaaaaacacacataaaatattagttttaagaaagatgaaaacaagtaaaaaacataaacaaccgaacatgtgtcaattgttttcagcagtctaatactcgtgtgactggccaatttaatgactatgactcactttcaactacctaacggtttcaaaacatgttaaccttgttttttttctttaaacaaaatcccattagttgtcactttaaatctctattattatagtaattattacaatctttttttaagaaacacttagtgacccatattaagaaaaaaataactttatttttaaacccatatcttatattttgtatctatccaattccttcctattatgtaaatttaattctatattattatattttgttgtgacatcttctcataaaataaataaatagctatcacaatttgatagcacctgaatacttcacctgaaactttccccacctctctctctcatcttatctatcaccattgcttcatctccaaatcttgaaattctctgttttattttcaagaaaagacagaaagtgaaacaagtcttttttttttttttttttggtgtggaacattgatatttgagtgacgatgtcttacagtgacccaaaccaaaacccgattccagaaacttacgctccatcaaactcaactgaatcagagaaactgaaactttaccaagcttttatcttctctgttccaatctgtttcacattcatcgttctcttcgttctttacgtcatttaccttcgtcgaaacagcaccaccaatgttgattggtcttctcttggcatgcgtggtggtacctttgtccccaccaacaacaatctctcaacggtaacactcagtctatgaaagattttgttgtttttgaaacatttttgaagggtttggttctttaatgatttgttgacttatatatatatatgaatgaacaggctgaattaggactgagcaaagatattagagagatgcttcctgttgtcatctacaaggagagtttcatagtcaaagattcacagtgagttctcatattcataaagattttatcctttttttgtgtcagatctttctaaggcttatcacattaaaaaataacatttttgtgatagaaaagttcaaagctatgttgcgtgatatgaattataccaaagtacgagatgggaacaagaaagagaaatgacaattttgctttgcgtaataattttgtcttgtgattgataagtggatgattgtcttgtgaatatagttgcattgaaactgttacttaggctatatatgttaaccaaaaaaaaaacagttatttaggctgagaaaattgtcatcattttattcggattggacataagcaaaatagggatctcattcgagtggaggcatacgtaacgctcgacaaattcaatggtgcaatttctgttttgtacattgagttgtttaaaatagttctttatgagtttgtgatttggaagaatcttttattcttagataaattatgggcctcataatgtgggtattagctccaacagaaacctgacaaaactgcttttgggtttttttcttgtttgaatagctaaaacataagaaagtatgattatgaatcacctgattttgactttgagtacttgaaaacagatgttcagtgtgtcttggggactaccaagcagaagagaaactccaacaaatgccatcatgtgggcacacttttcacatggaatgtattgatctatggctcacatcacacacaacatgccctctttgtcgtctctctcttatccccaaaccgtccctagacctgtcccatcaaagcacagagattgtctcttccatagaaaactctaatggaggagaagcttcaactcaaccagattcccagtcagcaaccgaagcaataagtcacaccgatgatgtcgaagaaggtaaccgagatagtcaagaggtctctaaggagacggaagagaatgaccgaaacagcgtagggacatctgatggttgttgtacttgtagacttggttaaaaaagcataaaagctttgtcttgcctttagatgatattttggtaagatttaagaatttttgttgtctctctcttgcgtttgttacttgtaacattgttaggagtgaaatgaatgcatgatccataagaagaaaatggtaagtttggaaagattggcattactgtcacaacttttaaaaagttatcttctcgacaaacttaacttcattattgtttatgggctctaagatggactactcggagtgttggtttgggctgtctatatgtcggaccagatgtttgtacgtgtacataacaaacaaagaagctacaaaaattagcagatgaaagcttctacaaaattaccctggtaaacgaacctagcaaagtgacaaggttattgaacttacaaaattagcaagagtcaatatatgttaaatttgcatagtcaatggacttgcgttctacaaagaatatgttagttggaaatggtaaaatatttcttagctaattatgatatatcttatcttttgagttttacaattatatatatatatatatatatatatatatatatatataactttccaattctccatgaacatcatcgcgtttagaagaatttcaactcttattagggagaaaattgccctctctcctctagacctcaacaaacatcatattgagccttagattgtcttgaccaaggctcataacgtaaccccactctccctcccataaaatgactttttctagtcacattgacgtcaatatgtcttggaacgtcaagacaaacccatttttttcttctccaagatatttttaccatctaaatgtgacatgacaacgtttgaaagagtggatgccatatgtagcatattgaaaatatttatagaggcaaggcttggttgtacgccaagtgggtgaacaacctaaacaacggtcattatatcaatagaggcaaggcatggtcggacccatagttgattcacttacaatatgttacattagttatttctatgcgaacgaggtttctccaaaataaacaaatttaacctgtcaaaagatctaaataatctgatctgaacaatatactattaaaaataataatgaaagaaactaaaatcaaacaaaagttagtggtttttcagattcacaacgtaatgtgtatactcattttgtaagagtaaatggacataacaaattagcagagtcaacaatcaacgaaccttctataattagcagatgaaagcttcaacaaaattagtaggagttaatgtaacacgaatatttcaaattgacataatcaatgaatttgtgttccacaaagcacgtgctcattggaaaatggtaaaataattctaataatgtatatgtttaagttaatattaaagttatttattatatctacgccgaaatttacgctaagacgttacatttgagatgtttgtattattatttacgaaataatcgggacatcaaacacattagcttaaaactgatatttctcattttaaaattgattgttggttttgtttacttcagtcaatttactttgttttgttttggattttgttacttcttctttttaataataaaattttgatggtatgagttttcgtacttccacgatttgataacgttacattggaagttaccaacaaattatgaagcaatagaaaagattaagacagtagaaaaacatgagaatgtttggacatattaatgagaaatagaaaatgaaagccggcaataattaggggtctaaatttataaatcaagtattctagtctagtaacagtcaaggaaagattgatttcaatttattagaaaatgcaaattgtagcttataccaaaggcatataagatttatttgagaaattgttgaaaatgcttacaaactcgagcttttatgagattatggatattatgaagttttaactactttcaatatatgagatattttcccaaatattgggaatgaagagttgctagatttgagaacatgttcttttaactcaaagagattaatctgggtaggcatggtcgttcggctatttgattccattcggtttggttgttttggttttcggtttttttttgttctaaaaggaaccaaaggttttttggtttggttcaattcgattcggttacctgtcggtttagatactcagaaaaagaaccgatttttatccgaaatacctaaaaataaccaaaatacacaaatatccgaatttttttttgacaaagatgtagtgggccaaaatatattgggccaaaatacctaaaatattaataaaactttattggattaggggttgagataaaaatatattatgcttacatgtaggcttgtatggggctcattcatgagcggacccacgttggtcttgggtggggcatgtgtcctatgggaacagataaaggatgcccccggtgtggcgagtcagaagagacaataaatcacctcctcttttattgtccaccctcgagacaaatttgggcactatcgcccattcctttctcatgaaatatttttcctagaaactctttattctataattttgattttctcttcttgcgtggacgagaattcggaataggagaagatatcttggaactctttccttggatactttggtacatatggaaaagcagaaaccgctttgtttttgaaaacttcagtgaacctccccctgaaactttgacattgactctccacgaagcagcggtttggaaacaggctaccttaaaagaaaaagaaaccctattttctacccctgttctgggtccgactccggctccggacacctcgttctctgaatgccaagtcgatgcgttttggcatgttgaagatcctttaagcgggcatggatggatccttgttcgacaagaattaattatccatcttggtctcaagagcgcgcgacggagtctatcaccgctacatgcggaatttgattccttgttatgggcaatggaatgcatgatctctattggcgatacatctggtacttttgcttctagttgctcagatttgatttctattttggacaaccaaaagaattggctgactttcgcagcagaattggcctcctatcgatcattagtttgttttttttccttatttttgtattagatttcttcctcgtagatctaatacccgtgcaaattgtttagctaaaaaagttagggcacgtaattgtcttttttcccatgtaagcacatcggttcctgaatggctctctctaacggagagtatctttccaataaattaatataaatggtgtttgtgcaaaaaaagaaaaaaaaaaaaaagacagcggaaaaacatgagaatgtttggacagagattgaaaatgttaatgagaaatagaaaatgaaagccgacaaaaactatgggtctaaatttataagtcaagtattctagtctagtaacaatcaaggaaagattgatttgaatttattagaaaatgcaagttgtagcttataccaaaggcatataagatctatacaaaatatttgagaaattgttgaaaatgcttacaaactcgagcttttatgagattatggatattatgaagttttaactactttcaatatatgagagctttccccaaatattgggaatgaaaagttgctagatttgagaacatgttcttttaactcaaagggattaatctgggtaggcatgggcgtttggttatttgattccattcggtttggttgttttggtttttggttttttggttctaaaaggaaccaaaggttttttggtttggttcaattcgattcggttacctgtcggtttggatatttagaaaaagaaccgataaataaccgaacgttaatagatatcggttcggtgatgcttattttatccgaaatacctaaaaataaccaaaatacccaaatatccgattttttttgacaaagatgtagtgggccagaatatattgggccaaaatacctaaaatattaataaaattttattggattaggggttgagacaaaatatattatgcttacatgtaggcttgtaaggagctcattcaggagcgggtccatgttggtctttggtggagcatgtgtcttatcctgaatacgtagtgtagtgcttttttacttaatgatgctccacattaactcaagttcaagccttactattttctttttattgatttttttttattgtgtcctatatagaattatttccttgattcgccactggactcactaaatatttttttgttctattcgagtatccatggatatcgatttggttcgattgttacccgatatccaatatacagtgtgactgaggtctattgagatacttagtggtatccataatcaaaccaaaatctctttttcggtttggtttttccaggtttttttgcctagacgagagagtagagttggaagcaaaagaagcggcaaaacaatggagaagtgtaaggctttgaccgcgttattttatcgacgaaccactctcttaatacaaacataaatatctcatcggctgatgtcttaggctgaaatcaaagtcatttgaagagacattttcgtcactaaagaaagctacattttattgaagtctctatttttactttttagtattcccaagtgttaatcatgtagactaatagtaatcataaatttatttgtattttcttttatatatagggtcagtttcatcgaatacaggtagagaacgagcttaaaatttggaagtctttgtgatcgtttggatatgcttaaaccatctgttttattatttggttttgcgagagtcattggtaattcgttcaaacacttttatcacttgatagtggaaatattttctgacatttttggtggtttcgattggattagcctttatgataatggtctcatatcttcctatatactctttctgtttcatgttagaagatgttgtagtcattttattttgtttaaacgtaaaagatgttttggacagaaattcatgttttaatgcaaaagttaaatttatacaattttgtgactaattatattctatagtaatatttttcattggccaaactgtatttcactaaatatttaattacgtttcaatgtaaaaaatataaaaacaaaaaaaattagtttttttagattttgtgtgttttagcctaaacatcctatattttgaaacatatggaaaaactactaacttatcgtgtttcaaaattaggaaatccaaaaatctattaatttggtctcaatttttcatgttacagtttctatttcattcactcatttgcgtttaccgctttacgcataagaaaacctccacgaaatttactaatgtaaggttaacggacttagaaaactaacacaattaattgctatacaaaaatagtattttaaaaatgcgtgcttaactggaaatagtaaaaataatcaattattaatgtatacttttgcagataatagcatagttatttatcgtgatctaagctgaaattcacagtcagtcgttataattgagttgtttaaattattatttacacaaagtgagtaaaaacaaaagaaacaaaagactgagacattgatcacattaattgaaaactgataattttcattttatgatatattttggatacgacagtattgtcgctacattgaacaattatgttttgttttagattttgttaatttttctgatatcttttgatatccaataagatacttcttaactttaaattattagattaaattgtttacaacataaaatcaaatgatttatatgagtattatcgaaatgtcactacaaaaaatcaggtaacatgttaccactcgatttcttaaggccaatacttcatgttgttcaaaaaaaagatactgaaaactttgaatttttttaaaataagaaaatatattacaagaggatgataaactatgattatagtaatattttttaatattaggaggaaaaaaacaaaattctgaagactatattatttctttcaggcatattagctaattccagcaaaatcattaaattcctttgactagaaaattaaacattttaaatcatatacaaaaaccgtgtgacttggtgaatttaattagtgactatgactcaatttcaacaacctcttgagtcttgaccttgtatcttttaaaaaactccccttagttgtcacttaattgtccatatatacttacaattatttgatttaaattgacaacctctaattactcatatcaagaaaaaaatctctactcttaaagccatatttcagattttgttgccttcctatttgatattttccttctttatttgatagctttttaccatataacacttgaaactttccctacgtctctctatcatatctatatatcttgagagattctctattctttttttcagacaagtgacaaggaagacagaaagtgaaataagtcttgtctctttttttttttttggtgtggaatattggttgagtttgagtgacgatgtctttcatcgacccaagaacttacattccatcgaactcaactgaatcccagatactgaaatttacgtttatcgtctgtgtgccaatctgtgtcatattaatcgtcctcctcgttctttatatcatgcgtcgaaacagcaataccaacgttgattggtcttctcttggtggcttcgtgcccaccaacaataatctctcaacggtattactcaatctatgaaagattttgtggtttttgaaacattttgatgtgtttggttcttttaatgatttgctgactcatatttatgaacaggctgaattaggactgagcaaagacataagagagatgcttcccattgttatctacaaggagagtttcactgtcaacgatacacagtgagttctctcttattcataaagattttatcttttgtggattcacgatcttttttaaggcttatctcatgaaataaacttgttctctccaatgtttgattatcacttgtgattgataagtggataatgttcttgtgtacataattaatttcattgaaactgttaccttaggttgatgaaaatttcattattttgttcggattgcacataagcgaaatcgcgatctcattttcgagtggaggcatataggaccaaaaattcaatggtgcaattttggtttgtatattgagttgtttgatgaaatagttcttatgagtttgcgatttggtagaatcttttgatcttagataaaattatatatatgcctcataatatgggtattagctccaacagaaacctgactaaactacttttgtgtacgtttgtttttatctttctttgaatagccaaaacataagaaagaatgattatgaatcacctgattttgactttgagtacttgaaaacagatgttcagtgtgtcttggggactaccaagcagaagagaaactccaacaaatgccatcatgtgggcacactttccacatggaatgtattgatctatggctcacatcgcacacaacatgccctctttgtcgtctctcccttatccccaaaccgtccgtagacctgtcccatcaaagcatagagattgtatcttccatagaaaacactaacggaggagaagcttcaactcaaccagattcccagtcagcaaccgaagcaataattcacatcgatgatgtcgaagaaggtaaccgagatagtatagaggtcgttaaggaatcggaagagaatgacagaaacagcgtagggacatctgatggttgttgtagttgtagacttggtgaaaaagcgtagaagctttgtcttttgatgatcatattggtaagatttaagaatttttgttgtctctattgcgtttgttagtaacattgttaagagtgaagtaaaggcatgatccataaaaagaaaatagtaagtttggaaagatttgtgtcatttttgttttataaatcatgtcggctgatctagtcagattcggtaggaaacacaccaaagagttataaagtggacttcatgggacgaatccatagttttgaaattatgttataaagtggatttcccgacccgaatccctagtttggaaattttttgacgctatactatatactcgagtctggaatattttccaactatcgctttcccccctagcctagacttcccacatggatgtagatttacattgttgtaacaacttatacaaagttagcatattttctcgtaaaatcttcgcatggaaggaattggtggtgatgtagcaagatatttggaaatatttcaaaaatctatttattttatattttaatttattaattataattattcaagaatatttttttttatttttttttttcttttgtcaagcactttctttcattcattcaaataagaacaagtacaaaaagaagaggatttaagtgatccaaagtttaaaatagtacaatagtagacattccccaatgccatacaaatatagataaagtttatcgactttgaaaccaagagagatgtgagacaagagtttgggagcacattgacacatgtgaggtcatggtaaatcgaaacatcatcctcgaaaggttcggaggacaaaagattggtcatggtcataagactttgtgacgttgaaaaaagaatcgatgcattgattttcgccggagcaagatgagctacccaaagtagcacgaaaacaaagattcggaagactatggtgatgtagtcggttgaggattgctttagaaccaagcgcaaggtttagatctctttaagaattcacatactaacctttgaagcgtaagattagatgaatgggatatgtcaagctgaagccatgattcataaattgatatgtgtagaaccataacaaaacaggtggatcctctctcacatgaaaaaactcgatcgtccacatagattaagcattccatacaaagcttgtcttaggtttgacacatgaataagagaaacataccatggtacataggatccaggccttcagggtgttggctgggtgttgattgaagtcgctaaacaaaattgtcgaggagtgattgttggccacaaggctatcgagaccaaaagcaaaccgtttgcaatttgagttcaaggctaaagtatcacgagacttcaaaaaattatgggcaataaaactcaagcagtgcttctgtcgatatatgaaattgtgggagagtggtacttaggtatagaacatccaaaaccactattaagccttcaacaatttagatttgggatcaaaataccagaattctttagacttacagaattcacatccatagatgaagatgttaccaggatttgtagatgttggaagttaagcttaagcaatggaagtgatttctccaatcggtggtgtccatggccattcgaagtgagagaaaggcacgactcttggttaaggctcgacaaagagaatagaatagaagacatgggcttgttaaacagtattcttaagtttaaaggtttttattttttattataaatagacttctaaggcttccaattgtatggaagcaaggttcaaaaaatcgcataaatcagggactaatcgccgattaaacgctaaaatattgatgaccgatgtgagtaatgtaaaattgggccaaacatcgggtaaataatgaagaacaaatcatatatatgaaagttggccaactctttccatatgattgacacatcatcactttagcatttgccatgtgtcctctaaataattaatgtaagctcttcaacttctaatttatagattaatgatgtatttattatttaattttacatatttaattgtactaatactaaatttattttgttattatatgtttttcaataaaattattttatcggttttctcatactcgaagatgtttttctgtaatcttaactcaaataatgagtgtatagtagtcatgaattatttaatagtttgaatagtttgcagatttttatatatactagattttaacccacggtatactgcggagacaatttattttttttaaaagttagtatatataaaagtttgcaaattgtatctatctataaaatatttttattttatagtttacaattgttattaaataacgtcccgccaatccgtcccgtaaaaaaacctatttattttgttaatgttgatcttatttatgatatgtttatgaatcattgtttaaatattttgtaattttgtagtaattaactgttatcaaatatttctacggtttgatgcttataatcgaattgttatagtcatgaaaaaaacaatttaaaaaataataattttgtagtgtttaaatgatattaatattttggaagttttattttagtaactaattgtgtagttaatgtagagagattgtgggaaagtagttaaatgcaaacatttaattctaagatttactttttaattatcaaaaacaattattaaataccaatgacagccactgtaaataagtctcaacttgaggatttatttaacaaagtggctgcaaaaatgtatatgtagataataaatcaccgagggtaaagagtatgtaagaagtttaatcatcaaattcttaattaggtttcgagaatcccaacattaccctctatttaattggtttaagacgaacattgtttaggaagtgtgtgtatgatgcattattgaaaatgttgttcggaaaaaatattttaatactaagaataattatttattacatgagtgaatgattacataattaaaaattatatttaaattaaacgataaaaaaatctgaaaaaatactgcagcgtagcgcgggtgattatctagtgagagagaaaaaaaagttgcagaaaattggaagaagagggtccggaagaaaaagaagaaaaggggaagagagaaaatatttaataaaattaataaatatgagtggttgccaatttttaagaaataaaatattaaaaaattataagttagaagaagttttgtatgtggattcgacaaatttaatgtatgtaattttttagattaaattaccataattatatcaaaattaataaatgcatagaaccgattggaatagatcagcaaacgatttatctctatctaggcgctaaacccttatcaaacgtctagctaccgactaacgattttttgaacattgtatgaaactgttattgaattggttaatctaaggatttaaagaggtttgataaaatatagtaaagagtattcataaatcgtaagagtttttatgaaagctccgagaagatgattttcaaattctagtttttgaatattctctgaaccaatagatttagttctatctctagaaacttccggttcatcaattgttttatggactataaagataaacttttttttttatttttttttaaatatatttcttaattaatgatgatatataaaactattgaaagctactaaaattagacaaaagtgacggttgtaaaaatgagaaaaagaagctataaaattcgaactacagaatccatgaaatatgttatattagtgatattttggattcacaaatgctaaattataaaagtaaatgaatatattacattagcaaagtcaactatcaatgtgttacaacaagcccgatagggaaagaatctggaatctggttatacggaaaaaagaagggctgttatgtaaagatggaagagtggcgtctcgaatcagtcaagctttctcccaatttcttctatattttcatttgtttctctatttagcacagaaaactcatctcggtcttatcagatggtatcagagccttcgatcttggttaaaaacgtaccgtcaagcaagaaacggaaccgtaaactagcccaacattctcggaaaactaaagaatcgagggtcccccaacgagtaagggagtgagtctgtccaaagaagcccttaagaagcggagtttcactcgacaaaaaaagtttggactgaaaccatttttagacataatcgactgacttctaattgcatcggatctaaagatctggtgcctgttccgatagaaggaagggagtaaggtttaggctttacccaagagtcgatcattacaaaaagtactagtttgaaaggctaagttgccaagaaatagttcctttgcacgagtcaaaaatgaaacttccaagtttgcatagtcaatggacatgacaagtatatttcaaattaacataatcaaaacaaaacatgtgttcgttggaaataatgaaatatttctcaattaatgatgttatacttttcagttaataacacaaaaatttatcatgatcttcaccgtaattcacgcttagaaattaccagttgagatatttgaatttttatttatacatagtgaattagacaaagaataaatgagacatcgcacattaacctagaattaatattttaccttttttaacattaattgtggataccgatagttcgtcgttacatggaacaactttgttttgtgtttggattttttcaattcttttcttagatgataaatttgatatggtatgaatcatcttaatcttactcatctaatatcgttacattgtgagttcttctttctaaaaagtagtcaaatcagagacaaatcagagacaaaagtttcgatcgaaactacataaaatacagttcagaatattataactattataactcaaattttcacctacgtcaagtaaaactcttattaataattttttgcactctcaaaaagaaaagtagagactagagagtattcaacttcaccggttcagaccttaagagaaaacctaacttgctatatctttgacccataaacacaccacagaacttcactcatgaggaggagaacagattgcagatcatccaacttgtcctctctttttcctccattccaattctcgtgaacatcatcacatttcaaagagtttcaactcttattagaaaacaatcttcctctctcctctagccttaaacaaacaccatattggcctcaaattgccttttaaatgcatttgatatatatatatatatatatatatatatatatatatatataggttttttggtgggactagtttggtggaacgggtttttgaatcaccattaataaaaaaagaaaatttattattaatttgctgttttaatacgggttaaatccttaatttattatttttaacaccacgaatattagacatatcaaatcagtctgatttagaaaaacttgtacaaaaccaaaaaaagagttttgtggtataatgttacttaataacaattgtaaaccataaaatataaatgtctcaatgatacaatttaaatttttatctataataaatgattatttaattttaaaaatcactatttttagaatacaaatcatgggacgagttaaaaaaattattagacatgttatatttcagaacgagattatgtggcggacaggtttgaatcaatatatttataaaattttattaacatgccgctttaaaacaggttaaattttcagtagattaacaattgtttcgtggactcgtggtataccgttattttataacagttgtaagctataaaatataaatattttattgatagatacaatttgcaaacttttatatatactaactatattaaattaattgtcttgcaatataccgtaagttaaaatctatttaatagaaatataaaatttagcctaaatgagtaaatgttaatggaagatgtcttggcttaagcatcaaaatgtatgatctcggtagttcatgtccgatccaactcccaagcgggatggaaaaaaatatgcatggcttaagagtccatcattttttaaaaatatgcatggcttaagagtccatcatttttttaaaaaagctcatttttatgagaaatatcgaaagcaattttgggaaattgatttgtaataccgataactggccaaatacttgagttttaaatgtaaatttagtaaaggatccaagaaagtgaattatctgcaagaaccaacaataaaactttaggacttcaaaattttccaggccggacttcggcaaccacatcagttcctgctagcatcacctaatcagtttcttatactcatctgaactataccgtctactacacctcttgaagacagagagtctacaaaaccaaattgaattacaaaaatgatctatgcatacttaactataataacgcttttaagcttgaataactcgatttagcagaaatgaatagtttaattgtccgttggagttgcaatcgcattggacatcaagttcatctctttcgcttctcactatctaatctttgtcaaagtaattaaccagaagcttcaagtcaaagaacttcaagggattttatacgatatcttatctctatcatctacttttatttcttcttctttcaatttcatctctcgcaatcaaaatcgtcaagcgaatgcgaaagagatcttactcatgtgtgttaacccctaaattattattaatcgaataagatcttgtccaaaaatgttatcttttttgttgtccgtcgctatttctgtttagttcgccaagaatttgtcattgtctttacggtctttatcattaaattaattatagtattataatctttaattacttaattttgagcgtataaatctctactaaatgtttatgaatatttgattcattaccaattttaacttgaaatcatgctaattttatacttttaaccaaaaaaaatcatgctagttttatcaatttcccctaatttatttgcgatttgttacatacatatagaaaataataatacattttttttagtgttgtggaccacgtcctctagtttggtcgtcgagttctgactttttcatcacaaagataaacatctcaaacaaaaagctcacacatgacccaagaaccctagagagaagaagaagaggaatgagagaattcatcctcgattttgaagacatcgccgaaggattttgttggtactttcttcttctctttgactttctctctgactccatcatctcaatttctctcttcttctttgctctaatcacagacttctcttctttcctcttctgtctcaatttgatttcttaaaaaaacaaaaaaaaagatgggtttaatcaagaacacagttcattactgttgtgtctcaagagacaatcagattctttactcttacaacggtggagaccaaaccaacgagagtcttgctgctctgtgtttagaaaagtctcctccttttcatacttggtactttgaaactattggtaaaagaagatttgggtttttaattggagatgggtttgtttatttcgccattgttgatgaggttttgaagagatctagtgttcttaagtttcttgaacatttgagagatgaatttaagaaagctgctagggagaattctagaggaagttttactgctatgattggttctattaatgttgaagatcagcttgttcctgttgttactagacttatagcttctcttgaacgtgttgctgagagtagtagtaacaatgaattgaagagtagtaatcttggtgaacaaagcgaaggttcgaattctactaaagctccgttgttggggaggttaagtaagcaagagaagaagaaagggaaagatcatgtgattgagcttgaggaacacaggaagtctaatgatagagggaacataaccgatgattcagcgggagctggaacgtcgttggagaaggagtgtgtgtcgagtagtggacgttctgttactcaaagctttgaatggaaatggcggcggttagttcagattgttcttgctattgatgcagctatttgcttgacactgtttggtatttggttggctatatgtcggggtatcgagtgtacacgttcgtgattgtgcagacagaaaatcggataaacagagtcgattctttacattcccttgtgcattccaataggcaaaaaatatgttgattgtaatgtgaagcattcttaagttataatttggcttatgtattgctttagtcacagctttgaaatatgtacagtcggattctagattctgttcagtgttctttgtgacttcacgatacagtaacgtccatctttatatgatttaaattgtttgagcttcaacttcaaactcaatcctctttcaagttccctaagtaaggccctcactagcaaagaagctggctttgagatgcataaggctttaccaacaagtgtattgattgtatgattcgttccaacaagtgtattgccactgcagttcttgttgttaccgatcaacaaaatgggaagtaaaaaatggtaggtagataggaaccgatccgaaaaaagttccgaaaccgaactgaacagtcacaaaatccgaacggataatgaattcacctacccaaattacttcagccgaatccgattccgaatcaaaaaccgaataaatatccgctaatccgaaataaaattatatctatctaaaaatattagttacaggtttatacccaaaaatttctaaataacaaaaatattagttacaggtttatacgtccgaatttttaagttatatttgttacaattatacaattttttttgcaaaattaaaccaattttattaaaacggaacaatatatatttttttttctcaaaaaccgatccgaatccgacactatccgaaccgaaaccaaaccgaatagtcataaaacccgaccggataataaactttcccatctgaatccgaaaatccgaaccgaatccgatccaaaatccgatccaaaatgtgaatgtccatacttaagctccgactaagcaaagcaatacaacaagagaaattgtacaaagaggaagtagtaccgataagtgccaatgacccaattttgcaactattgggccattttcaaacaccaatatcaggcccattaacagattgagagaaaccaacctcccaaaagagaaaaatcaacagaaccaaaacaaagccacagtatctctctctctctctctctcactcacatcgtctcctccattttcaccactaaaaccagaccaaaaaccttcctttattcgtgcccttctgggccaacaaatgttcacaagcggtaacgtcaccgctcgggtcttcgaacgtcagattcgaactcctcctcccggcgcttccgtcagtccccaaatctctctctctgtctcaatctctcaatctcaatctctcttttgcttatctctttaccttcaatgataggtaaatcgtgcaagacacttctacgaaaacctagtcccaagctacacactctacgatgtcgaatctcccgatcactgtttccgcaaattcacagaagacggactcttcctcattagtttcagccgtaaccatcaagaactcatagtctatcgtccttcttggctcacttactccacaaccgatgattccacaaccaccctacctcctctacctcgccgtgcttcgaaattcgacagctttttcactcaactctactcagtcaatctcgcttcttctaacgaactcatctgcaaagacttcttcctctatcaccaaactcgtcgtttcggtcttttcgctacttcaacagctcagatccatgattcatcatctccttctaatgacgctgttcctggtgttccttccattgataagattactttcgtacttcttcgattagatgatggtgttgttcttgatgagagggtttttcttcatgatttcgttaatctggctcataatatgggtgtgtttctttatgatgatcttttagcgattttgtcgttgcgttatcagaggattcatcttcttcagattagagattctggtcatcttgttgatgctcgtgctattggttacttttgtcgtgaagatgatgagcttttcctcaattctagctctcaggtaagcaaagtttttacagtatctttctctggagtagataaagttttgagctttgtgaggtttttgattgttaggcaatgatgagtcaagataagagtaaacagcagagtttatctgggagtaaggaagatgatactggagagaatgggttgcgtcatagtctaagtcagccaagtggttcgaattcgtttcttagtggtgttaagcaacggttactttcttttatcttcagggagatttggaatgaagaatcagataacgtaatggttcgttgttcttcaacttctcttatcactttatgaaattgctctgagtttcacaatcttgtacattaaatgggttatgtttgtgtactgcttggcttcctctgttagatgttgagtaggataacagaagtttaaggtttaggattgatgcagttgacagtgacttcttagttgatgcagcttatcatatacatgctctttgcattttcgacctttcgttgtagtttgcaatgtgtgtcgtattgaaacactacatcttggatacgaactaatcgaaaggcactatttgatttgacagagagttcaaagtcttaagaagaagttttatttccatttccaggattatgtcgacttgattatatggaaggtaatcaattatgtgtttctgcttttggaatctgtgtcaagtgtttggatttgatggtgaaaaaaactaatcttttgtgtattcttgatgtccaggttcagtttttggatcgacaacacctgctaatcaaatttggaagtgtagacggtggggtaagctctctataatacaaattcatggttacattgaactgatactgtcattttcagaaattacaatttgattgattagacttatgattgttgatgggttactcaggtaacaagaagtgctgatcatcatccagctttcttcgcggtgtataatatggagactactgacattgtagcattctatcaggtaaaatggatgtcattttggccagttattttgtggaatttgcatctacttataacttgacttagtacattactatatgcagaactcagcagaagatctttaccaattatttgagcagttcagtgatcactttacagtatcaagtagtacaccgttcatgaactttgtaacatcgcattctaacaacgtctatgcccttgaacaactaaaatacacgaagaacaaatcaaacagtttttctcaggtaagtacatctctgtatttcgatatgttggtttttatgagagagttgaatctaatcaatttttctatacagtttgtgaagaagatgttactctctttgcctttcagttgtcagtcacaaagtccctccccatatttcgaccagtctctcttccggttcgatgaaaaggtaaccattctataaacccttattctcttcaacttcaggattgagttaagttaatttcggatatggttacagttaatatccgcagcagataggcataggcaatcctcagacaacccaatcaagttcatatctcgaaggcaaccgcaaaccctgaaattcaagataaaaccaggttggttgttttagttgtttagatattaagatgacgaaaacccaaaccgcacggaacatgatttaacgttaggattgtctaatggtgaacaggaccagagtgtggaactgcagatggtcgaagcaagaagatatgttcattcttgttccatcctcatttaccacttgccatctctattcaacaaacacttttcatgccaccttctgtcgtcaatatccattttaggcgatgactctttttggtttctatcagtctagtagtcttcctacatgttgtaatctattgtttgtaacaaaagttcagtaaaacctctataaattccgagttgggccgatgtaaaaattaacaaacttcgataaaataataatataataatcttttggaaagctttatataaaaatatggttttaatgtcttttaagtattgaatcttgttagagtttgtctctaacttttattctatcaaacaattgttttgtctctaagtctgattgaattatgttggggttttcaattgtcaaattatagaatcgtttataactttgtaaaaaaattagccataatgttttgtaagtttctaatttcttagtatgcatcattttcaattatagtttttgtgatttattgtcaaatgagctttttaaatattaaattttcaattatattactataaaatttataacatctcatagtttctaaaatttgaaaaattaaaacaaatatctctataaattaataatttaaatttaaattaatatattaattatagataaattattaatcactataattaataaaatatcatacttccatctttattaatttatagaggttttactgtatctcaaaacacataatacatgcaaaaagtgtttgaatcttaaaaaggaagaaataactaggaggtgttattggttcctaactaaaaagaaattttgaagactttaataatatcatataaagtaaataaatgaaagattctaaactataaactatttgtagagagttttcaataatattattgattagtttttcacaaggttcaaaaaatcggcctaggcggcccgattttagtgaaatcggtgaatcaaatagggttttcggtttaagcgttcaaaatcagtattaaccggtcaaatcggccagtttagtatatgtaaatatgatcgttttgaataagtgaaaaataaagtaaaagtacttgattactaaacttgtaagttagcaattaattattctcaaattttcagaataagttaatttagttttcatagaaattttgtgtgaatatacatatattataaattcaaataggtaatattttcaacatttcatatattttaaccaatgttttgttataaaattatgaaaatgtttaataaatttgtaaaatgatgtgctaacgcctaggctttgcctagcccccgattaattgatctaggcgttaggcccctatcgaacgcctaacaattttttgaacattggttttttacaatcttataaagtttccaaacaatctctatattttaatgatattttcatgactttattttgtgaaacaaatggtagaaagtcataaaccaattacaaaacaatttaattcatctacaatagtagattcttttgttttaattgaataaaacaaaaaaaattaatgactttatgaaagtattaatccattaactccagatttgtgaagattttagattacttttcacaaatcttaaactaataatacaaaactttaacaaatttttcaaaaaatcttattgaataacaacatattctacataacattttaagtcactaaaactctatttaaatcataaaccaataacatacctttagtatatatgttaacaacaaaacaaagaaattgtaattttgaccgacagttgtaacttactcacaaatatatatatttgtagatctcataagtcataactttcatctccgaactctagtttctttggattcaaggtatcataaaaacctagtctgtctttaaagcttatgacgaagagaaacatagtagatcttcccgaggatttggtaatggagatactcgcgagggttccgaccgtaactttggtccgattacaatctacatccaaaagatggaacgttctgatcgaagataagagatttgctgagcagcactttactaatgcaccaaggcactctctgcttatcatgttgatgacctttagggtttatctcgtgagcgtcgatcttcatacaattcacaacaacaaggtaaacataataagtcaacttcgcctgaaagatcctctttcaaattttttagaagaagttgatatatgcaacgtctttcattgcgacggcttcttgctatgcaccaccgtagacaatagactcgttgtttcgaatccctgttctcgtgatactaagtggatccaaccaagaaatttctacaagaaattcgatatatttgctctcggtaaatcatcatgcaacaagtacaaaatcatgaggatggatcaattttatcctgataggccagaatttatgaactacgaaatctatgactttaactctaattcgtggagagttgttggtaagattacagactggttcataccaaggtgtatggaccgtggcatgtctgtgaatggaaacacttactggcttgcttctactaataaagacttgaccagtagtagttttttacttggttttgatttttcaacggagagatttgtaagggtgtctcttccgggtgatcatctctctgatcctgtttttgctttagcagttactagagaagatccaaaaatatgtgttgctatcattcaggaactccatatagatgtatggattgcaactacgattgagagtacgggagctgcgtcatggagcaagttcctatcagttgaattagcaaatctctacgagcgtatttgcttggatagttggatgaatttcttggtcgaccagaagaacaaagttttggtgtatcgtgatggtaactattggatctccaatgttttcttgcacgttgtgggagaggataaatgtatacaagtggatcatcatgattcagtgtctagatgctcacttgtcgtcaattatgttccaactttggttcatatctaacaaggtttgtatttcttggagtgaggcaaaagggaagtagctagaacatctagtaatctatgatcgtcatattaaattatttattatctatccaagtcatgatatttgattttcaaagaaagtcatctactattttctctttaattatgtcatataacactaaggttatgagttctataaatcaataaatataacctgctaaagcaaaaacactaaggaaccataatattttattagtttatcgattctttttagttgttaaaattttggagaaacatgagttaacacattttaatagaaacaataaattaattatttaaatgtcattattattgtagtttttgacttgaaaatttaatatttagaaaataaacaattcttttgaacctgcaatgtaattcatatttttttcattaggtttatctcgggttagagataaccacggaattaacaagtacacataataattaaattagaaatcaatgtgaataattaaattcgtaggtcgcataacatcgcttctatcccttgtaaccctagtttttttggaagcaagttatcatcaaactgtctatttttagtatgatgaagaagagaaacatagtagatctttctgaaaatttggtagtggatatactctctagggttccggtatctttgggctggccctgagcacagcaaaataaaacatttgctgtgggccatttttgaaacaaaaaatttcatatgtataattcaaaaaaacaaaaattaagtggcccattttatactttgagtttcataaaaaaaaaacataaagcccaaagtaatttttttccctaataaatccaactccacgaggcttcatctttctctgctccattacacaacacaaaccctttcatcatcgctttctaatcttcaagactccaacgacacggcgacatcaccatgacaagtatatctgattctttttaaaaaatatctgttacttgtagaatttgagtttatgttaaagttacagtagaatttgacagaaaaatagttcttcctatatttatctgattgtttcggattaaaaatttcaggggttccaattcgaaaatcaaattgtaaatccggagcccaaaaagcaagagagagaagaaaagaagagacaaaatgacgaagtctttggctgattctatgttgaggtatgtgaaaagatcaacacctctcaaaccaaatgagaatcctacgagtgttgagaatgacaaagcagaagaaatttgtgaagatactgatgtgaatatgaataccataccagaatgtgtttacagtggagaaaaagatgagcttttggaaattacggatccagcaaactggaaaaatattgatagggaattaagagattttctagtcgaaaaaggtcctatgaaaagggtacatgagaagtatgctttcccgaaaactgctggtattagaagacatttttctcacaggtattacaaaagagagatgaaaaatggagataagcaagacagaaattggttattatactcaaaagtatcggataaggtttattgcttttgctgcaagttatttggtcgagaccaagacgcgatgcagttgtcaagcaccgggtttaatgattggaggaatatcaggataagacttagccaacatgagactagtcatcgtcatattgtttgcatgagtaagtggatggaactagagttgagactacgaaagcatctgaccattgataagtgtcttcaaaaagacattaacatagagaaaaaccattggagagaagttctgttgagaatattttcattggtaaaaaaccttgcaaaacagaatttggctttccgtggagaaaatgagaagattggtcagaaaaacaatggtaactttcgagttttattgaatcgttcggcgactttgatccagtcatacgagagcatatcagacgagttaaagaaggtgaaactcactattattggctaagccataaaatccaaaatgagttgattgttatgttaggatctcaggtccaacttatgattattaagaaaattcaagaggcgaaatacttttctgttattctcgactgcactccggataagagtcataaagaacagatgagtctcattatcagatgtgtggatgtctccatggcttcgacacaagtttcagaattttttctaacgtttgttgaagtttcagataaatccggggaaggactctttgagctactttgtgatactttggttgctctcaatttgaatattaatgatgtgagagggcaaggctatgataatggatgcaatatgaaagggaaacacaaaggagtacaaaaaaagttgcttgatatcaattcaagagcgttttatacgccgtgtggttgccatagtcttaacttgccaagtcatctaaaaaagcgattgaattctttggaatcattcagcggatttactgcttgttttcatcatctacaacaaggtggaaactttttaaagagatggttggaggtctcacactaaagccattatctgagactcgttgggaaagtcgcgttgaaagtgttcgggccattcgatttcaggcctaaaaataagagatgcattggactacttggctgaaaattgtgatgacccgaaagctcgcagcgatgcagactgccttgctacaagtgagacacacagaattggtggatttgagttcttgtttggtatggttatttggtacaatcttctttttaccatgaacacagtaagtaaggcgctacagtcagagaatattgatattgaacttgctcttgttcaactgaaagggttagtctcttatctacaaaattacagagaaactggttttcaagaagctaaagcagaagctacattaattgctgaatctatggatatcgaaccaaaatttcctgtgaaaagaaagcgcatcattaaaaggaaaaggcattttgatgaagagatggagaatgatgttgaaactgaattgcttagcgaggaagagaattttaaagtcgatttttttccttagaatcctagatcaagctatagtatctgcaggtgaggtttgagcaatttgaagagtatggaagaatttttagatttttgtttgatctaaggaagctcaaatctgcaagtgatgatggcttaaaggcagcatgtataaaccttgaaacttctcttaaacatggagatagttcagacgttgatgggaatcatttattcttagagctgaaagttttaaaagaacttttaccgaccgagatcacgaaagctattgaagtgttaaactttttgaaaaagtttgaaggttgttatccaaatacatggattgcgtttagagtgatgctaacagttccagtttcagtcgcctcagccgaaagaagtttttccaagctaaagttgataaagtcatactcacgatcaacaatgtcagaagagagattgaatgccttggcgatattgtcaattgaaagagatttagttggagagctcgactatataagtttgatgaacgactttgcggcaaaaactgcaagaagatctattttcgaaatccgagatgatgatgagtagcaagtgtagtttcagtttttagaaaaacttgtgtttcatttacggtttatcattggttttgtactttttgtttagtatggtaatgaaaatttttggccctcattttggattttgctctagcccttctaatctcagggccggccctgatctttggtacgattacaatctacatccaaaagatggaatattctgattaaatttgagagatttgctaagaagcactttactaatgcaccaagacactttctgattatcatgtcgatttagatgttataaaataaaataaaaataaaaatcacttataatggacttcataacctttattatcgttgcacacaaaaatcgaacatcttttaggaactggattcgctagaaagactttgttcgccaaaagaacatgattcactaagagaacttggtttgctagagtatgacataaaagtatcatgataatagggatatgcatagacatgtaattatgaacaaacaaatatctctaaccaaaaatacgatttaaccacataaccaatacactatatgtattgatatgaaattacttatcacctcaacatcgacaaaactttccactactccctcaacggaccatgaatgtaagaaataaaaaggttaacattttcagtgtttgtttcgtttttacggaaagtcacagttttacctgataaaaatagtaactgtcaatctaagtttctaatttaatttctatagttaaaataattgacacaaatattagttttcctttttttttattttattatatcactacaaaattttgagtgtctaaagctctcatataatgattattattattattattatttctttttattctatttcatttttcattatgaataatcacacaattagtttatacaaacattaataatgtcgcatcattttattataaaactttttttgttttaatatattgataaatatattttatacaataggattataaatgcaagagaaatttttagtatcttcaatttacacatatattttttattacaaatacttaagtaatattatcatttttagatttcttttttttctaaatgtacaaataatatgtcaagctcgtgtaaaaaagttagtttcaaagatgtgaataaatttcataaatatatcaatggaaattacttaaattaagaagaaattatgtttgaattgtgtataggccacaaataattatgtcatccttcacttgttagtgtcaaagagaacattaaatctcttaaatgtattgatggaaattacttgttttatgaatttgttttgtttgacttgtatatggttcaaagaaatatttactattctactaaagtattcaggtttgaagggatttaaggaaacataattactatctataatttattatttgcttaacccctagctgggtgtacaactatatatatgtgtatactctactctaatgaatcattgagacatattatatatgtagggagaaggtgattatcccaaatgatttcttaaaaaaattcttcaactactatatctcaataataattgtattcatataacaaaaactaatgattgattaaaaaaaaaataactaatgatttcatttctctattttgtaggttgatgaaaatgaaattgggatattcacttccagtgatgtgcatgattttgttctgctatattctatgttgtagccttttgatgagtcattgtcatggcgttgtagaagcagcaaaggcattaaaaagcaatgaagatcttgaaatagagcaaaaacttgagcttatcaacaaacatacggttaaaatcataaaggtttatcctcttaccatattatagaataattgaatgtgtttaaatatgtataacattagaatctttatcgtaagtatatgatcctaaagtatccttggatgtgtatagtataaacacgattttagttatgaaatcatgcgtgaaacacttagtatttattatgaaaacatataatatattttcttatttatgaatccacagtgtactaatggtgaacgatatgggtgtgtggatttctacaaacaaccaggacttgaccactcattgatgaagaaccacacatttcaccataaggtatattgcagtaataatatgaattttcttatttagagtatttaaactctatgtaaaaacaaataaagggaaagtaattaagaaattggcaatatagtgactaaaatatgttttgtatcatatgataagttagaactctatataacaaaataacatacataaagaaatcaagctttctcgtaatttttaatatgataatatatcagatcattgccattattctttattacaattattcatatatattgacatttggtaaatttcactctaataatgtaactaccttaattttaacaaaagtggatagtagatacacatataatgacaaatttttcttattattcttaatataaattataagtaattaaaatcctaaatggtacgtattttgattagaatgagagtaatatttcaataagttactttgagaaaattaagtttataaaaatattatttttgtttgactaatttatatatgattctgatgtgcagatgcgtttgatgtcataccccgaaggatcaaaaattaaaaaacagacacatattaacaaaacatttggtcacttttggaagaatggcgtaggtcgtcctattggtacagttcctatacttttagtcagcaaagaagctcttttgaaaatgaaatcttttgatggtgataattctaatccccaaagttcgtggagtaaaacctataaacctacgtcttctaatggaggtcatcatgtaagtgctttcttatagcatttatttttcgagtaaaaaatttcaaacatatagtatataatcgaacgtcgcaataatgagattgatagaatggtttgaaactatagagtattgatgaatatgtttgcacataattcttaattaaaaaaaaaattacaatcctctctttgatgagatgaataaaaatatatttaaatagattagagctttaaacaagtaaataatatatatctttatttgaaacacgggaatgttttaattacaattttgtgcattgtaaatatatttatggtggatgaaatattagaaaacatatgtaattgtatattgtaattcatcatttaatattatctattatctaatataattatatttgaatatatcaaatataatggtttctattagctctaattacttatactaatttataagaaattgattctaatttctgagcacattacaatatatccatatagcaatgttagtttatgtaccattgtattcagtttgctgtggtgcgtactacgaaaggaaaaccaaggagatataatggagtggctatgaacattaattcattcaatcctccagttggacctatggaattc

SEQ ID NO: 562 - DNA, 99856 bp, Arabidopsis thaliana
gaattctttggaatcattcagcggatttactgcttgttttcatcatctacaacaaggtggaaactttttaaagagatggttggaggtctcacactaaagccattatctgagactcgttgggaaagtcgcgttgaaagtgttcgggccattcgatttcaggcctaaaaataagagatgcattggactacttggctgaaaattgtgatgacccgaaagctcgcagcgatgcagactgccttgctacaagtgagacacacagaattggtggatttgagttcttgtttggtatggttatttggtacaatcttctttttaccatgaacacagtaagtaaggcgctacagtcagagaatattgatattgaacttgctcttgttcaactgaaagggttagtctcttatctacaaaattacagagaaactggttttcaagaagctaaagcagaagctacattaattgctgaatctatggatatcgaaccaaaatttcctgtgaaaagaaagcgcatcattaaaaggaaaaggcattttgatgaagagatggagaatgatgttgaaactgaattgcttagcgaggaagagaattttaaagtcgatttttttccttagaatcctagatcaagctatagtatctgcaggtgaggtttgagcaatttgaagagtatggaagaatttttagatttttgtttgatctaaggaagctcaaatctgcaagtgatgatggcttaaaggcagcatgtataaaccttgaaacttctcttaaacatggagatagttcagacgttgatgggaatcatttattcttagagctgaaagttttaaaagaacttttaccgaccgagatcacgaaagctattgaagtgttaaactttttgaaaaagtttgaaggttgttatccaaatacatggattgcgtttagagtgatgctaacagttccagtttcagtcgcctcagccgaaagaagtttttccaagctaaagttgataaagtcatactcacgatcaacaatgtcagaagagagattgaatgccttggcgatattgtcaattgaaagagatttagttggagagctcgactatataagtttgatgaacgactttgcggcaaaaactgcaagaagatctattttcgaaatccgagatgatgatgagtagcaagtgtagtttcagtttttagaaaaacttgtgtttcatttacggtttatcattggttttgtactttttgtttagtatggtaatgaaaatttttggccctcattttggattttgctctagcccttctaatctcagggccggccctgatctttggtacgattacaatctacatccaaaagatggaatattctgattaaatttgagagatttgctaagaagcactttactaatgcaccaagacactttctgattatcatgtcgatttagatgttataaaataaaataaaaataaaaatcacttataatggacttcataacctttattatcgttgcacacaaaaatcgaacatcttttaggaactggattcgctagaaagactttgttcgccaaaagaacatgattcactaagagaacttggtttgctagagtatgacataaaagtatcatgataatagggatatgcatagacatgtaattatgaacaaacaaatatctctaaccaaaaatacgatttaaccacataaccaatacactatatgtattgatatgaaattacttatcacctcaacatcgacaaaactttccactactccctcaacggaccatgaatgtaagaaataaaaaggttaacattttcagtgtttgtttcgtttttacggaaagtcacagttttacctgataaaaatagtaactgtcaatctaagtttctaatttaatttctatagttaaaataattgacacaaatattagttttcctttttttttattttattatatcactacaaaattttgagtgtctaaagctctcatataatgattattattattattattatttctttttattctatttcatttttcattatgaataatcacacaattagtttatacaaacattaataatgtcgcatcattttattataaaactttttttgttttaatatattgataaatatattttatacaataggattataaatgcaagagaaatttttagtatcttcaatttacacatatattttttattacaaatacttaagtaatattatcatttttagatttcttttttttctaaatgtacaaataatatgtcaagctcgtgtaaaaaagttagtttcaaagatgtgaataaatttcataaatatatcaatggaaattacttaaattaagaagaaattatgtttgaattgtgtataggccacaaataattatgtcatccttcacttgttagtgtcaaagagaacattaaatctcttaaatgtattgatggaaattacttgttttatgaatttgttttgtttgacttgtatatggttcaaagaaatatttactattctactaaagtattcaggtttgaagggatttaaggaaacataattactatctataatttattatttgcttaacccctagctgggtgtacaactatatatatgtgtatactctactctaatgaatcattgagacatattatatatgtagggagaaggtgattatcccaaatgatttcttaaaaaaattcttcaactactatatctcaataataattgtattcatataacaaaaactaatgattgattaaaaaaaaaataactaatgatttcatttctctattttgtaggttgatgaaaatgaaattgggatattcacttccagtgatgtgcatgattttgttctgctatattctatgttgtagccttttgatgagtcattgtcatggcgttgtagaagcagcaaaggcattaaaaagcaatgaagatcttgaaatagagcaaaaacttgagcttatcaacaaacatacggttaaaatcataaaggtttatcctcttaccatattatagaataattgaatgtgtttaaatatgtataacattagaatctttatcgtaagtatatgatcctaaagtatccttggatgtgtatagtataaacacgattttagttatgaaatcatgcgtgaaacacttagtatttattatgaaaacatataatatattttcttatttatgaatccacagtgtactaatggtgaacgatatgggtgtgtggatttctacaaacaaccaggacttgaccactcattgatgaagaaccacacatttcaccataaggtatattgcagtaataatatgaattttcttatttagagtatttaaactctatgtaaaaacaaataaagggaaagtaattaagaaattggcaatatagtgactaaaatatgttttgtatcatatgataagttagaactctatataacaaaataacatacataaagaaatcaagctttctcgtaatttttaatatgataatatatcagatcattgccattattctttattacaattattcatatatattgacatttggtaaatttcactctaataatgtaactaccttaattttaacaaaagtggatagtagatacacatataatgacaaatttttcttattattcttaatataaattataagtaattaaaatcctaaatggtacgtattttgattagaatgagagtaatatttcaataagttactttgagaaaattaagtttataaaaatattatttttgtttgactaatttatatatgattctgatgtgcagatgcgtttgatgtcataccccgaaggatcaaaaattaaaaaacagacacatattaacaaaacatttggtcacttttggaagaatggcgtaggtcgtcctattggtacagttcctatacttttagtcagcaaagaagctcttttgaaaatgaaatcttttgatggtgataattctaatccccaaagttcgtggagtaaaacctataaacctacgtcttctaatggaggtcatcatgtaagtgctttcttatagcatttatttttcgagtaaaaaatttcaaacatatagtatataatcgaacgtcgcaataatgagattgatagaatggtttgaaactatagagtattgatgaatatgtttgcacataattcttaattaaaaaaaaaattacaatcctctctttgatgagatgaataaaaatatatttaaatagattagagctttaaacaagtaaataatatatatctttatttgaaacacgggaatgttttaattacaattttgtgcattgtaaatatatttatggtggatgaaatattagaaaacatatgtaattgtatattgtaattcatcatttaatattatctattatctaatataattatatttgaatatatcaaatataatggtttctattagctctaattacttatactaatttataagaaattgattctaatttctgagcacattacaatatatccatatagcaatgttagtttatgtaccattgtattcagtttgctgtggtgcgtactacgaaaggaaaaccaaggagatataatggagtggctatgaacattaattcattcaatcctccagttggacctatggaattcagtgctggtcggatgcattttcaaattggaaatgaattcgtccaagttggttggaccgtaagtaaatttatttagatccgtttatgtactaaggtgtatcctttttctattagtaatgtatatgaactatattttctatctattttaggtacacccacaattatatcacgacttcaactcacggctgttcatatatactaatgtaagcatgctggatctcgttttaatattttaataccatatatatgaattatacatgattgacaaatcaatgatttatactcaaaatgttatatggttggattcagtcaggaggacatgggtgttataatcccttatgtccggtcggatccggaataatactagtcagtcatgaagttactcctggtttacttaccaagcacaacgatttcgaactctccataattaaggtcagtttttttccaaaaactattaaagacataactctgtgtgttttaggtatttttaagtatagtatggatatgtagtgttagtgtttttttggtgagatctagtgttagggtacttgtattccattcaatatatatatcttactttttactttttcatattagatattgcaaaaacatttgcataaaaataattaaacattgataaaaatagttattaaaattaattgtaagctttttgtctataatctttgccttttctatatggattttttttttttttttgaaatccatgaggttctgggccgaaacccataatcttctcagacccaaagccaaatcatttaacattagtttcgtcccaaacgtcactcgaatcggcgacctctaagtttcgcctagggtctttaccaattgagctaacgatacttggttttctatatggattttgttgagtacaggacaaaatatacgggcattggtggcttttgatgggtaacagtagcagctcaacttggaaagaaattgggttctggccaacacataggttcaaagaaagttttggtacaggtgtcgaatggggtggtgaagtctatagccctgcgtctacaagtcctcctatgggtaatagtcattttccgaaggggagccccaaaatagactcatatgtccgtttgatcacgacttgggacgaaaattatggtttggacatggttgtgaaaaacacagagagattttcaaacagttgttataaagtgaaagatgcacagagtcgttttggccagatgtaggtcatcttatcgtttatggaggccccaggtgtacataaactttgttagtgcgtagcattattccaaaattgtagtatctgaaaatgttcaaaataaatcaagagaattacgttcttactatgaataaaaatatataagaaaaacgtaaagaaatttaaagaacatctttatattctttttttgttatcttgtttgacttggttagaaaggagaagacaaaagaactatttatatgttccaaattttaaaaacatcttacttattacatcatatatcattagaaaattccactacattaccttaaagatatataatattttctatagagatatagttctagacaaactttacttggtgtgttaacactcttaagtttttctagaacttagacttagttaattttgagtttggtccaataattaaactcttgatcatgatcccgtgattaaacttaacccaaagtcaagtttgatctcactaccggattatttgaggtgaatcaaaatataacaatataccatgtaattggtaggcaaaataaccaaaatttgaaaaatcaatccgaaccgaaataaatggttttatttggttatggttttttcttaaaactcatttggttatcatttttcttaagtttttggtttaggtttggtttggttaaaaaccaaatgatttttttttgtttttgattaaaattaagaataaccatatatactaatatattgtccaatttatattatgattagagtatcattggattttttctttactagacttatatacagtgatctcttagtaatatctgattattcttatattatttttattctacgtttcattttatttatgcatcaaacttatactttttttttgtaaaatacatggaataaccttaaaacccgtacccaaaccaaaaccaaaccaaaccaagatacatatagttttttatatgatttcaatttttacaaaactgaaaacccgtcataaattgtaaaaccgaaccataaccaaacttaattacatacggtttctttatggtttcaagttttttgtaaaaccaaaaaaaacaaactgaaactaaactgaaaaactgcacgcccaccctaatactatatttaaaaataaatctcaattaaaatcaaaaattaaagaaattaaagaaacaaaatacttatgattttaaggaaaatctaagaataattatttttatttattattttcatttgtcattctgaataatcacacaattagttttatacaaacattgattatgtcacatcattttatttatagtacatttttcttattttaatttatttataaatataatttatacaataggattataaatgcaagagaaaaaaatactatcttcaatttacacatagaaatgtattacaaatacttaaaataaatttcttattttcagattttttttagaggaaaagttacaaatattatgccaagcttgtgttaagaagttagcattaaagatatgaataaatgtcatcaatatatcgatgtaaatttaagaagaaattatgtttgacttgtatggtccacaaataattatgtcatctttgacttgtgcatggtcaaaaataacaataaatctcttaaaagcattcatggaaattagtaattacttagtttaagaagaaattttgtttgacttctgtatggttcaaagatatatatactatatttaggtttgaaggaatttaaggaaacgtatatgtattaattattttttctaacccttagctaggtgtatattctactctagtgaatcattcagaaatattacatttcttgtgagaaggtgattatcccaaatgacttcttcaaatctttctcctattactatatctcaataataactgtatatatagaagaaaaactaattatcaaatttctctagttcacaggttaatgaaaatgaaattggggtgtgcacttccaatgacgtgcatgattttggcatgctatattatttgtgggagccttctaatgagtcattgccatggtgttataaaagaagcaaagacattaaaaagtaatgaagatcttgaaatagagcacaaacttaagcttatcaacaaacctgcatttaaaatcgtaaaggtttatcctctcaccatgttatagaataattgaatgtgtttatatatatataacattaaattacctatcctaagtattctaggatttgtataatagaaagacgatgaaatttatgaaatcatgcaaaaaataatatattttcttatatatgaattcacagactattaatggtgaacgatatgggtgtgtggatttctacaaacaaccaggacttgaccactcatccatgaagaaccacacatttcaccataaggtattgcattggtaatatattttttcttgatatttagaagatttcaactctatttagaatagatggtaattaagtattggcaatattgtgacaattaagataggattattttcttgttttattaattattaatagaaaagtaatttttttttgtgtccactggattggagattagaatttaagtttaggatttaattagtttggtttcccataattgttaaaaataaagataaaatccaaatgtatatatatatatatatatatatatatatattggataaacatataatgaccaaattttctttttatatttaatatgaagtatagataatcatatacactattttgattagaaagagccatattttttaaaaaaatcacttttgagttttaatttacctttttatagtttaatttaagaagagtactttaataaaatttaattttggaatggctaattaataatttatattggattttgatgtggagatgcgtatgtcatactctgaaggatcaaaaatgaaaagaaagacacatagaaacacaacatttggccacttttgggagaatggcgtaggttgtcccattggtaccgttcctatacctcgagtcactaaagacgctcttttgagaatgaaatccttcgatagcgataattctaatccgcaaagttcgtggagcaaaacctataaacctgcatcttctattgacgatcatcatgtaagtgctttctttaaattgttatcttacgagtaagaaatgttaaacatatattactgaacttcgcaataacaagattggtggaatagctgaaattatagatgactatgttagcacataattattaatttaaacaatgattaaaatattctttttaatttgatgaatacaaaaatatttaagtagtttttttatgttaataatacatagctttattacaaacacgtgaaatttttgattaatatttcatggcgagtatatatatggtggatgatatactaggaaacataagtaattgtatattgtattcataatttaatattatctattaactcatacagttatatttcgatacatgaaaaatattggtttctattaactcaaattactcataccaatttataagatattgattctaatttttcagcattacaatttagccatatcagaatgttagttttctcaaccattgtattcactattcagtttgctgtggtgcgaactactaaaggaactaggagttacaatggtgcatctatgaatattaatacattcactccttcagttggacctatgcaattcagcgcttctcggatgcattttcaaattggaaatgaattcatccaagttggttggatcgtaagtcaatattaatttagatccactatttttttatacttgatgtattatagtaaatcttttttctattattaatgtatatgaatcatattttctattcattttaggtacacccacaattataccatgacttcaactctcggatattcgtatttacaaaagtaagtgggctagttcttgtttttatataatttaattataccatatatatacacgatgtatgcataattgataaaccaatgacttatggtcgcatattatatggttgaattcagtcgggaggaaatgcgtgttataatctcttctgtcctgacggatccggaatgatactagttcgtcaagacttaactcctggtctacttgccgagcaaaaaagtattgacttcgccataatgaaggtcagttcttttccaactagtatacccataactttgtatatttcgggtattcaagaacgtttgagtatatgatatgtctagtaatatcaatatgtagatgcatgcaaatatgaatatggatatgggtaaagaaaatttagtgttagggtatttgtatcccatccaacatatataactaactttcatttattcatattagatttttaaaagaatacataaattaaatccagtgaagattttgtcaattatagtttaacaaaaatgagatcatgtatgggttctcgtggttctcctagtttttatttttgttgatatttaaagtttgagtacaggacaaaatcaacgggaattggtggttgttgatgggtacatcttgggaagaagttgggttttggccatcaagcagattcaaagaaagttctggtacaatggtcgaatggggtggtgaagtctatagcccttcgcctccaaatcctccaatggggaatagtcattatccgaaggggagccccaaagtagactcatatgtccgtttaattacgactgtggacgaaaattataatactgacaaaacagtgaaaaacacagagaggtattcagacagttgttataaagtgagagatgcaacggagacgttttggagccatgtcggtcatcttattatatatggaggccctgggtgtaaataaacattgatagtgcttaccattattctaaaattgtaatatcagaaaaatcatgagaataagtttcttagtacgaagaaaaaaaaacttaagagaaatttaaagaacatttttatatctttttattcaacttgttcgactttgttagaaaggggaataaagaagaactatttttatgttccaaatttagaaaataatactattttttatctcataatcgatagaaaattccactaaaaattaaaaaaatttattcagacaaaaaaaagctaaattttaatcatatgcaaatcttttttttttatatagatatagttctctagaaaaacattaattggtgttaacactcttaagtactttagaaatattttagaacttacgcttaatcatatgattaggctcaatagtctacatgcatttgattcttgtgtgtggtaataataaggattattttattggatcgatttgtaagaaaaaatgactaataaaagcaatgaaatattacgatctttgtgctggatgaaattgtgtaatttcgatattttcgagaaatataattttatgtggttttttttttttttttgtaaacgtgtggttttgttgttacttgttactatgcagttgtagttaagtgctatgaaggaggaggtcgctgcagaggcttcatgcaaggagagatcataagccctaagggcatctccaaccacaacactaaaatggtgttagaataacactatatttggtgtgattttcacactaaattctttttcatctccaaccacaacaccaaaagtcacactaaaaatactattctctattattattttattaacctaaaatatgaatactttaaaaatatttaataatattgaaacaaatgttagacaacaaattattacattaaacaaatttaatacaaaataaagaaacacaatatattatttaattaaacacaacatattattttattcttcattaattaatataacataatattacaatttttgtcatattctattcaagaagatatacaattgtgtcatgtgtatctcgatgtttcccaaaatccaataataggaataaaccaatcaggagatcaactatggacaagagttgaagctgagtatcataaatccgatccttttcgtcttcaacgaagaccaaaaagatctttacaaactcgaatgacgtcaattctttctgcagtctcaaagctgagaggatgcgttaaccaaattgagaataaaaatcctagcggtgcttctgaagaagacattgtaagtactcaattataaattcttgtgtttactaacttatctttattaaattatttgtacatgctaacttatttttatttgtttcttgtaaatatgtaatcagttaaaccaagcgaagatgttattaactcaatatgaaaaatacaagagaggattcaaatttgatcatgtatggcctattcttaaaggtattgagaaatttgctaatgataacatgaagacaccccctgcattccaaggagaaggtcgtgatgttacgtcatcttcatcattttcaatcaataccgagtcatcaccttcccctggtatgaattcaattgatctaaatatggatagtgaagatgccaattttagtttatcttcaaggcctatgggtttgaaaaaagcaaagcgaaaacaacaatctgaagaacagtttaaacaacttttggagcaaaatgataaacttatcaaagctattactaaaggtacttctgaaagaaatgaaattcaaaggcagaagatcgaggtagctagaatgaaagaagagaataaaatattatttgcagatttgaattctataagtgatccatcctctcgtgcatatgttgaaaatgagagaaaaagaattttggaaaaaagagcacaaacaaaccaacatgaagaagatggtgaaggctcccaatatcatggatctcaatatcgagcatctcattatcaagaaagtctatttcatggaaaacaagttcaaggagaaccggatcaaggtgaagacaaaagatcaccaaataaccaagaagattttacccaatattataattatcttagcggaaccggaaataattttccttaaccatttgtgaagcttttgttatgtttttaaaacatatcttgttgcatttagtttttatgtttgtgtggttttaattttttaattatgttataaatgtataatttattttattgtattttcaatcaacttcggtattagttttaatattttctactaatccatcattttattaaattaaagattacaaaaatagtacttataaattattttttagttacaacccttagttagattacttaaatctcattacaaatcatatataatctattataactaaataagctattttaatatataataatgttaacacaaaagaaaaaattattattttaatatttgccgtggctacagtagtgcatcaaatatagtgttacactgtacaaaaaaagagaatcacactattatagtgcaaattataccgtctgattggagtgaaaaagtaaacatgcccacgttattttaacgttttcccgtggcgttggacttggccttagatataaatgaactcatgccagaaaatattaagttacgtactgtcaatgattgaaagtgaaagttttgtttgatcaagaatcagggagcagtcatctatttagttttccttgactagcattgtaaagatcatttttcaagaatttgatgttctttctgattaaaaatcttataccactaggtttggaatattaacaagactacaagagtctaacatcccattatgaatcaaactttttttccaggtttattgtacactatagagaacttgttcagtaatcaatagtcttgtttaggtatgaaatatatgactttacccctaattcgtggagatttgttggtgaagatagcgactggttcataccacggaccacggttaaaagagcatgtcatgtctgtaaatggaaatacttactggcttgcttgcacgcaagacatagaaagtggggaattcttactttgtttggatttttcaatagagagatttacaagtgtgtctctcccgggtgatcatcctttttatcatcatcctatcactttatcagtgactagagaagatcaaaaatgttgtatgttagctactcgtggcatgcgagtaggcgatatagatgtatcatgtagggattgcaactaagattgacggtaccggagccgcgtcatggagaaagtttctacaagcctttttggtttgctagtgggataaatttttggtcgaccaggagaacaaagttttggtgtgtcgtggtaagcatggggtctccaacgtttttttacacgttgtgggagaagataaatgtatacaattggatcatgatgaggaagaatctcaatggtcacttcttaatcagttatgttccaacgttggttcaaatccaacaaggtctatagttcttgtagtgaggcaaaaagaaagtacaagagctaatagtagtaatctatgactgtctcattaagttatgcattttctatccaagtcttgatatttgagataaataattatatttaatcaataattatttattcattttttaaattttgtttatatatctaagatcgattcaaatagtattcacatttctacaattcttgaaactattggaacaacttagctttggttgtgtcgatgccatgaccactgactttagttgttaagtcatggttttaatatttgttgtaacaaaaagatttgattcctcaacaagtttttcttctgtgtaagataatatattacagaaacttttattattaaacatcaatggctccggaaccatgatgttgtgtgtatatctctaaggacttaagattacagaaggattcttgtgtactatctcacctgagtttccagcttcagtttcctcactagagtactgactattcagagacacttttgactgaatctggtaagtttcagagctaaaactagtgctgcattcggagttttcagtcaaagactgatcagaaacttgtactccagaaagtaagaatctttggtgagaattgcaagtgtgaatggcttcatcacaatcattgcacagcattgctctatcctctaagcagaagaagtacccttttctctcctgcatatacatatatatgagacatcggttaaagagctcagcgagtgtttaaagagaaaagagattggaacctggcagatatcacatagaggagctccagaagctgtggtggctgaggctgcatctttttgtaaggcgactcggtgatgtctttggaaaagtttattagcttcatgaaccttaatgtcacatggcttgcatagtacagcttcatctgaacaacaaagtacttctgcttcagccttttcacacacttcacattgtatcttcatccttcaactttataatccaaatcaatgtaaattgccaatacacagacagaacaaatgttctttgacatttatgagaattaggacaaggagtgaatctaaatataggaaacaagaaagaacaagcttaaataagttcacatgtgtggtgggatcataagttatatcaaaacctggctctgataccaagaggaattgatgatctttattcatgaaaagagagaactatatatagatatacaacgatatgtcgaagacgaaatttttatctcaatatggggttattagaccaactttgggtggcatttaaaccaataaatgttctcctaccaaaatctccatgacaagatctttttcagaagcttgtatagttttactttcttttgaaaacataaattgacaaacatagcgacaagcttctcttaagacacaagcatggcaagccaaaagtaaaggcaggaccacaatatgcataaagactgtggaattaaaagtaactagccatagggcaatagaggtcaaaaactctaaaatgttgtcagaaactgaaatggagcatggcatcattcaaactctctcccattcctttcccatgcagcagccaaaattctaagactcatcacaaacagaattggtcccaaatatcataatgggccaataaaaataggcctggatataaataactattaaggcccaatccaatccatagtttttacatgaagtctctggaacatgagagaagacccttaaaggcacaacaaacttatccaacgtgtagtaacataattagtacaagtcacagccaaaaaagctagaacaatctcaatatctctctctgcaaaactctaccaaaagaaagatatttcaagaaacttcttcattcttcatacaatgtgtattatatatacaccagagaattgagactaaccatcatagaaaacaaaataagaaagtgaagttaaaagcctaaaattttggtttcaaccttctacaataaatccaaatcactaaccatgatgaagcacttgctaagcatcttcttcataggagctttgttgcttggaaacatcaaaacaagtgaagggtctttgtcttctgcacttgaaactactccaggcagcttgctatccgatctctggctagaccggttccctgatccattcaagatcttggagagaatcccattaggactcgagagggacacaagcgtggctctgtctccagcaagagtagactggaaagaaacagcagaagggcatgagataatgctcgatatccccggtttgaagaaggatgaagtaaagatagaagtggaggagaacggagttttacgagtcagtggagagaggaaaagagaagaagagaagaaaggagatcaatggcatagagtggagagatcatatggaaaattctggagacagttcaagctacctgataatgtagatatggaatcagtcaaggccaagcttgagaatggtgtgctcactattaacctcacgaaactatctcctgaaaaagttaagggtccaagagttgttaacattgcagctgaagaagaccaaactgcaaaaatcagctcttctgaatccaaagaactctgatattgaagaaactatatattactttctgagtctgaagagagttattataaatccaagagttttgagtttcatattgtgtaagctaaatggagtgtcatgttttgtaacctatctaccaaaatctctgtaaccttctctatatgcaataaaatgttcatttctttatattatagagcctcttgattatttgttatagaacattagtcatgtaattaaaaatcaaggtatatgaattagtttggaatcaattttggcagaaacttgaaactagatttattcagataacagagaaaatactctgtgaaaaccaaggaaattgacaagagtgaagaaacagaaacagaacagaacaagattgaaactatttagacttagatttcatgagcttttgagcatcagctggagtgggaagtgcaggaatagctcctttctgagtagtacacactgctccacatgcatttgcaaaggcaagtgcttccttcagcttcccttcatcctgcaacattcacattactcaatcaccaaaactcaatttcatatgccttatctatgaactgaaaacgtctttggttatacgtacatcgagtatggagccatcttttcccaatgagacaagaaatgcaccaacaaatgaatcaccagctccagttgtgtcaactgctttcacagcgtatccaggcactctccctttgaatttctgcgcttttcgacagtcgaaaaactttgtttagataactccaaaacacacacaatcatgtcgaatttgatcccttacctttgtgtagtatctgcaacctttctctccatcagtaacaataagcagcttaagcttatcatgcataagagacaaaacaacatcatccttctccgcatctccacgcgttagaaacgttacctcatcatcgcttacctacacatcacgaaactcgaacactaagatcatcgaaaacacgagtccggttgttacaacaaaaacaaacataccttgataatatcagcctcattccaaatacttttgatgccttctatagcagcttcagtagaaggccaaagaggcaaccgaacgttcgggtcataagagagtaagactcccgcatctttagcggttttcatcgcagccatgtgagctgttctacatggctcagagatcaagctaatggaaccatagtggaaaatcttagctttcttgataagatccttgttgagttcagattctttcaagagcatgtccgcactagggttcctgtaaaacataaactctctctcaccatctttcttcaaagtcacaaaggccaacgcggttcttgcattggtatcaaagcaaacaccttcactgttcacaccgttcttcttcaatatgttaaccaacatgtgtccaaactcatcatcaccaaactataaaagacattacacaatcacatatcacttttcaccatcagttaatagattctaacataaattatacaaaccttgccgatgaaagctgatttgccaccgagtttggtgatggcacaagcaacattagcaggagcaccaccaggggctttgagaaaaccggtggactcagctaaagaaacaccagaagtgtcagggacaaagtcgataagcatttcaccaaaggaaactatcaatggagtattagccatctttactcagacaagaaatgttcacacacataaaccaaacaaaattaacctctctttattaagctggagaattagcaacagaactgcatgaaaaatgggataagcatttaacaaaatccctaacttgtagtaaaaactcagtacaaacttttgactgtaacaaacctccaatttagggtcctaattatatcaacagaaataaatctttgtcacacacaacgtaccaaattctctgtatttatattcaaagtttaagtctttcttacttagttgcagtaactgaaaaatccgatttgaacaaatcttatgaaaagagattaatcattagttcaagactcaagagtcactttacagagcaaattctatacatttttaacctttttaagggttttaaaccctaaaagagacattatcaaaactctatgattagggttttcaaatccctccattgtccattaactaggaccccaacagctcaagtacatgactgtcctcagcgattcttcagcttgcttggtcttgttggtataatcgattgatgaggaagagagcttcttagcttgcgacacggatcttaagttgttgcgtagatactgattcgcagatcggatcacgtagttccaacgacacacgcctagttggtctttcaatgcctcaacggctccgatgcttgcagcaaccatccacgttttgcttgcagagctcatttctctttgtttctttcttgtttaagtgatttggtttcgattttgtgtttgttgatgatgaatgagaagtgaatcaaagtgggttttgtttataaaagaagagaaagcagacaaaaagtgccgtgcctttggagtttgaaagtgcagacaaaaagtgggttttgtagctgctggttttcttggtttctgctgaaactatgaatgtttagttcaatgacgattttgcccatgtttagttcatcgacttgagctgctttttttttttttaaataataatatagatcctaatttttgtgtatactagaatgatctgtatattaaatctataaaaattttaaaaattaatgtactacttgaaacgaaatttattatttataaaatgactgattaaaggataaaataaaacaaatctctatattcttttttacaatctcttttttttagtaaaatgttaaattttatatcattttaaatttttgacagaagttataaagagaactgagaacggattaaagcaatttacagaaaagtaaaataatattactactctaattgtatacgattgctcaagagcgcataccagtaaatcgcaaagaaaaacaccaattccaaatctactaaactcggaaatttgtgtggttgtcacagaaccaacattctaaaattctcattctaattgttatgagcggaaatatgtttactaatttagcggaaatatttgatgatactagttttacttttgattttttgaatactcatgttaaatggtattcatcttctgtatgaaagaaagaaaaaaaaaaaaagtaagtcatcgcaaaaccatttttcttttgattgaatttttatttatttatttacattttgtgtttaatatattttttacttttttggtcggcaaatgatttttgatattatattattattcatctccaacatgcattattctacaaggagataaagaaaacatttactatatttcaaaacttggacacaacacgaaacccaaacaagtgaacaatctcaaaaccaggtgcacatgatagcggcactcgttaatccaggaactaccagaatcccaatattaccccttatccaattcgttcttaaaaggctaacaacgtcattttactatccagacagtagtaaacaaccaaaaccaacggccacagcttctagttttaactccaactacacggcaatattgttggcttcttctctcttacataaacacaccaattcacttcactttctaaacatcatcaacaaaaacaattctcaatacacaaaacacaaaacacaaagaagtttaattctctgaagaaagatgagttctacaagcaaagcatggacagtggcagtgagcatcggagccgtagaggcattaaaagaccaactaggtctttgtcggtggaactacatactccggtcggttaatcaacatctccggaacaacgttagatctgtttctcaagggaaaaggttctcttcgtcttctgtctccgcagccgttacctcctctggtgagagcgagaaggctaagaaggctgaagaatctcttagaacagtcatgtacttgagctgttggggtcctaattaaattgtatataatatatagttttcttacttctataatcagaatcctaatcaacattgcaattccatagatattattagttcaaagtagtaaccaagtacaacaaacaaacatcaatgtgactcaaattctctctacaaagtcactactcctctaagctatattgcttcttcacagcttcagttatctcccaaacaactttcatatctttagggaaaacaacaacatctcctttccctatctcaaaggtttcttcttcttcgtcgtatccgtctacattcactttcactttcccttccatgaaatatattgtctctgtcttcttaaactcccatggaaacttgcttggagcaccttcccacctactcaatgtacatcacaactcagtccataaatgcaatgtataacatttttctctggtttattcgtctaatttaagaatcaatcatttgtagagagactaacacaaaaattacatgattcagacacaagtgaacttgtctgtttcagagtctcagacacaagtatatgtaaacagattcttgcagcaggaaatgtcctgagctaacagtggtgagattctgtaaaattgatgatacaaatcctcaggttggatcaacactaacaagtaaagccattgaggaaaaccctaagccctagttctgtatctgcgccattaaagcaaagaagcagagagatatgagaaagttactgacttgggccaagaggcaacgcctaattgagcaagtttggtatctgaagcttgacgcaagatcttgacaccatgaatttcagtaggaatctcagaatcggaagagacagatacgattgcttctttagggtttagcttcgtggtgatgaaagaaacgcaaacgcagactgttacgagaagcagagataacgttaaaaaatgattacccatttggattttcacaactttgagtttcgaattgatgaaaacgaagccaaagatttcagctttttctatagagacggtctcttcgagttctttgaagttggtaactttaccaaatctgagagctgcaaagaagtttttttttactgttttgagaaaaaaaactgcaattggtgcaaatcttaaattagcgcaactaattagcagattaacctaaaaattatttttggggcggtaactgaatttttttttagaatttaatcaccactaaggatttaacccgtaatacatcacggaacaaatattttatttatatataatgatactattaaattttatagttttagtttaatattaaaattatataattttatattaatgttataactaaaacattgatgatgataaaataataaaataaatatttaacatgtgttatatatatcaatctaaatccgttctgctatatttcatatcaatgtaaacccgttccgctatattttttgtctcatgatattttaactttttataagtttaaatattagttgtgattgtgattctggacttttaattccatggaatattcaaaccaagataagaaagtttttaggtgcatatataattgagaatattacgtgattagacacttttttgaaagtttatccgtaattaggcacttaaaaatcattaggcactttgaataattaaaattacttgttcaccctcgtatcgtcggttttctataaccaaacaaatcaaatccattttcactaaaccaattcagatttatggagcccacgattttgtagttgcctttgtgatttaaattttttttccagaatcgtaaaaatccaaatccaataaaaaatcctaaattacaatttctcgaaaaggggactccggcgacgggatatccatctcctccgtcactgtccaccaccactgcttttcacactacactctcgtttgctctttcaaccgtaaaacaccaaacccaattctcttgtcatttcctctaaatctctgcaatttcttaaatcgatttggatttactttgcctgaaaaactcttaactcgtactgtccaaactcaatttcaatttcaattgaggttacttcgagaaaagttcaagaatttcggaacaactaaggtaaagttttgtcatgttgacttcggagatcttgttcgtaattctgtgataatgtttgataacttctctgcccagtttgtttgaaattcagtacttgaggttctctattggacagaagatgaacatatggactacaacacttggacaatccgtaatggacaaccacacattttgtttgcagcgtatgtgtcgttacaaaattgaaaatcattgtccacgaccatacatgactgcacagcttggtgtttgataattcaaggaaaaagccatataaaggttctatttcttaatcttacattttggaagaaatcaaatcattgatttaagaaataatatgtaagcttggatgctagagctttaggtgatcctatggccagattaggatattgatttaactttgttcttactgctactcaacattgattgtctggtattaagttgtaaaagagtaatttgacttatccatttgtgttgatataattggtcattataatgtgattagtcaatagaaaaccttagagtacataatatcaaacttttaactttgttaatttctttaggcgagtgggtgaatacatcagttagacttgcttttgcacatcatgtgatcatcgttattgatgtcatccaaagaaatctgtccattcatacgcaaacatgaaggtactgttgtttggacactccttactttaaaaccccaccttagtttgcaagtcattacttgactaatttactttaaaaacaaaatttaggttaggaacattgtgtcagatcctattttcgatacaagtgggaacatccaagtcaacaaacctacaatggggtaccaaattttattaatcgtctactccttgttacgttggacatgattttttggatactttcttacattttttccttattgaaggtcgtgtttcttatggtttttctgaccatcttcatttctacttcaactcaatcagaacattttggagaggcttcctgcatcccaatcattgaaagatccccaaactgaaaaaaaattctaatgagcaaatgaaggtctacatgtacactaaattatctttatgatttacagtccttgtaatattggacagtattttttggatagatatttaaataatcttcttattggaggcatcgctttttgttggtgatctagtatttgatatcagttccaaacttgaccaacatactcaatcatctcccacacataatcccaaagttgggttatctccaatggaagtatttcttatcatctacaactgtctatcgatgcactctatctatcatttgtaaatatgtcttagtaaagtataataatttcacaacatcattattatatctttcagtataaaatctctctctatcaagatatggatctacacgatgttgtggataatcaggtaggcataaaattaaataactagaacatgtatatttattattactgaaaagcagtcaatttttactacaacattcttagttctattattaattgtttacagaaaacataagattgctatcaaagtcttgttagttatgttgtgaaaccaatctctgaagacctaacataacgcaagttagttatgtttgcagacaaatccatcttctcgtccgtttaattgttatatgatcggacggtcattatttctcattaacttctatttaaactgcaaatcttaccacgttcatttgatccgaattaacccattattctacacgtgtttggtacacacaattacaaaccaaaaccaatgaccggttattcttcttttcgtgattcagtttatttggggtataatggtctattttcactccaaaaacaaagaaaagtgtctcaaccttggaaagtgcctgttttgtctaaactttttcccaaagtgccttattacggaacattccctatataattaggtttgctcattttacgagattgtaaatgtattttggtttgtttcacaatgtttgttttaatttaatgccgaaatttaatacaaataagtcaaaaatttcaaattttggttgttttagatttagtcaatattgtaggtgagataaggaaaaaataatttattgtgtttcgcgtgacatatgagattgccatatattttgaatctttttggtttgttacacaattaatttcgtaaaaaaattaaaccattaattaaaaaagaattaaataattaaaattcagtattaaccattgtaaataagtcttaactccaggatttatttcacaaaatgcctgcaaaaatgtatatgtagatgatgtacaaaattaatacatgttctactctttataattaaaaaaattcccacacataattactttacaattaccttttaattaaaaaatgttaaaaatatgatgattaaaaaaaattggttaatataaaataacttcgtaaaaaaattggttaatatataataacttcactaaacgaaattatcaaataaaatatttttttgttagcaaacaattatcaaataaaatttaagtggtatttatggaataatatttttatattagtaaaaataaaaagcttggaaaaaagtaagtaagtaataactgggcatttttcataaaggccattaatatgtttcttttaaatgttgtggccgatgtttctaatatgtttttgcctcataatggtgttttgtgaaacaaattaaaggattctaaaatgaagacaattacaggtttgaaccaaatcccaaggtaaagacatatattagatcaagatttaaaacaaacttatataggtctagctgccttatgaagtaaaaagatttaaatccattaatttatgctttttaaggtaactcagattcttcaatctcagactctctataataacgtttcttcacatcttcaattacatcgacaaaaacattcatgtcttgaggaaacacaaccaaatcccctgccacaaattctaaggcttctccttctttgtgatggtcttctactttcactttcaatttcccctcgacgaagtacattgtttctgtcttcttaaatttccatggaaatttgcgaggcatgctttcccatctgcttaagtttgatctcacagttagttagtcaaccatacatgtacatatgactcatgacttcaaatgcaacttattttaaggttgatcagtgtttcagtttcttttcctaaactaatgttcgagcacataggcttaacacctgccatatagcaaaaatatatatatttcttcgtttattttctttttggaaagactaacacaatagcatatatttaaggtatcaatcttggtggtttcatttgatcaatatgaaaaggcagtcgctagaaacatttcaacaaaagtttcgatgtgatgtagtacaatttacgagtaatctttcaaaatttgctagttaatgatcgggaatttatctttctcagaaactttcaaagatttttgatgatccattcattgaaaatctatataaaaacatttatgacggacttatacgtaaatctctaaaaattccgtcaaaaatcaaaaatatttcttgttgtaggacctaactaaatgaatatcagtatatagattattgggacaagaagtcaagatgttgttggaaagttctcatcgtcaattttatcattgttttaccttcatggatttaatgttgttccaatattatagatgcaaatcaacacacacgtacataactatgtttctgttattgaattaatacataattattaaaacaataatttacttatgatctcttcttcttcttacgtgaatgaacgtaagctgatagagacttgcgatatcgcaatctcctaagacataattatgcccctactttgatgtaagtagattctatgggtgtttatcttacaatatacaactatcaatctctgtattaacaccttacaaaatcctaacaaatctactttgagtttctgataaattaattttggagaagaaatagatttttctatcgtatcttcctctttgttgtgatgtcttttcacaaccaatcgtacatgtgtattttccttaatcgacacatctctttgtttttatgtaaatattcatatgtttatgtatacaatataataaactccaacaataccccacattttcttattcaaactcaatatttaaatgataagaatactgattctcaggttatgtcgaaattttggtttaaatctcatggttaacaaaaacaaatgaaaatcctaaagtaatagaaaatgatgtaacttgcgaaattagatcaacattaacataccatgactcttgacctccattccataggaatactaaggcaattagtgtcccatgataattttatgtatttttaatcgttaagggataaaaatactatttaaaactctaatttctatatattttatgccattgaaatgaaatttatataaataaaaaaaagaaatcaaaagtataggaaagaagaccgacaattgccaagaggtaaccccgagttcagcaagcttagcatccgaagtttgtctcatgaccttgactccatgaatttcagtgggaacctcaggagcgaatatcgaatcatgattaagttccatagttgaaactcaaactaaatgatgaacaaagaagagatgaatatgtgttgtttcataaaagatgtgtccatatttaaaaccatcgcgtaacaacgatagtagggtaacattgccgtaaatgaaataaggttgtacgtcctgataataacacattgaactacatgacaacagagagaaagttgtggttgctataattctagtactcgtaaatagtgccgtcccatgtttttagtgtggctagtactgatttttttagggacaccgaagatattaatacaatcgaaatatttgtaatgtcactatagaaaaaggacgaaattaattgagactctcccgacacatgaaaaatctcatgaatataattttgatgttgtcgttatcagtttttgattgtgttaaatatgtaaagtagatagatgataaaattcacaagattgttatacgagtcctatatttcatgcaggtcgcaaggacatgatgaattttatagaataagtagatgttatccattataaattacttgagaaatactcttagtcaaaccaatcaaaataccacaacatgtcatatcatactatatttaaaataaataaaaattaaaataataaaacacaacaaattcaggaaacaaaatctctataaaccaaaccgacatgtaattcaatttaattgtaaaaatctaaattcttatcatttttataaacccaaactgacatataattttgtttaattataaaatttaaaccctaaaccttgttgttataaactcaaatcgatatacaattttttttgaattgtaaaatttgaaccctaaatcttaagagctggtgaatagtagagattcaccgctaggagtgaatccaataattattttttataaaaatattatcctctcgtattattaacaaaaatgtcacggtgaaatgtcgttcacaaagcgattatcaacccaattttactaggatatttacagattttgtcattagtcttatatttacaattacacataaataaataaacagaatttcaattaaaaagcaattaatctttcaaaaagtttaaaatatattacatgtttcttaacacatataaatctcatatattaatcaataatataagaatttttgtaacaaagactacaatgcatttacttaatcataaaaattgaaatatgaaaaaagaagaaaagaaaacaaagaagagagttttgagtttttcttcggaaatgaattaaaatctctcaagttttttctttgaaaatggataaaatctctcaaaaactggattctctaattttgtatttagaaaaaccaaatttgtaaaatcctgaatggctatagtatagatttttggaaaaactgaatctacttacaaactaatattgaaggctttagttttcctagaaatgttttttaagaaaaactttttgttcccatttaagttttttagttttttaattatcatttctacgagaatccattttttgctctacattagtattttcttaaaatcattcatggttttaggcttgtccctgcccaacatgaaaactatttttttttgtgaaaatctaataagcttctctctaaaaaatatttgttgtttaaaaatcaaagtttttctaagtgtcgatcaaatgcaaaaaatcctcttaaagaaagagaaaatcctctgaatcaagtgtgaaaagtcatcttaatctaatgaagaatgtgagtttttttttttattattttgaaaagagtcaaaataactcataaattgagttctaattgtttttgtttgtagaaatcacaatcaaattgaggagagtttgtctaagaatccatgtgatatgcgactaagaaaatgctccaattctccctcatgatttcaatgtttcacgattaatctgagtcccgtctcaaacattttgacaaccttaggcaaaacaaaaaataggcattttatttagaccatgccaataaaatacacaaaactaaattgtggttttatatttataaatttgttggtattttatcttaaacatttttttgatattgaccctttttataactttttctgatttttttcaaatcttacagcaaaaaaaaataattataggtctttttaattttggaccttacacaaatgtttatgctgtcatggatcatagacggcctaattgattctcatgttttgagaactttctccaatcccatgagaatggctactctagataaattacagttgaacttgtagtatcagatgaaaaacatttcattccgtacatagtatggataaactacctagtatattagtatacatgatgaatttgataaacatctttttaagaggtcttcttaaaaaaatacagtaattttaactttgtaattagataatagagtagttttaaatttttgttagtttttgtgtagtctcttatgaatagtttttgtgaaagtgaagaaaaaaaagacgaaattgcttttatctctaatatttatatatataacttcatggataagattcacaagtgaaagtttcaaataaaatagccaaagatgtgtgcaacttcgtaattacataaaaatgtggagcatttccgaataagtccaaatatgtggagcaattcataaaatacccgaagatgtggagcactttcgtcaataacaaaagatgtgagggcaatttcataattagacagaaattatctaactaagccgtaactaataactcaagagatgaggcatgaatggatcatatgctatacgattatattggacagaaaatgaaaaatttaaaatggagttttctattgcattttgtaagctgagaacaactaagttaaagggaaagcaaaaatgggctgcatcggtgttgtgaatgtaacaagcataaatccatatctcacaagaagatcaaacaaaccctacaattcaagaagaccatcatccatggctgctgcgattagagctgagtctactgagaaattagggattacaattgaaaagaatcctcctgagtccaaactaacccaactcggtgttcgtagttggcccaagtaatctacttgcccttcttcttcttcatttgttagttgctgaatatgaaagttctagcctttgtttttcttttcctgagaagaaagtctctagctttgtttgttgttgttgttgttgttgatgaatctggtctttatgataatcccaaatgtagaagcttgatagctgtagtatcgtagtgaattgcttttaatggcataagtcatctccaagagatctagtttctgttactattggttaattggacaatctttgcggcaagtgatctatctggaattgaaagtttgcacctttattgttgcccggagaagaaagtctttagctttgtttgttaaagccattagtgatctccaactgatctattatctcttattatgtgtaaattcaacaatatttacgtcagttgatccacctccaattgaaagtttcaacctttttcgttgcccggagaagaaagtctttagcttgttgttgttgttgttgtgttgtggaattcaatctccatgatcatggcatatgttgaagccagagagctgcaggttctcattatcgatttccatggcataagttatttgcagttgctgcattttttcatattttgtgggtcaaatgatggtacaagtggggtttgtcctccaagcaagtttcatggcattagtaactttcaattgctaaaactcatatttgtgtggttaaattagacaaatctttacatcaattgaccgaaagttttcacctttattctttgctcaaagaagctttgtttgttgttgctactgtataagtcatctgcaattgctctagtttctgtttttgtttaagtgtattcaacaatcaacaatcttttagcttctttcttttgtcatatgtagaagctagatagctcaagtttctcagtgttgattttcttttggcatttgctataaagcagttgatgaagatttttcttactttgtatgtgaaattgatggttacaggtggggttgtcctccaagcaagtttccatggacttacagtgcaaaggagacttgttatttactacaaggaaaagtgaaagtgtaccctaatggatccgatgaaggcgtagagatcgaagcaggcgactttgttgttttccctaaaggaatgagttgcacttgggatgtctctgttgctgttgataaacattaccaattcgagtgaatggctgctatcaatctctgctctacgtattcgtgtattcgataggacttgaccatctttgtatgttgatggatacttactttaagcttgtgtgaagttttttactttagtggaaatagaggagtcatatatggacgcattatctcattcaacaccaaagtcattcgaagttcgatacaataacatgtatagtgtttactgtcgaaaagtaaataattgataatagaagtgatattcacgtaatactccataaatagatgttgcatagtttggtgggtattgatgaatgaagagaacaggaagtggttgaagaatgtagcatccgatttgtgatggaccactaatctccaaagttagtgggataagacagataacaaattagaaatcagaaaacacaagtacgcatttatctttaagctcatagtattaattagagacacgtccactatatgatgttgccctgccctaaattattttatatattatcatgtacgagaagacgcctaaaatgaaataaaaaaataggcgaattgatcttattattgcaattgtggatgaaaataatttaagtaatttttaaccactttttaggtttcttataactaaagaaatcgctcaacaaactactacgtactaatcgactaagcttcattcttgtgcagcctattcctagctactcaatcacgttgtctagtaactaaccaggctaatttgcaatgttcataggtatttgagtaaagaactcagttaaaaagtttcatcaagcaatactacaacaaaaacacatcaagtccgcatacacgttccacaattcacgccatctttgacctatcatttaggtcattgtgttaattacatcattatccatggccaacaattcataacaccaaaaccatcacaaacttatttcaaatctatcatgcaactagggtttcaaaattgtaaaatttcgcaggtgaccttactagtaataggtccggctgacatatatatatatatatatatatatatatataaagacattaaaagagaggtcacttaagttaaaatggaactatcgacgagtaagtgacctttcgtcttttttatttttccattagtgtataatgtaacttttacttcattagtgttacttttcctcgatacttggtggctctgaataatattatctcttagaagatctccgaagttgtcgtataaaaattcatttacaaacctaggtggagataacattttaaaagaatggattctttagtgctaaacgcatttaagaaagatgaacatattttgttcgtcctctattggcaacatctttatcaagactcgaatttaattctctttaaaaagagatttaaatatgttaatgatttaaaagtggccatctagcaagtgattgatacatcacgatttaaatattattatcaagcaataatatttcatctagcaagtgattgatactcagttaaaaagtttcatcaagcaataatacaacaaaaacacatcaagtccgcatacacgttccacaattcacgccatctttgacctatcatttaggtcattgtgttaattacattattatccatggccaacaattcatagcaccaaaaccatcacaaacttatttcaaatctatcatgcaactagggtttcaaaattgtaaaatttcgcaggtgaccttactagtaataggtccggctgacacatatatatatatatatatataaaaacactaaaagagaggtcacttaagttaaaatggtactatcgacgagtaagtgacctttcgtcttttttatttttccattagtgtataatataacttttacttcattagtgttacttttcctcgatacttaatggctctgaataatattatctcttagaagatctccgaagttgttgtataaaaattcatttacaaacttaggtggagataacattttaaaagaatggattctttagtgctaaacgcatttaagaaagatgaacatattttgttcgtcctctattggcaacatctttatcaagactcgaatttaattctctttaaaaagagatttaaatatgttaatgatttaaaagtggccatctagcaagtgattgatacatcacgatttaaatattattataatatcacttcctagattgtgtccctttcctagtccctatcatacaatagttatcctcgtgcacataacactcttaaaaatacacaccatcttgtaattcaaatttgatgtgttcgtacatattttcaaccatttgtttctatttcaaattcttctcgtaaaaatatgtccatttaaccagaagtggatagctcgaccggaaacatactaatttttttttaaatatcacatcgagtgactgcgggtataagtaaaaatattaaagactaatccgaacataaaaaattattagagcatccgcattgcacatttagtttaaatgtatttccacataaatttaattcataaaataagaaaatggtctttaaatgaaagatatccttccaaaaatgtgtcaaagaagacattttgaaacacattgaaaaatgggtcttccatttaaaaagactattcatactttattaataatatttatatgagaatacacacaaaaaatatatgcgatgtgggtggtcttatgggcttttgcccgaaatctaagtatggtaactaaaaataagggcataaaaacatccacattggtgtacactcttaaaaaagtagttagtataatttattataaaagctaatattattgggtaatattagaaaataatcatagaattgaaaagaatgaagtaagtaatcattgtcagtttgtatgtgagtaaataaccttatgacgacataagaaaatacaaaaatgttctcgcaagttgaaccaaaagcaagagtatgagaatagcatgatatttaaaaaaaaagtgacattttataatgtgttatgagaaaaaatagcatgttgacagagaaagatttccacttatcacgtgtaattcaaaaaagtagcatggtacaaaagaaaataacatacaatttaaaatgaaaatataacgacaaaaattccaataaaaaatcaaagtcgaacaaaataaatagcacgatatttatcaaaaagtgacattttataatgtgctatgagaactaataatttgttatatgaaaaaatagcatgttgtttgaaagagatttttaattataacgtgtaattcacaaaagtagcatggtaaaaaagaaaataacatacaatttaaaaagaaaatataacgacggagattccaagaaagaatcaaaatcaaacaaaataaaatgagaaatcttctgcaaattgagggagagatgatccgtcaatataaataacgtttagcagcctagatttatcgaaaaagagatctggtggttgtgatggtggaagatgtggtggttgtggtggtggaagaaagagagatgagtggtggtttgttcgggttcatcaaaagtttttcgccatgaaatcatctaagtgttctatgtgattttggaaaatagcgtgtaatacatataaaattcgacaatgggtaaaaaggtaattgcaagtgaaaaaaaagagtgtactctgacaccatagctactttgttaattcttttaagattcatagttattttgtgcatattctcaatattattttaattttgaggtattcattaaccatgtaaaatgtctttaaagatataaaaatgtctttgcgaaaacagcgaagacacgtgtctttcccgttgaatgcactaaataacttgttttttttttttaatgttttttaaaaacaaatttgaaaacactaacttttttgtgtgatgaaaatggtctaaagaacatcctcattaaacaacttttaaaagatgtctttagtattaattagtaataaaatttaaaacactccttcttttttgtgtctaaaatgtctttttaaagacaaaaactaaaactaaaaaacactcaccattttttattgattatttttattagttttatatttaaaaacactaatatggatgttcttagaatatggtcatctatatttctcaaatagtttaatgtgggtgctcttagagtatggtcatttatattttctcaaatagttttattttgtcaacgtttggtgtatcaactattttgcaaatagcagatactttcagtgaaattccttatcatcgaggtcatacctcctttggcatacattgtaaagtctctaacataagccaacaacttgcaagctctaatgattcacaagttgataacaccattttgcaagctctaataatgattcattaaacaaattggcaattttcaaataccaacaccaccctttttcttgttaaaattactattgtttattttattttatttaatgttaaattatatttaaaagaaaaataaccttggtacatatgaaatgctaactttttcaagagttattttaaaaaaacagaatttctaatatatctattgtcttgattcaaaccaaatttggatgccatttttgaacttcaatcctccaccaccttgaattgtgctcaaacggtttctaatattcttgtctatgatcatcacaagtatttccgttggtgatgattgctccccatgcctcctcctattctgttcattccatattgagtgtatagagttctgtagtgcataccgaagtatgtagctcttcgttttgtccacaaggttttcagataaaatcttcataacctctgtccaactcaccgagaatctgtccgagaaaattccccttgttaggtcttcccatatctttttgagtataggcagtggaaaaataagtgttccctcgtctctactcgttcattgcaaaaaatgcagctcgaatctacattacaattccacttcctcattctctcccctgttgcgactctgttttttacaaccgtattgttatactttggagtagcgtatgggaaccatatctcattttgtccctccatcggcggctttgctaaccgcagctgtgaccaagaacatttatttttcccttttaacagaactatatcgtgatcgttcagttctccattcagcttctgttttcttatttcttcttcaacacggtttaagataccctttcgatggtttctccttcgtgtcatggacatcacctctttcattgtgcttgaactaggaatccctagatcaatgcatcctctctaagacatcccatgttactccatgtgtcaataccaaaaagacgtagtttcgccgcttttaaccactaccatgactgttgatctctttaaataattaaaaagtggtgttccccatgaagaccgttcacttccatcaatttatggtcttcttggaccaatttcgtttatccaaactattacccctacaacatcgtttataaattgtctttacattttgatctagaatttgatctattttgcacgaatcctcttccaccttttcaggcatgtacgagcaatataacatgagtttgatcaaattttgcatggtctctacgaagttgagtcatgcaatttttacctataatttttgttctcggcatttttatagctctctacttaggatataagtaacatggagttggatgaatccttttctttatattgaaatcgaatcttcaatgctaaaaataaaatccactcaatcagtgagagaattattatggaacaagctataaagacgaaagaatcactcaatcatacaataaagaaggatgtttttttcatttaaactaagaaagagaacttttccacgtgaattaaaatagacatctcaataataaagacgattttttttcttctctttttcctctcactttgtattgtattgtatttctatatatttcttcctcttacaaatacccttttaaattggaaagaaaaaacaggaatcgctatcatcagtaatagtcatcattaatcaatttatatgtaatatgtggctgacaatttccatgtacgtgtaatatgtaatatataaacacaacttatggccagtataatattaatgcttaaaccgactcgagaactaaaatggacagagtggtggcaaaaatagcaaaaatccgttcgcagcttactaaattacgttcactattcttcctttacttcatctacttcttgttcttctcctttttagggtttttggcactcaagatcacaaagccaagaaccacttcacgtcctcatgactttgaccttttcttcacttctgtctctgccatcaccgtctcttccatgtctaccgtcgacatggaagtcttctccaacacccaacttatcttcctcactatcctcatgttcctcggtggcgaaatcttcacctcctttctcaacctctacgtctcctatttcaccaagttcgtcttccctcataacaagattagacatattttgggatcttataattcggacagttccatcgaggatcgctgtgacgttgagactgttactgattatcgcgagggtcttatcaagatcgatgaaagggcatctaagtgcttgtactcggtggttcttagttaccatcttgttactaacctagttggctctgtgttgcttcttgtgtacgtaaattttgttaaaacggcgagagatgttcttagttccaaagaaatctcacctctcactttctccgtcttcacaactgtttccacgtttgcaaactgcggatttgtccccacgaatgagaacatgatcatctttcgcaagaactctggtctcatctggctcctaatccctcaagtactgatgggaaacactttgttcccttgcttcttggttttgctcatatggggactttataagatcacaaagcgtgacgagtatggttacattctcaagaaccacaataagatgggatactctcatctactctcggttcgtctatgtgttcttcttggagtgacggtgctagggtttctgataatacagcttcttttcttctgcgcctttgaatggacctctgagtctctagaaggaatgagttcgtacgagaagttggttggatcgttgtttcaagtggtgaattcgcgacacaccggagaaactatagtagacctctctacactttccccagctatcttggtactctttattcttatgatgtaagtttctttcaatcctctcctcatatatcgaatcatttgcatgaactcgaaatatttagatcgaaaggtgcacttatttcgacataattttcacatatgaggtgatatgcatgcacacataggtgcagttttacgaatacattaaactaaaacaattgagatatagtgaaattaaatggttgacatttcactacagaaacaataaaaagtcaccgcatgaattaaagttggttgacatttcacaacagaaacaccaaacatattattatctcacgtaatgtagtttggaaaattatcaaatcatttacctaatttttttttttatgaagcaaacattttcctaactattattgtttattccataccaaaaaaaaaaacgtttatgatttatttaaggatttttttaattactacgtaaaggccaatcatgcatgagtggggtggtagaaccatagatttgcattagttttagtgctattcttttggctgaatccaccaattaatcagcttagcaattgaaagcatattttattaaccaaaattaattttaacatatctaacgtggtccatttggttaaagtattcactcccatggattgaggaagtaagatttaagttataaccatgcttggcaattatacatttaatgaatagtttgaataccaagctaatttataatttttggagattaattagtatttatttcggtaaatcattcttgtaacaaaaaaaatactaataatataaaaaattgagattgtgaagtttattttttcaccacaaacacaaatttcatagaatttttcaaggtttccacaaattagtttacgctcttaaaataacaaacaaaacaaaaagtagtatgcttgtcaaactttccacaaaaacattaacgccggaaaacttaaaacaaatagtcataatacatctttattaaataaataaaaagaaggcataatacatatataagttgataaaactctccatcacttaagagtaattttttgatgttttcacttagaagaatttatatatatctatattaaccattaattaaggaacctacaagagaatgtggtagctagacaagatttgatagagtgaatcagaatatatgtccatggttttagattcagtaaaaaaaaaatgtcccttcaatgtagtggagactggagaatgtcccttcatcatattcacaaagcattattctctgtttttccataaaaacttctttggactaattaaaaagtaaaatataattgcgtttccaaggtatcttcctccatacactttatttatgccgttgacggaacaaaagacgatagagaaagaaggaggagatgatgattccgaaaatggaaagaaagttaaaaagagtggactcatcgtgtcacaactttcctttttgacgatatgtatctttctcatttcaatcaccgaaaggcaaaatctacaacgtgatccgataaatttcaacgtccttaacatcactctcgaagttatcaggtatgtttctatatctcaagattctttaaccaaaaccaaataaaaaaattgtttcagcaatatataaatctctatattacatatcatgcatccataataactaaaaatttcaaaatattttcaaacaaaatacgtcatctaggtgatacattattctacaatttgacaacccaagtattcgtaattcacctaacaaaaaaagaggacgtgaataaaatcgtataagaaacatatatacagtaaaatctctataaattaataatgttgggactgcaaaattttattaatttagagagattttttacttatcgataaattaataaattaatagagagatcttcataatttaataactttgaaaaaatttctcattatagaaaatatctttctaaaatcaattacaagtaaaaaataatatcatgtatagaaaacaacaccaatatgttttgatatagtaaaatattagaactaaatttcaaataagaatatatacaaatttaagcaaaaaaatatcagaaatatatttttaagaaatttcttacatataatgtatatatatagttgatatatttgtgcaattattaatttctgatattgatggaccatatatttacataggactttcaaaaaaattattatctaattaatttatcgatttatgtcattttttatactactcccaactcgggaccggaagaatttattaatttatagaggttattaatttatcgagtataaatttataaaataaaaagaaacatatatatatatataatatatatatatatatataattcactcattatgaattgattgtgaattagaagttaagaattatcaacaaaataagttttgtaatggcagtgcatatggaaacgttggtttcactaccgggtacagctgtgaacggcgtgtggacatcagcgatggtggctgcaaagacgcgagttatgggtttgcaggacgatggagtccaatgggaaaattcgtactaataatagtaatgttttatggtaggtttaagcagttcacagccaaatctggccgcgcatggattctttacccctcgtcttcctaacatatttcgatcatatataaatgttatattaaaattagtcacttttagcattccttttctgtgagtgatgtacaataagtttgtatgtagtttgcatcatcgttaatcctcgttaatattatgataatgtatgaagatataatataaggagtattgtgtgtcatcttgtgtttcctgttgtaacttgtaattcgaaaaattaaactttatctgtttgatatgtatcgtacaaatagtaaccaatcagtaatatatatacaggaaagttacttaaaaacaaaaaccaaaaaaaacataatggaattgaataaagaaatatatgtgattgctaatatgggaggaggcaaaacacatctccactctcagtttgacacacatgtcttcttttatacatgttcagatccagatatcatgtttcgatgatgaaactgcaaatctccttccatatgtttcatccacaactctctctcttttttttaggtaaaggaaccttgtatttcaagtgcaggatcctaaaactagaagcttgtgccacggatcctctttcatttcgaagaatccgtgcattgttcattacttttgtgtcgtgaataaaaagaattggctgatggccgagtcaagtaaatgatcatgaacatatatataccacaaacgtatcatgatcatcacatgtttatcgtttttagttaagatcttatagataagaaaaataagttagaaaatattacggaaatatatatgtgatgatgatgaacgtatgaccttgattctgatcgattaatattgaaactacacatgttagtaagaccctgattctcaaaaccgatctagcataaatccgcaaaaaaaaaaaaaaatgctaaccaaaatctaaaatataggtctaattaagtttattactttatgttttttaatcttaatatcatatctatttttttaattgctttattttcaaatttgatttgcttataaacaatttcgaaatgtatgaaaacataattataaaaatgaagttaaatggcgtaaattaagtgcacgtaactttggtgaagggtggtaaaggaagcatgatttgacaatgggtctcttccatgaacgaatatgatcagattttttttttgtcacttgactaacacatctctgatctctctagacatagtttctaagatttaatgttaccttcaatgcttttaacgaaaatctggatcctttaaaggtaggatatcaaatgggttgtccatgcccaaatgagcaatgtctaaattagacgaaacctaaaaagaaccataatagattggacagtccatgaatccaaataatacatgatatcatgaacacatttattcaaaactccatacttaagtcttaagtgtttcacacaatgatataatttcaatacttcataagtttaatattaaaaatataagtacaatacttcataagtgtaatattaaaaactatgggctgcccatgtcgcttgtccaaaagctgaccataattaaatggacataggcatcaggaatcccatggttttaagacccaaatgacaaccgaaacattaatcaaattttgttaaggtaatttcagattttaacaagattcttgccttctctgtactaaaatcaatgttcaactttggtcactggactcaatcacatatctgtccaaccataaattttgagatgaataaaagtttagtattgtacaaatagaacgagtaaaagagagtctcaacactgagatttaactttttgcaacaatctaaataagtagtttataggtaagatatggaagaagaaaaataagggaaataaatcccaagttaccacaataaatcaaacaaaaccggagggacggctcatgcgttcctcttgctcaataagtcatcgccgacactcaaatggagatgttcgccaagaaccacagtcgcaacaggcacattttcaatgcagcttacagttatctgccatacaagatacattaaaatgataaagtaaacgatttgggttaacaaaagcttaactaacgaaccttcccatctccggcttggaactctgacttcaaattcgaatgatcccttgataacaagtatgtttgaagcccggttgcagatttcacatctcctggaaccataaatatacacgttaaacagaaagcgagagagaattgacagtgagaatctattgtgatgagatggtgactcacctgagtataaagcaagaacagcctcttcattgaacttcaaagccggtctagccaaacttatcttatacgacaactttggaacctttttgacactctcatcggatgtttcttttggggtgaatgtctcatcggctattatgacctgttacataaaagataggaggataaacattaagcttctgccgtgcaaataaataagcagatatgggagtgttgatgacttactgcatgtgatggcattaaactagacaaaagtaaagtggagccaattgaatccttgatgttttgttcctgttcaacaaacaacagtgatgagacagaattaaggcatgtggttgaagacattcatgttggaaacataaattttcgtttgatccatagctgaacaaataattacgtacaagcaatgaaacattcgtaaatttcaagtagaatttaagttcagatgaattgagtaacaaacaaaaactagttacctgagagactagaacttgtttagaaacagattcatcctcgtccaatgattggaagtacacttccacaaagtctgttggttccagacctgactttttccttagtttctggatcctgtttacaatctttaacacagggaaactaagctcataagcacaacatcgctttatatgcaaataaaatattaagatactgaagaagaaccccacagaagatatacaagttataagaaaatgtattgctttggtttcatctaggactagtacactattagagaagttatatatctttacctcacgggcaaaacctgcttcaaccaaagaatcatctgctcgtagatccagaatcaccaaaacatcacctgcatcatgaaagaaagcaagtattatatgtgtatcctaccaacagagaagtgataattaattacgcttcttaccatctccagctgaatcaatctcattctctttcaaatcgtctgggcgtttgaaaaccctaacaatctgaacaacacatgaaagatatgtgtcagaatttagctattaacaacatactcttaacgctatctcacaggaaaacatcatagcatgagagaccttgatatctgtttcctttagcaagtggttagcaatagtaacttccccagcctcctcaaatgctaagatatctttttgagacatttctttaacttcctttgcaacaagccccatcgactttccaagtcgctttcccaatacactgcaggaatgaacatgtaaaatttcactctacatccctttggaaaggctaaagcacattgagctcagcggtttaaagaaaaacacagacagaaaacttaaccaacctgaaatctggttctgcttttagtgatgcatacttcagagtatcattgcatggtacaagcgatctcacgttaagttcttccaagacatactgcaatgcaaaattaaacaggataaatccacatagctatcattggctgatatcaaatggttctcaataatctcaaaaagtttcatatttataatattagttaaaacttcaagaagataaactactgttcctgtaacaccacagacctctcttagtactccagttatgtcatttaagaaatcagcatcgggatggactacaatcatttccctgatacaacaaggataagcatgtgtgaattttttttcatgttttaggttaacaaagcagaaactgaaaacgatcaagtaccaacactcactttagaggagttttcaagggtagtttgttacgctcacgaatgttccgagcaagatcaatgattttcatcatcctcgtaacacttaactcaatcctctccccttcctattcaaacacagaaagaaaatataagcaggcaaaattcagattacttttattctcttattggatatagagacgtggacttgagtcttaccattccttcccttggtggaatactgcagtagtgaacactttcctcagaacctttacacgctttccgcagattctggtacaaagtttcagtgaagaaaggtgtaaacggggccatcactttgcaagaagtaaggagcacctgaaaatagacaataattagatataacaagtgttcaaatcatggtgaccacaaacaatatatctctgcaactatttttagtatacattgaatagagtcgaaagagcagtgtgacaatcatcttcccccgtacggccttttaatctcttgcggttgaatctgacatatatgttagtgagattgtcgaggaacttcaagagacgaggaaccacctaaacaagaaaaacaaaaaccaagatgtaataaataccaggagacagtgatggcggttttctaatgcgaacaccatatcatgctgaaaataacatgtaaaaaccttacagtgtaaagccgataggcatccatctcctcgcggacaaaacgaacaagactctgcgtagctgagtgaatccactgatcaagaatgtttgctgactgtatagttgccagatcagtaggaacaaagggcacaccaccttcagtctcaagtctctttgcattctgaacgaggaaccgatatgcattgtaccatggaaggaatacatctttgacctagtgaatcccaatgcaggaccagaaaaaaattcagacaacaaccacgaataaacagcaataaagcagcaataaattcaaccaccaaaatcactcacaacaccgagtactccttcttttttgaagcgtagtggctcagcacgtacaaccggagaatttatcaggtacaatcgcacagcatcctatcaaggttcatgtaaagtcactaagttattacgtacacacactgccaagattttcttagctagagaacatttgaaaaagctcaaaacgcagcacaagagcatattatagggaaaacttacagccccatactcatctatgacttccaaaggtggtggataattccgtaatttcttagccatctttttcccatcctcagcaagtacaagaccattgcaaatcagatttttaaacgctggtttttcaaataatgcagtagacaacaccataagagtataaaacctgtagatacccagcgacaagtttagtaactatttattttctacttaggaaaaaaatattgtttattatgcccgtttcaaaacacttctagaatcacatttcatagtaaattgatcacaccttcctttagcatcgactcataacttaattaagtgcaatcattgaggtaactaagatccagatatcataaagtagagggacggaacaaacccagagataagcaagaaataatttgtcagaagagcttataggatatatcaatgtagaaatccactcttgaaaaaatatgagaactgaaatgatatgggttttttgcaactatcttgggttgacatgataaacactaactaagatttgcaatactacaaggtaaaaggtttatttccattctcaaagaccttaataaaaagcaaccttttttcatcacgtaaccaccaaaatatcaatccaataattttaaatgctaaagcttaactaatatttctccccacagtcaagatatggaatgacataccatccacgagtctgatcaagaccttcagccacaaaatcaccaggaaagttcttctcaaataactccttgttttcaaacggataatggatatacgcgtaaggcattgacccactctcaaaccaacaatcaaaaacctgtaaaagcgtatataaacttaagcttgggataagaccccggataagtgataaatgaaagaaattggttcatcttacatcttctacacgacggagcacaccaaactcatcgccacgactagatggaattgtaatatgatcaatatggtgacgatgcaggtcaaagacctgtaccataaatcatcagagaaacaaatgagtattagactttttgacaactacattctccagtactaaataaagaccaaaccctcatagagtgtcataaagttgacagaacatataaggaagacttctagaaaaatttatccaacagttgagtagtagcaaatggttgcatataaaggtaccgagatcatgacagtagactttcccaaagcatcagtgagctatttgctgatataaagagagatgtaaataaaacaaaagaagagaccttaacaccagagagcttttcaagcttctctacggaatccatgatcacaacttcctccccatcatcacttatccatatcggaagaggcgtgccccaaaatctacttcggctgattgcccaatcccttgcattttcgagccaattgtgaaaacgtttatcctgaattgcacattaatcaaaaaaatgtattcatatcagaaacttaacaaaacgaactagtaatatatactcagagtactgatcctttcttctaccgaccttcacataaccaggtacccattctgtctgttcattgctttttaacaacttttctttcaactgctccacacgcacaaacctaacaggtcaaaacacaaaaaaaaactttaaagtcataaccacacctgaaaaacgacagaataaagttcataagttatgaccataactacgtgccatttaggtcagatgctacatatgaaatctaaaataaataaatgaaaacatgggaaatcaaaatatcctaaacagtttggtgattattctgcaaaaaaaatacacaaagatacctaatacagctccgaaaaggggctgccagatataatcataagagccaaagttcaaggcaaggacaagagagaccgtctcactggaactagcactaaatgatccaactactaagaccttagctcaaactcatatgaaaatgaagcataccaacttggaactgctctatatatgagtggggtgtctgatcgccagcaaaatgggtatgagtgagtaaagcttcccgttttaacaagcctgcccttggcctgaaataataaaaataatattacttcatgaaacaaatcacctacagtaaagaaatccaatggtccaaaaagcacttagattctctaagaaacagataaatcattatgatctgaactgactaattatcaagcatcggtaatcaccttaacggcttcaattatatccttgtctgcatctttgacataacggccactgaagtgggtaattctctcagtaaacaacccatcatcatcaacagcaacaactagattctccccctgcaacatatatagaacatttaacacaatgagataaagcaagattattagagtaaactgagaatgggttcttgaagatactgtaagcctaaacaagagagaaacaacaaatgagcaaagttcatgcctgatgttagcaagggtgataaggaagatgtagtcaaacctaacctttttgattattttgttcaaaagacaaacacgataatcatcttcaccaaaggcaggagcacagtggacaataccagtaccactgtcatcagtgacataatcatctgctactactcgaaaggcctcacttgagaaatcactaaagtaatcaaacaaaggttcatacttcttcccaaccagggaagctccattaaatttctccaaaacttcataagaatcagctgcactctcaggtttagcacctttagctttaggatttgctttcttagtatcaccagcaggtccattacttaacttggccttaggcttatcagtgggaagagcagacaaccgagattcagcaacaatgtacacttttccagtgttcttgttacgaaccttcacatagacaaacttcgcatttacacacaaagcaagattgcttggaagagtccacggagtagtagtccatgccacaaaagcagcattatcttgatccccaataaccggaaaagtcaccatgatttcaggatcagggacttcctgtacatacacacattctaccaatatcagagatcaaactatacaacacaaatcaatcacctgaagaacacaataacaacaacattaccttatagttctgaccagcttcaaaattagataaaggtgtcttacaaccagtactgtacggcataacctgcaaaccagaattgacccaaatacaaaaatcacgatccacgaaacttcaaaaccacatcaatgcaggaagaagaatgccaaacaaaccttgaatcctctgtaaacaagattcttctcccaaagctgagaaaaaacccaccaaacactttccataaaaggcaaatccatagtcttataatcattcttaaaatcaatccaacgaccacacctagtaataaccttctcccactcagcaacataacgagtcacaatactcctacactcttcattatacttatcaattcccatcttaataacttcatctctcctcttaatattcaatttccgatcaatctcattctcaacaggtaagccatgacaatcccacccaaaccgacgagtgacatggtgaccagtcatggtctgataccgagtcacaatatctttaatcgtaccagcgaggatatgtccgtagtgaggaagtccggtggcaaaaggaggtccgtcgtagaagatgtactcaggaagattctcagtgcgtttgagctgtgtcttgaaagcatcgatttcagtccagaaggagaggacatcttcttcttgacgagggaatgagaattcttttccttcgcatacttcttccatggtggaaacggaagaatcaatcactgacgaaaattagggtttctgcagagtttttgttcggcgcagatgatatcaaagtccccggcgttgaagatgaagttttggtgcgtttttgtttattaatgggccgtagtaagcccattaacttgtttgttttctttttgggtcaaacttccacttattggtattaaaaaatcgatttaaggaagaaggaaaatattttgactattatgaaactgtcaaatggtggttgatatactgaaccagatgaattagatgaataatgatgaaaatattagatgaataaactgttaaatgatgatcaataagatagtagtttaatattgattaatatacatactttaatataataagaaatgtactaaaatctaaaatccaaggccaaatacaaaacaaattgacgcttttctaaaataaaaactgatttatttttcctaattatgagacattgataatttttatttattaatttttggacattttttgtcaattatggaactttttactaattataaggtatttttgttaattatggggcatttttgttaattttggggtagttttgctaatttcgaggcttaaacaaaacaaaaatatctgcaaatgggtcgcaaaaatttaagacccaatacaaatgtttcataataattggtgaaagttggacctaagtttatatgaaatcatgtggtctagaacttatactagaatatatttcaacattagtccacaacatcaatctgaatataagggtgagtttcaaacttttctttaggcatatattatgttcacatcagataaaaattacattgagtggctcgtgaatacactcaacagagttttttttaacattaaaacatgcatagaattttttcaaataattttctcgtacaaaatatgcaacaaataatgataaacatatttttaaatgcaaaatagttttatataaaatgaaaagaattattacttgcgatagaatctataagccttaatcttttatcattgtgcttataattttgtccaatcaaatttctcaacctttattggtttattatagactcattgcgatcgagtaatttttacttattctagtttttcttataaataaatcattaattattgctatgtgatatattttctttcaaaatattttatgaatcaataattttagtggttaaaaaactatgtgaaagtgaaaataaaaacacatgtagttggctttatgcattcatataatcattttatacgtggtgggaatgagaatacttcaacaagaaaatatgattgtgagtaaacacatttttagtggtaaagtagacgatagatttgtaaatagatgtaaattagatgatgatttgactagtaatttccatgtataatatttttcgaataaggaaaaaacgaatatataaataaacaattctcaaaataaaatattatatatttattttctacttacaataagattttaatatatctttttgttaaatttattttagttttaaaaattaaacatgcatattggatggagtttaatctagttgaatctaaaatttaatagttttacgaaagatttgttattaattttagttttgaaattgagaataaaactaatgaggcatcaatccattaaatatatgtaagaacaaatcttcatatattatataatatgtttggcaaatatatataaagtaactgaaaacaaagtgaaaatttgagaataattgtgggttttttagttttatgtattaaaaaaaatgttgttaatgaaaatccatattattatgatataaaacaaattcattatgaatataaacataacagatatcttctataaaattcattatgatataaaacaaaagattaaaataaaataaacataacaaatatcgcttgtgaaatgagatctatatgactattgggctgaagttgggccttgagaaataagagtgcgccttataatataggcccatttaaagtatgtattggcgaatccacgccgaaagagagagcgaaagggacgatgagcaacagaagaagaaccggagacgatgacaaaggattgctctggaaacttccccaagttaggatcagagacattggaaaagttggtccagcttttggactcggtgtcggttgcggatttggtttcggcgccggtcttatcggaggtaaatttctaatttctcccaattttgatcgcagactcgcgaatcgctcgaagctatttatagatagttttggtttaagagagtagagattggtttgatgaaaacaggtgtaggattcggaccaggagttcctggattacaatttggtcttggatttggagctggttgtggaattggtgtaggttttggctatggtgttggaagaggagctgcttatgatcactctcgttcttattacaacgttggaaaaccatctctgtgagtatttgtctgcaattagatttttagtgattaaggatttgaagaagaagatgatgattttgactttggtgatttgttgacaggaatgaagttgattcactgattgatgaacttgttgttagcacgaagaagcttgtgaaagctactacaaatgaaatcgacaagtggttaaaatgatgaacttttaggatttgttgcagcttccaagtaaatggtagtgtttggtttgttcttagatcaataatgtagatttggggctagtgataatctcctttctttttgtacaattttacgtatggtataaagatggattcgcataatttaggtggctgatttatcattctggtaatgtgtatggtttgagtgctgatttttggtgctatgagttgttctttatggctcaacttggatcaatatggaggttgagtttgagattttctctcagtttaaggaggtagaatagtgcgtatagtggcacagtgagctcagctctagggccaaagggcataaattcattatagctctttcgattctaccgtagtactgtgtgtgaaccggcactgtgaaccaagatgattaaattttcgtattctctatgtacatgatcctgcggctcaatcgcttcagtttcgatccacatgatgtatatgttatagaattgtgggaaactccttgtagaaagagtatgttcacgtctaggactagtcggatgattcgtttctctttttggtgtaatgagtatgttcataactgttgatacaatgtgaaaatctaaccgttgagcttgggagttttacgtctatatgaaaattccggttgtcgtctacattacggtagtaaacaggaccacagtgattccaaatgtcccaaggaatttactgaaaaccccaactaggactgtgaaaggcttgtggatgacatttaacagttgagattttcatgtgtttgagattcttgtaacacattttgctgtataggtgaaagcttagccacacaaaaggagaaacagaggatatggataaaataaattatccaacaaaaaccaatctaaaagccacatcagcatccacaaccaatcagaggacagaatcatatttcacattttcaatccagaccaatcaaaatcctgaacgaatcctactctccaccttataggagcagtttcgtctcttcctccttctttcacttagctcttcctagtgttaaaccagagtaaagcttgaaactttggactaaaagaatggcgtctttgggtgtgtcggaaatgcttggtactccccttaacttcagggcagtttcaagatcgtctgctccgttggcatcaagcccatccacgttcaagactgttgctctcttctctaagaaaaagccagctcctgctaagtccaaggctgtctctgagactagcgatgagctcgccaagtggtatggtatgtgtcttctaaatcccttttataatcatttcttgctctgtttctttgtgaatgtgtttgtaattgtgactcttatgcaggtcctgacaggagaattttcttgcctgatggtcttttggatagatcagagatcccagagtacttaaacggtgaagttgctggagagtaagacactttttcatgtctctctttgtatgtatgcctacttttggattctgtgcttaaggtttattggtctgaatctgaatttgcagttatggttatgacccatttggtcttggaaagaagcctgagaactttgctaagtaagtagattcttttatcctaaaccttttgtgtttgctttgagctatatctatcgaatttgtcattaagattggttctttaatgaatgtggttgtagataccaagcttttgaattgatccatgcgagatgggctatgttaggagcagctggtttcatcattcctgaagctttaaacaaatatggcgctaactgtggccctgaagctgtctggtttaaggttcttgcctacgtctaatctttatttacattcagacttagattctttagcaaagcaagaatgtgttgatgtgatgagatggttctttttggaatactgattgcagactggtgctttgcttcttgatggaaacacattgaactactttggcaagaacatccctatcaaccttgttctcgccgtagttgctgaggttgttctcctcggtggagccgagtactacagaatcaccaacggattggtacattactctctagtctctacatttagctattactcatgggaaaatgactaaacttgaaatgcaaatatttggtaggatttcgaggacaagctacacccaggaggtccatttgatcctctaggccttgctaaggaccctgagcaaggagctcttctcaaagtcaaagagatcaagaacgggagattagccatgtttgcgatgctcggtttctttatccaagcgtatgttaccggagaaggtcctgttgagaaccttgcaaagcatctcagtgatccttttggaaacaacttgcttaccgtcatcgctggaactgccgagagagctcccactctctaagccatttctactttttttaagagcttccaaaatgtacactttgttcgattggaactccttttgacaatgttaaaaaaacttccatctgaatcttcttgatatatttcaaattttcaatggtgctttatcatgcttctaaggatatacatagtcacccattggtttaatatttgttgttaccaagaacgctctgtcacaatttagtcatacattgcgattttatcactagtggcgagtatggtaaaaagtttcacaactaatattgtgatggaatttgggactatataagttagtcgagagatgtgatccgttgaacaatattaagtagcagaagatcaaatagcaatgagcagtagcagaatattttcacaactaattaatcattcttacattgtaaagaactagtattactcactctcaacaattgcatgtctcatacagtaataccgatgtgtcataaaaatgtgaattttgcttcgattgcaaaacacaaattagtgttttcactctgtgagctttgaagttgcagaaatcacaaccccaattggattctaaactctagctaggcatgtacatttgcttcgattcaaaataagaatgttttcactgtcagatcaaaggttcaataagtgataaccattttaagcaaatcaagcatttatattgcttgatattttgtcacatctaaccaacatttaacaattacatttacttttaacaagtaggtcgtctctacttccgaccaccgtcgggattagaactcgtcctctggtgtagtcgtcagattccatgatctatgtttttgtaaggcctcagcccgaggcccattaaaggggttttgattattaatattagtattatttaaaaaaaaaaaaaattaaatctaaatctgaactcatctttataaacccaaaccctcgtttaatttgtaaaactaacacatcaagtgttggaactcgcggtcctacatcaagagtatggaagctgacgtgacgaaactagagacatgatatgtaacatgtaaaagacgacgtgggagctaattttgcgtagagtttgaagatacgagttattgtagagattcactaaatattctctacaacaacttaaggaaaatataacattgatgtgcaaggtttatccattcgtggagatttacgattttcttaggattagggttttcatgttgtgtacatatagtctagagaggccatgagtcgtcgctaacactctagactattactatagcagtgagatttgtaaacttcaaagctaaagtagacacctagatttacagacataacttcatcctcatttagtagaactgcaacttaattgctctacaaatttccggttcgcaatattcggggaattaaagattttttttaccaatataagcacttgacataaacctcggagtagagaataattaaccttccaatcgatcagtttcatacacatggcaatttaagtcactcttatgcatccaattctctatagttcttgcaaaaccaaacgacaaaattttgtggaatatgcaaaatccaaagcaaaataaggcatgaaaacaacgatcaaaattgaaaattgaagtgttttaaagaatgatcgtgctcaagttcttcactttgcaaactcattaacatttacggatatatatctctagaaacaaaaaatacaaagaattataaatctataattcgaaacgacaaagagtaatataataaaggcaatatatagttacatgtaggacacaaacggcgtggaagcgatgacttgtggccaatgagcatgagatatggacaaaaacggaggtggtcagagagattaaaacagagaaagtgttagggaattgacatggccctagaagattttagggtttgactatatataagtgaaggtgaaatttacaaaacctaagaagtgaaagtgtagatacagattctagaacagcttgttgttcgattaggagctgcagcaggcatcaagagtctgtaagctgcgtggatgcaaaatctgacgtgacaaactatagaggatgatatgacatgtcaaggacacatgagctgacttggcgtagtgtttgaagatgcgagttgtattagagattcactaaatattatctacgacaaacttaaggaaaatataacattaatgagcaaggttaatacatttgtggaaatttacgattttcttacgattagggttttcgtgtggtgtgtaatatagtctagagaggccatgagccctcgtttaacactctagtctctagattattgtggatttataattttcatagctaaaataataaggcttagaaggtgagtgtttgattatctctattagtgtttcacgattgggtgaataggatcaaactagagttaggattagacgtgttcttaatcgggtttaatctattgcgtagaacaagttaagttccaaaataagtagatccttataaagatcatcttcttataatgaacaagctaaatactttccaagtcaaaactttgttgtgtattgtaggttacatggaaactcggtccgaggtccgtttccagtttccgaaatgtttcgaaaacggaaactcttcggaaacacgaaaattgtcacagaaacgcgtttcctagaaatctatgtttggaaacacgatggaaacgtgagtttccaaagcagaaactcacatttctgaaatagacatacgacaaattgtttttattgactttgaaaatttaataactaaaattggaaatattcagattattaatacatataactaattttataaaattctgatttttaagatctttctcttgataaaccagatttgaagagagctttatattatcattgatgaaacttataaaaatgagaatgagaatgttggtctaaatatttgaaaccttttaatcttgatcttttagaattttagttaacttatttaatattgataatttggacttgtattgtttaaaccattttttctttaatatagttttatgttactgttatatatatatatatatatatgaatgtgtgtatacgtttccaaaacgtttataatccttaattttaagaaaaaatcgtttctcatttccgaaatgtttcgcttccgcgtttccgtttccgtttccatgcaacatagattgttctctatatcctatcagaaagtacgtgaaagtgaaatgaaagtgaaaacaaatcacaatgttagaaggatgaggataaacatagagggaaagaaataacctaaatttattcatcaagttgtcaaaacaatccattcaaacatttttaaattctgaaatggtattgacaaagagtaaatagtatgtggggatttttagattttgtcagatttgcttaccctaaatatacttaatatgaggcattgaatgtgtaaatttacatatttagattctcacatccttatcccttatctttggttttttgtatataagaccacaaatgcataactttttttcacacaacataaaaacttataacaaatgtaagaaagaaaaaataagtgacaagtaacaaacatgagaaaggtgaaacttgctgggatcgggaatcgaaagatccgaaagccagtctttagaggattctgaacgggctagtgaaagtaaacttgtgatgtgaccatattgtgcaatatgaatgtaagttggtggtgtggtcatctcacaaggtggctaagtcatctcacttattttcttaacgaaagcatcagcccgtttagcatcatcttcttgaagcttgcctttcgcatcttttgattcccaatccaagcaaggttcacctttttttttgccatgacctttacaaaatatccaaattttgtacaattgaatatttgttaacgttaaaatcaactgttagttattttctaatcttaaaatttggttagtttatccgagttttatataattttatcatgttttgatgtaatgatacgtttgtttttcatttgcgttgagtttaaattttcctcgtctatttgattattttgtttgtttgttttttctaactagaattctcagtaggtatataatgaccactaaaagagcaaaaagggaatgaacaaagtaaaacaaattgaggaatggaagaggaaaatatttgaggaatgataattaaaattgtagaaaaaataaaatatatctttatgatgagtggtaagtggtaaccaaacgatgaatattatttctattagtttttgagacttttgtgtaattattaataagttttgatgtagtgttacacttgcaactttgcaagttatcctgttttatttgggtttcttacaagaattctcagaaatttatttactatcaatattatttttaaacgattcaaatgatttaacatgagagtctcatcaaagttatattaaattagaattttattttaaatatataaaattatcatatagacaaaataaatattattttaaatatcattagaattttagaaaattaaaattttagattttggttttaactaatttttgaaaataatatttttgctccattgtttctcatttgataaggaactagattataacccgcagtacaccgcggaaacaatttgttttttaaaattagtatatataaaagtctgcaaattatatttatctataaaatatttacattttatagtttacaattgttattaagtaacatctttccaaacccgtttcgccaaacccgtcccgttaaaaaactccgcggtacaccgctaatttaaataaatattttacgggattgcaattatattttagtttgtcaaacaattttttgttttaaatagttgtcgaaatctagttcaaatattggagaaataagatttagtgaactgattgaaaatatatttaggtgcgttttgctcattttaagggattgcaattgtattttggtttgtcaaatttttttgttttaaatagtttccgaaatctagtttaaattttggagaaatttgcgtgatatatgggattagaatatatttggaatattttttgtttgttaatcaatttattgccaaaagaaaaccaataattaaaagccagtgacaggcattgtaaataagttcgaactccaggatttatttcacaaaatatctgcaaaaatgtatatatagatataaacggatggtgtagaaaaaaatatattctgaaatggttaaaaaatttgaagaataaagcgaaacaatacatttctcctcattttttctttcttcctaaaacatggttatcggttaaaacctaagacgttaaaagatatttaaatatagtagatagtagatgaactaatatggttaatagaatatctagtacataagatatttaaaatcttaaaatgtttaatagaatatctagtagctattgtgtataagatgtttttgccattgtcactaaatatgattgtcacaatgttttgtgacattttcgagacgaaattgtatttgcgatgataatgttatgaagaaacaaaatttaacctatatatgtgtcacaaatataatcgttatgactcatgataagcttaagttcttgtagcagtttatttgcattgcattgcaaaacaaaaaccaaaaagcgatatatgagtagaatcaagttatgcactaatcaaccttgttattattcattccaacagtagatataatatttgggtttttgtgaagcaatttgcttccaactaaattaataaaacatgtaatcaagaacacacacacacaaaccaacacttatattgtcgtagactcataagaaagacatataaacatctatttagaataaccccagaaatccatctcactacgcaatgttagctggttcgtcgcgggaactggctgaaccacagaggacgaattgttgttaccatcctcatacgtaatccctctagaggaatcttcatttcccatgtgacaagtcacaagtctatccatcattgcccattcacctagaccttgttgatgattatgactagccactgtctcacatgtaccaacgtctaaacccggctcacacgcttgctggtattgtaacccttcactagccgcactctcactgtcccttgcaagtcctgaagagtagtcaaatccaagtgaaggtggcttgtggaagattggtgggtattgatgaagagcaaggtcaggcttgttaagttcgaatgtcatggctccgtggttacgtactagctggtatggactgtctcggtgcataaagctacgagcttgaagtgcatggttgttgttagatgcgtcatggttgtgttggtccaatgagttaatgcttgagctaccttcatttactaccttgaacaaatttttcttcataaacactctacataccacccatccatcttcctacatgatcgtataaaatatgttgcaaatggattaaatataatagaccacatttctaaccaataaattgaatttattgcagcataatatacagtgcagtcacaaactattttaaggctttgtccaaaaattctaaattggaaaactgttataaataaaaaattatatattactaatcgattttttttttatattcatatttaaaaaataaattagaaaacatatagtatggaaaccagagattttatgcaattctaatgatgatactgatctatattataatttaaatattgatcaaataaaagacatacactagggttggcttgaggatcatcagcgtcttcaagacggtactcatgcatgatccaatcagtcttttggccatgaggagctctacctttgtagaacacaagtgtcttcctcattcctatctttttgtaagagttccttatgcacttgtcacgtcccgtcgccttccagaaccctgcatgagtagcacggttggtccttgaccccgtcggatatttcctgtccttgtggctgaagaagtaccattcgttttgtggtgttgatcctatcttgcatctctcttccaaaaaataaaaagataacatacaaattagagaattgtataacaatgaacttttcatgcatatatatctatatatatatatatatatatatatatatatatatatatatatccaataatcaagaagtggagaagagctattaagatctcaaaaatgattaataacaagcaatgaattgtgatatgcttaagtaaaagagtaccttgcaaatcccaaggctcaagcttgtttaagtcaacctctctgatgacttccatctcaaacttttggtaagagattttcttcttcaagtagtaatggagaagctcttcgtccgtcggatgaaaccggaaaccaggtggcactcctccgttcgacgaagaacccatttcgatttacgttttccttctcttgtctccaactaaagacagcttaaaacatttaaccactgcctttctttctaagcagctacaagttcttgattatatatttatatacacactcacacgtaaattgtcaacggatcgttaattaaatgtgtacataaatgtacgatgatgatgcatgttgataatgatgatgatgcatggtgaagttgacggccggtgaccacgccgccggagatgctcaaaaagctatcgtaaaaagcaagactcgccggagattaatacgacttttattttaatataatgtctctacgcgcctaatgttgcatcgtgtggtacacttacgtaaaatcgactgctccatgtgtctctacgccatgttgacttatacatacatttatgaacgatcccgagacaaagtttaaacactaaattataatggtattaattttttgattgctccgtaagcaagggtttgtttttggagaaggaaattgttagagaaaaaaagacccatatatggatatggggatcttcaacacggtccatgtttatgtatacaccaagttagcaattaagatgacaataaacagagagatgtgaaattaaatagaagagtcattatatgaatatgccatgcattggccaatggctatggttagggcttttttccgcccatgtggctatctatgcctccgattctttctgatttatttcgtttctgtaacttttaagcttcctatctgtttttgttaacttgattcattaattcaagcaagcaataaatacatacatattttatacatgggtaagaaattgtatatcaaatcggttttcaaacaaaacaaatcttagttatattataagaagagtacatttggaacattgtcaatcatttatttacttcaattacgtgtagaaagtgtttaattgcatttagaaatggtagttttggaattaaagtaattgaaatcaaaatcaattataatttaatttagaatttttttaaaattttgctttaattattttagaggtacttcgaagattttttttttttttttctaaactccccactcctcttatcaatgaaattgggtttagatttttttttttttttttatgtactatgtattaattcagatgtcttaaaaatatgatcaaacctttacatcattatcatggagccttttgaatcttcttagaacttcagctttaacactttccatgcatcttttgaagtcttggaatcggaaatgtgcgctagtactgaaaatttctccagaaacaaaacactgaacaacagttgaagagcaatttcatctttcatttctagttttccccactccaacaatattttctttgcatcatgtgcatgtatgactaacttgtgactcggtgatacctccttcaatcactactttgtgcaactccttacacttaagcagccttcatctttatgatccacatactataattttcccatcacacaccacatttctacttagcttcatgtatgatcttatgtttacctgtttgatttctttgtgtttgttattattgctcgatcactcgactcactttctgcctttgatttcttttcagtattgtaggtcaccgagaacaattagctttgataccaatgaaggattttgttcaccctcttagcttaaccttttttttcttaattttaccttgattcgttacattcatatttatactacttttacctttaaacctacttattcctcgattattgtacttaggattacatattaaactaaacaaaagattcccaattagacaattgggccttcaataacacaacatgactggccttttttttcctcttccttatctaattaatattggaaattttcaaatttttaatagtaatttttttttctaaaccggaaaccgtggttaaaattatataaattgtgctatcatcattttttcttagtatgagaaaaataaaataaaataaaatttgtatctattttgaacaaaacttgggttcaagggtgaacccttttattcacctccttttgcattaaccaataaaaacatgttatgtcaaatcctacttaaattacataataaattaaagctataattataaatccaaaccgatatataatctcgtttaattacaaaatctaaaccctaattcttctttgtaaacccaaacctcatttaaactcatttaatcgtaaaaaactaaaccctaatcgtattttctaaatccaagccgatatttaacctcgtttaattgtaaaatctaaatctgtttataaatctaaaccaatatttaatccgtttaattataaaatctaaaccgtaattgtactttataaacctaaaccgatatttaacctcatttaatcataaaatctaaaccctaaccttttataataaactcaaaccgatacctaatttcgttttagtggcaaattagattttataattaaattacatattattatttttattattatgtatcagattttaattgactaaaataaaggaggtgaatataagggttcacccctaaaaatgaacccaagtattttttatttatttttagtgaataccattcttactaataatcgtgatattgagcacatattgtcatatactaacttagtatatgcaagcatgcaatatatttcgtttatatagtttaactattcatttttaaacttagaatatatgatcatcatatattggatattatgttatatgtcatgtagttggctatcttcttcccttatgattatgcatccaaagataattttgaggtaaatgtcgtaaaccttttttttattttattagaaagtacttttttctaaaattcagtaggaaactaatgttatacttaagttaagaaaaatatttaaatatgattttatagagtttgagatattaatatatcggcgagcatataaatttaatatgtataaattctttttaattaaaggtagaatttgttcatatataattattttctcataaatgagaataacaaccaaaacgaacaatattaaaaccatcaacaaccaaaacgtgacactaaatcaacaaacttcagcttagttgtataaattgtttgtttaacttcaatttcattggttgacgaattttatacacaaatgtaacaagttgatttcatcaaacaaacatctacatctactcactctacctcacataattcataaacctacctacacacgcaaaacttcttcaaaggcaacaataaaaatttagagaatcttttgaatcagttggtcagtcaacatcaaacactatttccatttgtacattttcttacttttagaatggtcaatttttttttctcttaataaatagcacttatacatttatgtcccaaaaaaaaaaaaaaatctactttttatttatgtccaattcaaccaaaccaagtccttttagccacgtctgtatttaaccaaaacaatctacagtacttatttttggtacacaataaatgcttcttttcaaaaatcaacctttttttttaatttccatataagaaaacagagagagataataaaaaaaagcttgaaactttgacaaattaacaatctgagattgtaattgagcgggaccagtagtatcgaacgacccagaaaagagatttgattcctttcctcatctttgttcctcaggtttactcctttgaccccaattctaggttttcgaatttgggtaacgaaaaagttttcatctttccgattctttgtgactcatatataagtttctgattctgggttttgttctctgtttccaattagctctgtttgacccatttatcatatcaaaggaagaaactttaaaatgacaaccgattctgatgatggtttcgtttcttcaagacaactccttttgcttgcttcgatttgttctggtgctctcatgtgcaaaatcgtaagtctctttgacccttttttgtatctttgatgttgcaagattcttgattttgtgttttggttttgtttttgaaggtttatgacttgactcgtttcataagtccattgctcttcagtgtttatggaaaacttgacagcaaagttagaatggaatggaacaataggtttagtagactccttattccctgattagagttttttttattttcttttgtggattgtgttttgagatgttttgtttgatgtttcttccacaggggattctcaacttttcatgctgtgtttacttctgtggcttcaatttacttcttggtgatatctgatcaatttgatgagaatgttcatggtgattcagtcattaatagtacaacgaggttatcggaatctgtaatgggggttagttttcgaacaattgcttagttacattcattaatgagaatgagatcatctcttatgtttattagtctttttgcagatctccttaggctattttctagcagacttagcaatgatcttttggtattttcctactcttggtggtattgaatatgtaagtaggcatcatataatagtactttccatattcagtatgttgataaagagtttggcattaaatggttgatggattggtataagctaattgtgttttcttttgttacctacttaaggtttttcatcacttcttatcgatgtttgccatcattctttctgtcacaagtgggcaaagtcagttctacatcttcttagttctcttatcagaggctacaaccccgtttgttaatctacggtggtaagctttttcggattaagaaagtcccttcacaaatttctgttgttgctgctagtcttaacatcaaatggattaatggcaggtacttggataatagtggtcaaaaaggctcaaaggcttacacgctcaacggaattgctttgttcttggggtggctggtactgttaaatagaccaaaacaaatctccatgttctagcatttgatagaaataaactgaatgtctctgcttcttttacaggttgcgagggtccttttgtttatcttcttctttgttcacatgtacctccatttccatcaggtaagttcaatactgagcttgttgagtaaaacaaaccagagaggaagaagttacatttttaggaccatgaatctaacaagctggttttcccatatgcaggtgaagcaagtgtttccactgggattttacagccttcttacgataccaccggctctagcagtgatgaatctcctttggttctggaaaatcaccaaaggattgatcaaaacactctccaaggcgaaaacatcggggatgaagaaacagtgatggttaccctgaaaaagatttttcaactgcattcactttgatgtgtccatgaaaaattgattgatattcatgttgtggttgtcttggatgcccttttgggttttatgaacaaagagtgtgcaagctaatggggattgtatattcaaacttttcagctgtttcttaggtattcagtttgtatagttagaaccagaatcattgtttcacgccactaaaactttcatgatgttactgttaccagtcgcagaatgttttaggccggtttagttcacttttctttttcctaacaatgttttacaatttagggatcaaccctaacatatataagattactcactgatcatgtataaaccatacacaaaacagagaaataaaagtccaaggaaggaattaaatgtataggaaaataatcttatgataaaacaatattctccacaaacagttattttgaattatgggtgtcaaaatagttaacccaactcaaaatcatttggtttaacatttggtgggcgagtaacgccagttgaacccacccatttattttatggcttgagatttatatagccaaacccaaaattgtaaaactgacttaatgggttagccatatataaattaaattttttttttaaactaaaacatagcatataattataaaatcaacaatagtattcaagttataaagaaaataaaaagatataagtattaaaatagaaaaaaaaatcctaataaaatcctaaaatcataaacccaaaaaccataaaacaaaaaaaaaatcacttttagttaaagaacagttaaatcttatttagatgcatccgattgttccctctacttcttattgggcttgtgaaattatcttcattggcatatttgatccatagtccacaccttaaggttcttggaccgaatcttcgacataacaaaaattgttcaatcaatgttttgaatagaaactcttacacaaacaacatattttattactaaaaacagtctcgtctccgaggtaatacaacgactctaatacaacagcaaagcaacaaagaaacccaaaaccacacataaaagtgtattacaaagacacaatttgacaaggacaagacaagaccctatgcacacacatagtagagcgtggacttcgccttttttccttcacacaagcttctaaagcttttcatatcattacataatcacacaaacagtatacaaagcaaacgacttgtaaacaagtaatctctctttgatcaaaaaaaaaaaaaaaaaaaaacaagtactctctcactcacttaacgacaaaagctcctaacctgacgaggagggtcggtctcgctatcgttaagcttcacacaagtgtagacggctgtacggagtgtaggagccaccagataaaacccagagtgatagattcctgatgcaacggctggtcctagaccttacttccttcaacttatttttttatctttgctactccttaaccccatagaaacgaatagagaagtcgttggtaggatcgcatggccgaatcttcaacacaatcccaagaacaaaatattgtgttatgccctttaaaaaaaattggaaatggacaacgacaaagacatcgagtgcaaattggtcgggtgggagaactgttcagaagaatctgaacatctgtgattgattccttgctttgaccttcagatgcatacttgattgaagaaaggtagtcttttacagtttctccaggtttcatgtaagtatctatcccaagtaagcaccgttgatgaagagtggtgcagcaggcattgcatttgtaaaatgacgtgtccttctttggagtattgtaaaacgctctttccgttccttcctctatcttgccttcacaaatctcacaccagtatgattgatcatttgcctccttcccattacaaatcttgagaaaatgactgtcatgcttataccttaccttgtatggcaaggtagcacaatggaaacataaaatataatcgcattccaagcaatttaaatttaaattaacgtattcgtatgtgcacatctgacatcttccccatttatttggttctgaaggtaggaataatggatgttcatggccttgatattgaaagggttcgaaaatagaggcacaatgtatgtctagcatgaagatgttttcttgatcagtatgatgctcatagaagaagccagtacctttacgatgacatgcgtcacattgaaatgtaccttcctcattaccaggtcccctggtggcaacaactagtgtaagtggatgtggatgtaagggatgtcgcttcatgcgtggagcatttgcacaatgttcatggaggatgaagtcgctttcaatgcatgaatagaactgaccttcgtagattggaagggcacaccctcgacaatacgtattttcgtcataagctctagttgtctgaagatgcagattgtgactatgaaaaggatgtagtattattccatcagctatcctcttgaacggctcaccatcatctatcatatcatcttcttctggcacttcttcgagatcttttccatcccacacatgtctctgtaatgcacattttgaatgaacaaaataagcatcacatttcttgcaagaatatgcaccataatcgttgtccacttgctgatgacatactccacaagaaagctttccacatggaagagaagaagtaaaagagatacggtgggtgtgacgggatattcttatgacatgtgggaaaccgatacagcctttatggattacgaagacacatttggtacaaatgtatgtgggatcaagcttcttaatcaaagcgcaaaaatggcaaactaacgaagcttgtgtagggaaaaaagtgagagggtggggatggctttttggatggtcaataaaaaagggtactttcctcattgcacagactggatgcatactcaaattgcaggtaagacaatgatagaaaatcatgaagacttctgttttacaacaaatgcaaaactcaggcgctggatgatagtaaagtcgaagagaatgaaaaaggtgggttgggtgtttgatttcaagaggagactctacacattctttgtggaattttttttcacattgaagacatgcataatagctagcgctgagcattgaatctctgcatccaccgcactggaattcgcgagaatcactttctttattgttgcaccaaaagagagggactacagggagtttacagataccatcttcgtcgcaatcaagcaaagattcaccttgttgatcaccgcttcttttgctggggaagtgaggggaagaaatgtatggatgaaacttgaaatcataatcaaaaatatcaccatcctctctctgtattttgagcttgtgaaatttgatacgtgcatcaggacatagaaaaagaggttgatcaagaggttggtcgtcgccagtggaatccatggctagtacttcaccagaagaggttggataatctgtttgtgttaatttgtatacaaaatataggttttcatccatttccaccttatgaaaaacacccaccgaactcatggctactacgatggggatttggatttttgtgatattcttcctctccttctcccccttgcatatatatatgagccagtcatttaatataaaacttgtgaatacagctaagcttggtcttttatattctttgttataaaaagtcgttcattattgatttcgaacagctacacaatcttgtttatattgattttctattttattttcattagagaggaaaacgtcttttccggatcctgttttctaaagtatagttttatagttttattcgaaaatgcacgttccactggaataagccttcggatcccatcttggaacgggaacgtgtacttcacgttggagagttttctatttgacgttataatttttgtttggaaaaatgtttttagtcatgtggttaacggtctacttttacgattttccatatcaaaactcaattctattatggattgggttatggccttatgggtcgagtcttatcgacctaaatgatgttaattacgtacacatctgatcatgacttgtccacagaaaattcttagcaagtactggattattgagcatgtcttttactaattgtcatacagaaaagttgcaaccaacattatgaagaaaaaaatcatttaatatagtgcgaattggctaatcagtagccacatttagaccagaattttttttaaaatatagccatctaatttaatttgttcagcaagtaaccaaaaaccctaaaaatttacaacgtcaccctttgaacatttttctttttcttccagtatgccagtacacaaacgaagtttttttgggttcacatgtgtttttttcttctagtgcgcttacatttttttgtgataaatcagtgttttcttaattgagaatatagttagatcattccttttaattcttatttttttataaatcataaaataaaattacctacatgtcaagctctattatgcataagtttcaattatatattagtactagattttaacccgcggtacaccgcagagaaaatttatttttttaaattagtatatataaaatcttgcaaattatatctatctataaaatatttttattttatagtttacaattgttattaagtaacgtccttccaaacccgttccgccaaacccgtcatgtaaaaaaaccccgcggtatcccgctaatttaaatttataattaaaataaatattttacgggattgcaattgtgttttagtttgtcaaacaaaattttgttttaaatagttgtcgaaatctagttcaaattttggagaaataagatttagtgaattgataagaaatgtatttagttgcgttttgctcattttaagggattgcaattgtctttttgggttgtcaaacatttttttgttttaattagttgccaaaatttagttcaaattttggaaaaatctgcgtgatatatgggattggaatatatttaaaatgtttttcgtttgttaatcaatttattgctgaaaaaccaataattaaaaaccagtggcagcctttataaataagttccaactccaggatttatttcacaaaatggctgcaaaaatgtatatatagattattttattgatattacttgacgttaatgcaaatattaaattgacattgtttttgttatatgaaataatataatattaaaaactgatattctagaattaaaaattattttttgatatatatcttttcaacattgttatacataaaatttataatgtttttcctaactttagattatggatacatttaataattaatttgatataaaaatatatatatatatatatatatatatatatattgtttttgatgagataccatcttcaatggagatataatcgcacggtacagagtagttctagtagtagcaaaaatatcttcatatatatgtatgcataatattttgttactaatagagttgcaccgtatttatctatagctaatctgcacatttccatttggaaagtagagttctcaaaacaaaatttaaccaaaaatattagtattaaatagatgagatactcatatagtcatatggtatctcaccaatcgaaatgttttttattgtattactagccgaattcaaatttaatatcaagaaaaaagaatagaaatgtcaacttctcttttttttttgttcaaatagaaatgtcaacttcaaactagaagttcttcagcttcacgaccctttaaactcttttaaaactaaccaaaatacagctaactttttattgatttttttttattctttgtatattattttgtaaaaatccatcaaaataaagctaaagttagtttttctttagtcataatctaaaaatagttaatatgtttatatatttggctattatattgtaattattttcggtcaaggacgtttttatactctttgttatagaaagtcgttaattattgttttcgattctctgtacggtcttctattttattgatacgattacgatttcttctatttagagagatggacgacatttcctgaatttagttatacaacagtaaattaaggaacatttaaagaagtcccactttgtaaacataattataatttatatacaactctaaataaaatgtaaaagaactgggtgttagacacgcgatgaatgagattaactttatttttaaatccaaattttttaaaaaacatataacattgacataatccagaatttatattaacatatcactacaaattaaagttcagttacatcaattgatttgcatcaaaaagaggtttcgtaactttcttatttatagtgacttttgtcaaaaaagtataaatcttaataacaataataattacctacttttatcccccaaaaaaagcttaataataatattaataagcaacttttatccccaaaacaaaaaattgttttcttactacataataaaacttaataatatatgttcacaaaaaaaattaatatatgaatattgttgaaataaatagatatatagggcttattagaatagtagacactttttaaaaagtaatttgagaagtaggtagtttttttagaaatttgtgaaatagacactttttttactttttgtgaaatagagattatgtgtaataagctaaaagacaaaaaatatgtcaaataccactttaccctttactttatatgaaaaatatgggtcaaactttttatattatttaactatttagacctatttttattatattatagttatttttttcatattcatctttttgaattttataaaaataaattattttataaaaaataatttcttcttccaaaaaaagatgatttatatgtttttaattataattctcgtacaccagcattaaaacatagttttgtacactaacacttatacaccaaatcattttatacatatgttctaaaatatttctatttatctcatatttataaaataaaataataattgttcataaattaataaaaatataatggtgtacaccatcacgtatactattaaattaaccataatggtgtataccattaaatgaaagtaatgattatacatttttacttatgtacactaacatttgtacacttttatgtacactaatctcatattattattatttaaactttgttttgtatattatcacttgacaaaaatggttttatcttttgaatatgaggtgtacacaataggtgaaggtgtacgatattatagacggtgtagaaggtgatttatggtttgatttattatctcattattgcatgtatactattaatatcatgtacaccatattttacattttcgtacaccatcttattatgtagttgtacatcgttgtatattatcgtttgtacatcactttgtacactgtctataccgtataccacttcttagaacaatattatacattatcgttgtacactattatttgtacaccattttttacaatatagcaaaatatagcaaaattattatcaaaataaaagtattatatatttgtaaaatatagcaaaattagactttttagattcagaaaaaaatttaaaagattaatatatattttatggtaattatttaataaagaattcataacaaaacaaactaaatatatataagtaaagagaagaagaaacaaaagttatttttgtctttatttgactatatgacaaaacaacagaaggttataaaggtcattcactaaaatctctattagatagaaagttgtattagagaggaaagagaaaagtgtctattctccctatttctaaaaaaactacctactttgcaaattatttgtgaaaaaagtgtctagtttccaacttatttctaaaaaattcttcctaaacttcttccaaattgggatgttaactttgaaacgcaacgatgcctctaaatcctcctgatattgttgggctgaggagagatgctatggtaatagaggttgtgaataatacttggcagtttcgtcgaggcagaaatttgcaactgacgagaatcatagacaagaatcttgtcacaagatcatggcctctccttttacctaacccacatgttggtaatgacagagtaacgtggaagcatggaacagacgcttaccgacactatttcacgggagaaaatacgaagccgcagagtaaaggtaagttggtcgcgagtaatctggttctcccaagaagttccaaagcttgcttttatctcttggctcgcaataaaataccgtttctccaatggtgctagacgagagaatgtggctgttttaaatcttgcatattctgtggtgagtcgagtgagatgagggacaatttttattttgatgtgttcccctatacgtttacggtttagattgacatagttggtgatctccttctcgccacgcttcagtttgggacaaacgcggatccagattgggatgcactcttcaccttctccccacgcttcagtttggtactcttacctataacttacttcggttacttttccagacaaatatcttcttttttattttgtaaacaattatctattacatttggaaagaacagaatgatggtcggcataacctacacaacatccgactaattatcttatgcgtattattgaaaactcaatatctaatcgatcgagtagtttatctactgtttaaaaaaaaaaagaaaaaagagtgtccatagctacgtttgcttcttcaaagatggtgtcgtgctcgaaccattcattagtttaaccatcgcgttttgtcgtctcccacttttgtatataaactcttatttttctatcaagaaatttaacatttcatgaaagaaacgttgtcaaatttaaatggtttgcttctaattataataataaaaaaaaaaaaaaaaactcgttggatttgtaggtgaatgccacttttgttcgtgttacatgggcttatttggaccatatctttgtaaaattcatgtccacttaattttctttaacgtgaccgtcccttaatggtttcttttgtgcgtgttaaattgaaccgaatctttagattgctatttcacaaaatctccgacataagaaatagttcaatcaatgttgtaaacaatgttttgaacagaaacttctttacacacacaacacattacacatgccatagattttattaataaaaacagcctcgtctccgaggtaacatacaacagcaaaccaacaaagaaacccaaaccacacataaaagtgtattattacacagacacaatttgacaatgacgagacaagttcgcatcaggtttatatagaccgatgccatgcgtggacttatagtcacatcgccttttattcttcacacaagcttccaaagctttttcatatcattacataatcatacagtaaaattatacaaagcaaaagacttgtaaacaagtctctcactcacttaacgacgaaagctcctaaccggacgaggcgggtcagtcacgctatcgttaagcttaacacctgtgtagaccgctgcaccagatatggcaccaagtgtaggagccaccagatacacccatagtgacctatagtttcctgatgcaacggctggtcctagagttctcacaggattcatagatccaccagtcgatggcctggcaaaaacccgaagtgttttagaaacttttttattaaagtaaagactcttaaaaaacctttaatatggacataccctgcgactagaatattgagcatgaccgtggctccaacggctatacctgccaattctccaacctgctcattaaacccaatgaagaaagattttaattagggttagttactaaattactatcactggctatttaatctgtataggatgcatgatgcgttgatctattttattgtattcgtgtttctttacgtatagaggttatatactaaaggaccatcccatcaaaaaaaattttttcctcttaaaatgtttttggatgtataaatatcaaaaccctaatttttgtaaagaaaacctcaaaaagttgtaaagaaagagagacttacggcacgagtgtcggtagcgacggcagttacaacaaagaggagaatgaaagtgatgatgaactcaagagcaaaggcttgtccaaggctaacagatggaatagtgacaccaccggacataaaaggatggaacactcctttaagtgcgaatgaagcgcaaatggaagctgagacttgagccgctatgtaagcagggacgtgtgcccaagggaagtgccttagagcagcgaatgctatggtcagtgatgggtttaggtgagcccctgagatatgacctgttgagagtattatgatcatcactgcgagtcctgcgcatgcagcgttaccgattagggtttctgctccatcgtatttctggttcacgattggaccggctgtcgcggtgaatatcaagatgaatgttcccacgaactcggctccaagctgcattacacacatacaagatagcaatgttaaacaagtactagatgaatagaggctagagagtaagaaagagatgtttcttgtctaacaagaatacagtttttgtattcttgaaaataaaaaatttctttttaataactagagggttctgagtcgaagcaataaaactattgaattagtattatttctgctgtccaatttttcaaaatttgtcattagtagttactagttagtaaaatacagtcaacggttagtattatagcgtgtgatctgtctatatcctcctccacgttaacgagcatcaaccaatcataatattaatcatatgttatatatcaaggaaaaaattcgtaaataattaacactaatcataagaattacaacactactttaatattattggttaatgattaactctagagttatattattggttaatgattaactctagagagtaatattattggttatgataaaaggacaagagccgtggattgcgctaaaagaatcccatccggtggcgctgcttccgtcatggacagaaaaagaaaacgctcacaacaattaaatgaatcaaagacctaaccaaaccatacgtaacatagatctttcacaaaaacaatacaagtaaattgacgtaatatttaactactttgtattcgtcattgcaaaacaaaaccgattaaatctaactatttttcgtttagtataaataagcgtgaccgttttatttttcgtcaaaacaaaaacaaaccattatatttacgcaacttgcgtgttaattttattaatgttatcatagtcaagactattagctcattgtcacaagaacaataaactaattgttacaagatcaataaactaacatacatatagtccataaaattgaaatatgaggtgagtcggtgtccattgaataaattaagttgagatcgagtgggccttaattcgagagttatactattattttctcttagtttttcttagacttattttgtttgtacattaatttcactctctttctatttgccaatttaattctcggttgcgactgctagttcatgtcgtgttaaaacctcctccaagtgtgacgtaaacccctatgatctttttcaatatcttatcatatacataaataataaaaatcggttacaagaataaagaagtattatcttttggtcactacttctctgtatttcagagcttacaaaaaccataaattacgatcgatttgtgagtttccctatagtacatctatatttataatattgtctcgatctcatttttttttttcccaattcattattttcccaacgtggattccaatgttttctaatgaacgagccattggatttcttttattagattaaaataaaatatgagatatttactttgtaaggttataacgctattgtaatttttaggcttacgtagggttcctagccagaaattttaaaacttttgataacactttcttaatcttaaaatatgtaaaatattaatgattttgactgtaattctattgttaggtttactgacaatatgcaatatgcggttatggatccggatggtgacgaatgagtatattgatattactagcacaaaccacttaacatacaatttgtagtcgattttcttacggtaatttggaattatatatattaaaaaaataagatatactaagaattatgagtaaaataaaataaaaagaggaagatggctaaccttgcgagtgagggagacatcaggagagggaaaatcggtgaagcatgtgtcatgttgaccccaagttgatcccatcaccggcaagcatttgcatcgaggcgttggtttccgatgatcaaacgacattgaatccactctcatccccgtgatcaacggtcctcccggtgttcccggtgtccccggcgttggaggagccatcaccattaccgcacccacctcagcctccggtggagccatttccaacgtttttttttttggttttttttttggtttttgtttaaaataaaagtactaaattctaatttttttttgtttttttttggtgaggggaaataaattgatagagacgaaatttacatgatttgaaatttttataaatttgtgtttacacttgtgttttaaacttcgccagtaccggtttcaccaaacacaagttaaaactagagagatcaataaatgagaaaactcatcaatcgatcaaaaactttttttttgtttttttttttgagaagaagaaaacgaaaatggagctaggacttaaatttacatgctttgaaagatttttataaagctgttactacgttttaagaagaagaacaagaaagatagccaccttaagaaataaaaaccaaactcagaaaccgaatcttataaaaagcaaagacaacacacacatagagagatatgcctacgttaacactgaacaaagactgattctcaaagctaaggttgtgaataaaaagagaaaagaagttggaatgaagatgatgggtttggttagtctttgagcttatgttatatttatatgtgtttgtgttttatatagaaaagagattattatgcattgaacccaaaaaaatgaattataagaaaaaaaagtcaactccaatatcttattgcttttatataacagcttcattcatctactgactctctttttgagattttgttgaactgctaaagtcaccggtgcttttgtcacaggcagattcgttaccgttggatctaagtaattctctccgtgtgtgacggttaggaattgcacatgcgcggtgagggcatcactcattcgccaccccacgaccctccaataattgaatataaaatttctcttaagtctagggaagagcgtttgattcgtgtaacaatatttaaatagaaccaatttcattttttttttcatatataaaattaacttaaatttaagtgtatatcaaatatatatatatatatatatatatttatttatttaatattcttcacactgattttttttcattttatttgatattttcaattttttattattttaaagtaatatttttttatctgtacaatttgttttattattgatgcgataatatttagttaaaaataatttttgtattaaataaaaaaggaaatgacttttaattttgtgccaaaatcttaaacatcacttatattaaaacataggataggaaataggtgtttgagttaaaaaagaattatcttaactaaattttataatacaagatataactagtttagactaacttaaatgacttttttgtccaaaaaaagaaaagaaaataagagattaacttaaatgacctaaagcaatcaccttagacataagttggccctttgtgtaagtctagtgaagaagcattgaaaattgacaatattactatcaaataattgacctaaagcaattgctttagacataagttcgctttatctaaattcttttcaatgggattttcgtcgcgatgattctacaatgtaaaacaggtccaacataacttaggtccgcaatattttgcaaaactggcattcgatgacatgagtaaatctcttgtgctatttctcacgattaagattttcttagttggccaaatgaaaacgtgttagtggcttgattttttagatttgacatagttgatggcaaaaaataatggattttctgtgttaaaaaggtatttaatgctgtagaatatgaagtttaattcgaataaaagaagtttaattcaaaatatattgtgacatgatatcacattttataaatataattgattaacactacttgcaaaatgagatatcatacaaaaaacattaattacacccctttctctaataagttaacatacttaactaaatctatgatgacaaaagaatacatacaatattgtggtataccatatacacacaaatgacattgtgtcactttgcttattattctcttacattaggtaccccaaaaaaaatgcaatttgtacaatgcactctgtttttttgaacaaaataaaagatgaagatatatctctttaatttattcctatgacctccccctctttcctcgtaggttcttttctttttctttttgtgtgtacaattataccgtataatatcaaagtgaatgattattccgaaacgtggggaggagcttcgtgagttgtattatgataataaacaaaaaggagatttgtcaaaactcaaagtgattattgtttagttctattcaacataaagcaaagcaactatacttgttccattgattgtgattattggaattaaatcaaattattaattaagggtttaattttttttatcaaaaagggtttaattactttagttactttaactagacatacaaaaagagattcctcagaccgtctaaattagcctattttagggtaaatttcagacaattggaaaagtaatttagtggcagggaatgcttgctttcgaattcacctttcctcgtcttgaatcttgattgatgtaattttttccttaattattgttcattaaatgcttgctattgccagagagagaggaatcatccttcgtagagttcatttttttttttgcttgtttgattcctttcgcatgtagtacatgcaagtggaacattcgaatagaacctcgattataaaacaaataaaataatacttttatagttgtgttcataaattatggtctataatttttttatttaaaaaaactgtacatgaaggacaagtttggcagttagctccgatatagttcttagaagcaaatctagcctcaatggctgttgatatacattatcatccgagtattaaaccgataagataaaatgatttcggatatcagtgttatattgatggtttttggaaagaaaataactttttcgttggattatgatggttttgtgcttatccaaccgatggaacgcatgatatggaaactgcaaatgttcgaagaagcttaacatcactacatgcagaggtagaaacagtagtttcggtgatgaaatgtatgatcgaccaagagaagcgagaaatagttttccatacagataacttagatatggtgaaaatcgcttgcatggttgataggaagcgattcaaaacaatatgaaagagtttgattcattttctttattttgatttctgaaaatgcaaatgcaaaaacggataatctagcacggaaatattttatacaaccacattttatcatctatgtgaacaatatttttcaatattgcttttgtttgagtcaatctaatacagtatatttgttgcaaacaaaaaaaaaaactgtacatacaaattagggatttattagttttctaaaagtataacttcatccaacatgtatttttaaataaaccctttataaaaaaatgtatatcttaaaatatttttctgaaacttacaaatagttacgtttgaaacggtccttcatgtagagatcaaaactaaaccaataaatttgcgtactgttagctaatatggagtgaaatgtgtaggttaatttaattcggtcatgtaacttatgaaataaacttataaactatattccataattttttttaataaactttaatattacttatatagaaacgggtttgaacgcaacttttaaatgtatgtgtcagatagagaaaacggattcatgctttaaactgttattaatattttaaatatgtataaattaatattataacatttcacatacgtaaatgtaataaaaagtgatacttatgtaaatgtatttatcttcttcaataattgtttttctaaattttattacataatgaataaatattatgtcactacacaagttaaaaaatagatttctattttaaatgaagcttctaaaaaccaaatttcaaaattttcacatcggaaactttttttctttttcttaaagctcatatcagtcatatggaaacctattctttgacttgccaatattttaaacaagtatcttcgccgacctgtatccggtcattcgcatccatgtttagcagctagtgagctaccatgaccacttgccacttcttgccattattgatgaccaccattaacaattatagtaaatcgtctagccgaaactatagaaatatatgtcatcaatagctatatataatatataactaatccgctgattagaaatcaatcaaatgggttcaatgtcttttactgttttagagacataagaaattcatctttacctgaaaactcttttgttgttttgcaatcgaaaacaccaacctctattattaggttaattataggccatttgcaaagaaagaaaaaatgctaattaagtatgtcatacagtaatattcaatgaccatatgttattataaacccttgcatgatacattaaattatactaagatattaattgaataatggaaataattgcatgatctctgttccggatgttgttttatagtaacaatttacataagtttgaatatttttttttaaaaaaaagtaatggaataatgaaataattgcatgagctctgtttgggtgttgttttatagtaattagattggattattttttttcgttcataagtcactattggctttgttttcgtgctaagtgatttggagatatatatttttgtgatgaatttagtatatgaccaaaatctaacccaaaacaacaagagtatgactcaaaaaaactttcaagaatatttttttttttcctgttatttttttcttaaaaaatggctactacctgttataaatacaagagtaaaatcgtagggactgagtaccaaaagaaagtgctcgaagaatggttacttagaaaagaagtctaattaataagcaatgttacaaaacagtaacaaccacgcatcgaacaaaccattaactatgaatgagaagcacacgggattacaaataaaaaggaattttgaattttcatatgtcacttgaattggctagaaaaatacatcacctctatttgaggaaatatttctaatttatatgcaacgttacaacttacaaatggtaaccacgagtggaacaaaaaagttgaaatgagagaacagtagaatgaaatattattatcctgtaatttcacattcatgattgattccacttacctaaacctttgcggatataaaatttgaattagtgataaactatattttggtgcggtccataaaatagaaatccaaaagacaagtttcccataccataaaggtcgagacatacaaaagtcacttcagacataatgatgtgatgactttgtctattttctcaaccatccaaaatggccgtgagaattgagacccctcttgaccttacatcacatttattcactatttaatccaactccattcaatatgattctctattcaattattcaactcttcgttcattttccctactcgcatgcatctctgtctttttgacttagaaccaacctattggggttcctattttatcaaatcatagctttttgatcaagtatcgaattatactattttctccattttagcatcacaaaaacttgcaattttctttgctgtgatatatgaactaatgattcttaagacactaattaacaagtcaagaaatgagcctatcatttaggttgagccattctcttagagaactcacaactaaaaattacgtttaactacacatgagactatattaccgtacataaaataaagtttcgtgtatttatagtctcaaaatcactagtttctcactatactggttcatgttaatcttatagcgtgccacatgggcgcggttaactccgatcaacccgtggacctttgaacctggcccacttaaactaagaagtaagaaccatgggtgttagataatctgggaggttgttccacaaaaaaggttgatctcacaacccacaaggtgtttaaaagctaaatcaaccaggtacattgtcgtgcatgtgtgtcattaccaaaaaggccatcatgttgatggagacgagtaggacccgagatttttggtaagattccaaatgcaatcccgcgaaaaagtcgtcaaagaacagaaacatagacaaatgagaagacattagtcacacataagacatatatgcacacatctagtcaaaattgatgtgtcgtcgaaattattgagtctaaacaatacaactaatttgagtatttaaaaaaatcagcttactctctacttgttcatcaagaatagagtttggcaaacgaagaatcatttcaactattgttcaataagacaaagttagtgattatccttcaactaaaaagttagtgactatcgttcaactaaagcaaaaatgaaaaaaaaaaaatctcaatttcagaatccaaaagctagaataagaggttcaaaataaagaccaccaaatttgaaatttaatcatcgaaagagagacagacgcaactagaattgactattagcaaactaacaaacaattttacatatgtttcattcctaaataatactgttcaaagtaaaacctaatataatgtgcatggttttatatggttttagtttgtattcggattataatcaaatatcattttagtttttgttttattttaaaatgttcttctttttgttttgtgttctggtttggttcatattcaaattctgtgattcgaattgagataaacattttcatttgaaccatatcaatatatagtttggtttgattcgaatcatatcgctttctgcggatttaacaccctagagtagacactataatcttgaagatagtgtcatatagtcatatcctcccttcaagatagacaaagcaccatgttcaaaggaaactgaagagcgcaactcttttaaacaagcccatatcttccttttttttttgtcaacaagaagcccatacattcattcattcaaaaaaaaaaaaagggaaaagaagcccataagctcactttcaaggaaacttcacaatggtgttttgggctttctcttcctgactttagtttcaaacttcagttttttttagcttattacagttatttctcctagaaaggcctttgattgctgtgttactgtatcttgaaggaattgagaatcagaacctttgaaattgcactacaagtcacataaactttgcttcatattcacaatgacatgcttctgctttaagctttactttacattacattgacatgaacagaacttctctttctctctaagatttcaagacaaaacaacaatcaaaattacatttcctaggaaatgttgatgaatgataattagacaaaatgttatttcctgcttctattcacaaaacaaaacaagagtatttacatggttattcttcttgctggttttccaagaaactcctaaatgcacaccaactttacagtgtcgttcacgcagccttaccacactacaacaaaaaccatcgacaccgataactcacactcctttaccgcaaccgaggaaactcaatgatggtatttcctttataagagtatccgctacttgagcagccgaaggtcttagagatagcttgctactgatacagaccgcagcaacactcaacattgtcttgacctcatcgatatcaagactatcccttaacaacctcgggtccaagaactgtctgaccttgtcctctgaaatgtctacactcgaatccaaaatctcattcataagtggagcagctatatgcaccagcatctcacctctctcagcagaaaacgcttcttttcctgaaaccaactcaagaaccacaactccaaacccatacatatccatcttcttcgaagcaatcccggttcttaaataatgagggtctgtgtaacctggagatcccaccatcttcacttgtctagatctaggcgacatcgtaggaggctgaaccatcgaagagaacccgactttagctgacccgaaatcgcaaagcttgcaatcaaagtttttgtctagaagaacgttggaagatttgatgtccccgtgcactatctgcgggctacatttctcatgaatatgttcaatagcttgaactaactgtaacgcaatcgctacacggttcctccattgcaagacttgcttgctattgctttggagcttctcttgtagatttccttgaggaagatactcaagaagaagagcaccattttcctctgaaatacaaagaagcagaacataagtctatatgcaaatatatcaaacaacttgataaaacaaataaagatcaaaactttgattaagacaaacttaatcactaaaattggcttaatcaagacaacaacacaattgaccagacaccaaatatttgcagaatctatgagatttcagaagtagtacctgaatcatcgaaatagccaagaagcttgacaatgttaggatgttgaagacgaagcaaaatatcaagctcaagtctaaagacttgataaagacggtgactactaacatgaaccttgagagccgctttatcagagccagagaagcgagccatgtagatactgctatagccaccagaaccaatcaatctagagaaattggaagtgagagtttcaacatcatcccagctgttataacaagtcacaccagatccttgacttgtgggtttgtcggtgatcgtcttggagacatcaaatctaacacaattcaagaaacaagccattataaaaacagagcaaaaacagagcagaacagagcaaagcaaagaaagattgagtctttatttgattctagggttaagattgatagaagaaaatgggtttgattagggttttgtaaaaaatgtaacagcagacagaggaagaacaaggggatcgaagaaagttatggatttggagacattgagattgttggatttgtaaagaaagaagaaggaaaggttttagactttggattgggaggcagagtttgaccgattatttaataataaagctgccattttcgatgaatgaaaccttccttcgaagtagctagctctctgacgttctaactactactcttctttcaagttttgtctctttgctttttggggctaagcaaaacatttaacacatttgtttttgcttttcaatcagggaaaagcagtagaaaatagttaaatatgaaaagcgattattaatgtcacgtccttcatatatgacaattttgtttttattattttttccgaaactaaaactcgctcattttaaagtaagaatgtatttattttgaaatgagaaagtatattagggtatcttcgacaagaaccctaactttaaaagtgacacatcttcaaaataagagtttgagagtcacttgttctaatagtgcatcctcaaatccatttatttgcattttgtataatggttttcaatattaataattaattataatgagaaactttcataaatatttataaatcattatgtgatataataattttcttaaaaagtgatatgataacataaaattacatatctataattataaacgaaacataaaatatatcataaaattatatctaaaataccaaatcatatatataactagtatttccgcagagcccacataaatttgctcaatgtaaatagtttttaatgttatgtaatattcttatacattactaattttaattctaatctactgtatttattagaatttatatgtgataattgaatttaaaaggatatatttgaaataattaaatataatataattatttgtaaaatacgtaagttatttgaactaaatatatatatatatataagatttctaaggttttgaatagtgcctcaatttgagagtgtacatttcaacggctatgaactctccatgattgcatacttgacatgcggtggtcggtggataaggcaaaatatatatatttaaccatcttgagagagccatagagcccatatatatgaagaacaataacatattttgtttaagcagattttcgtgtagattcattcatatacataatttgaaatgttttaagaaaggccttcatcactcgttacagatatatccaatatacagcataaatatgcatacgaaggtgtttaaaatttaaacccaaataactttgctatccaaattaatgttcactttataaaattgtggatttcttcaaaaattgttgggaaaacgaaagaaataaaccgtttgttttttaatctagagtattttttatttactaatctgatgaataattttacaaatctttaggttcagtttttgggaaccttctaaatttttttgtaccatattttaaatttcacacggtcggagaagaatcattgtcccaatagttttcatttctcttttaaaaatatactaaatattttaaataatgtcgtcaaatcataatcgttagatcttctgtcgctttctttgtctttttcttcagagaaaacgtgaaagatgctattatagaccaagtaacatactccataaaccctaccaaacaccgacagtctagtcttaaattaaatctcacacacacatacaataaacaaataggtttgatgccaaaaatacataaacaaagagtttattgtgactgggtcaagcattaggcttaataattgtgggtctaaaggttagccctggcccgatatgtgatgtgaaataagcaaatttgtttttgaccttgcatccacaattcaaatgcattattttccatattagaaccttagcttaatgcaacatgtgcataaagatttcgaattggaacaaacatataagagcaaaatacttaaaactcaacacctaatgcgatggaacgaactaccaaagattgacagcaaaaactgccaaaaccaactcatggtggtatagtgaaagatgtatcctaaggttggagattaaggtttaatcactacgatatcaacatgtttgcaattcgccatggcacatgatgaggcaatagagaatctagttatccactcgaaatataatgtcaacgataaattcagctatactctgaagagatgctaacacgcgttactagtagttctcatatatacttggtcaccatagccatcttaaatgacattccaaatggatattttatatcaatagaagatagtcttcatttgctaaaagcaaagaacgaaacataccgaaatagatctgttttggagaagtaagaatcaacagcatatagaatagataagcgagagagagaaagagatatgaggttgggtaagtatagaacctaagatccacatttagcatgacactatactcttagaaacacaccattttcaagactaagttatgtacttatttcctattgactttcattaaactacacatgtgcttggtgagcatatgattctaatttcaacttatatgtttgctctttttgaactacttccaagactacacaaataatgaaataaagaactagttgaggaaaatattatagataaatacttaagcttgggtggaactggcaaggaacttctgcaatgacacattgtatgattcaatttgtatcatacagccttagaaccttacaagttacaagcatcaaataagttgaccttaacttgtcgaatttgagaacgaatagtgtataagaagtgcaaagagacgtatggtccaaaacagaactagtactcttttcttgttcacaaagcatctccattatactatcggtatacaacttcgctctggtgtatctccattatacgtaaacaagtttttttttttatgacagactaaaccatacgagcaagagagtagaagaacaagaaattcgttataggatctttgttggacagtcagacgagtttagataggaattacaatcctattatataaatgtagacatcttagaatctcaaatcctcaagaaaagttgagttcgcatgttgatgaagcttgggaagaaagtctcaactccgttatcatctcgagttttgtaaacaaacgtgtatcagatttgattgttgcagtccttaagcggcaagcgtttttcaagatgtaaaccgcaatatctctgtcttgtggtcttcctaagtatttaaaccaagtgaatttttgtagactcgacaacatgcattcaggaacaatactcggttgattccaggaaagcataccaagattctcatgatcctgagatcaagcagaagaattagtttttaaagaacaaaataatgtaatagttaatggaagaaacttacatccgtttcggagacgagcattagttctcgtaagttaggagagtttttgaggaaccagacgaggagattcgaagaatacttgttccatagcgttagttcctcaaggtggttgaagataaaaccttcaccgtaaccaacctgcggacgataaagaaaagtattaacagagagtttttaaaatgagattaaggacaagcagtggatggattgaaattgattacctcagaggatattgcaagccgcttgacagatgtgattgatccgatgagactcttgatatcagcgaatggaacattgatatatgcttccctcagcttaggcatattctcaatcaaaaaggtgtgactattatcattacgatccacaagttggaaagacagtaaagaaggagtatctatgacaaactcacgactagaaggtgtagagagtgataaacgttgcaaagatgggacaataacagtaagctttcccatattgtcatgatgagatagattcactactagatcttcaagaacagggcaattacatagaagccgctgaagagatccttgcttgaagtatctcacacctttcagttccaaagttttcaaagagggaagacaaaccattcgaggaacatccaagagaaccccgccatcgagtttcaagatcacgagcgatttgcaggtatataagctacttggcaatatgttttgcttctccccatagtgagaactataaatcttcagctcacgtatgtagcgagaaactgctactacaacccacattctgatatcctcaggtttaaaatgcgaatcacttaacacaagacggaaactttctataacgggagctctatgtaatggcagattcctatcaagaaaacactgtaacctcttgaattcagactctgaataacgtttactaccaaacttaagtttagtcaaccacatccaaagaaactcccatcgtttcgacaaaatgctcgttgacacagcaactttagtcggaacaaacgacagtatcttaaccagtacttcatcaggtaacccactgattctgtccatagtcttacaacaaccaagaaaatgtcaccgaccctgaaaaagaatacacaataaagactcaaaggatttgtctcaagcataccaaacaagtgaaaacagaagaacaagagacaaaccctagaaagaagctctggtttgttaggtgatgagtcttgtccagtgaaattcagtggaggctcgatttatttgtaccggaaccggaatcagaaggttaatcaaaagcgcctgaagaactctgcggaagcatttctggaaactctacaactctgaaatcgagaaaaggagaaaatagaagaaggaatcagaatttgtagcgacactacacttaactactggctttagggattcattgatacctatatgggcctagagaagtgtttgatacgtaagtgggttgggcctctttttcaagaatcctacaaaggaatctttggtaataataatggctatcattttgatgcctggcacaacgaggcagtagctatcagctccatactttgtaaattcatgctagttaaccaggtaagtgtcaatatttcagaatcttttttcacgattgactttaggtctgagcgtggtatactgatacggtgtatttggctttggaagagactgtgagaaaagataaatgagattttggaacctctgcaatatatctttgacacattgtatgatacaatttgtatcatagagccttagaccctcacaagttctaagaatcaaataagattaacattatgttgtcaaacttaggtctaagcaacaagattgtatatctcctagttataaactagtcttaaagttttcagagatggaagagaaaccactgcaagtaggtaagacattcattacctgatctttgttgggcaatcagacgagtctagatggaacttatagaatcctattatataaatgaaaacatttaatgattcaaaacctcaataaaagataagctcgcatgttgttgaagctcgggaagaacgtgtcaactccgttatcatctcgagttttgtaaacaaacgtgtatcagaatcgattgttgcagtgcttaagcgacaagcgtttttcaagatgtaaaccgcaatatctgtgtcttctggtcttcctaaatattctgtccaggtgaacttttgtagactcgacaacatgcattcaggaacagtactcggttgatcccataaaaacagaccaaaattctgatgatgatcctgaagtcaagcagaagaattagatttgaacaacaaaataatgtacaaaagaaaacaagttaaacgaaggaacttacattcatttcagagaggcagcttagttcacgtaagttaggagagtctttgaggacctggacaaggacattccacggataatcatcccatacaggtagcgtcagatgctcaaggtggttgaaaataaaaccgtcaccaaacatagcctgcgaacgaataaaaaaaaagtataaacagagaatttaaagagcaagatcaaagatagattgaaactgattaccttagaggatattgttagatacttgacagaagtgattgatccgatgagactctgaagatcagtggatctaacatcgacgtatgctaccgttagcttaggcatattctcgatcaaacatgggtgactatcataattacgatcctcaagtttgaaatactctaaagaaggagtatctatgacaaactcatctacatcacaagtataacctatatagagtgacaaacgatgcaaagatgggacaataatagtcaactttagagtattgtcatgatgatataaattcacaactagatcttcaagaacagggcaattagatagaagccgctgaagagatgcgtcactgaagactctcacacctttaagttccaaagttctcagagagggaagacaaaccatcggaggaacatccaagataatcccaccatcgagtttcaagatcacgagagacttgcaggtatacaagctacttggcaatatgtgttgcttctctggacagtaaatctccagctcacgtacgtagcgagaaacaactactacaacccacattctgatatcttcagggttaaaatataaaccactaagctcaagacggaagctttctataactggagctctatgtaatggcagatttctatcaagaaaacactgtaaactcttgaattcagactctgaataaagttcatcaccaaactcaagtttcgtcaaccacatccaaagaaactcccatcgtttcgacaagatactagttgatacagcaactttagtcggagctaacgacattatcttaaccagtatttcatcaggtaacccactgattctgtccatatctttacaaaaatcaagaaaacacaataaatacttaggatttgtctcaagccaaccaaacaagaaaaaaaacacagaagaacaggagacaaaccctagaaagctctggattgttatgtaatgagactatttcagtaaattctcaatttttccgcctctgaaccggaatcataagggtaaatcaaaaccgcctcaagaactgcggaagatttttggaaactctatgattctgctgaataaaaaaattaagggaaaaaaaggtttaggaatactgtctttcttgtcttttaagaatactgtcttattttttaacactatcatcttcaagatgttcatagtgatacaagatatggaattacatatcagagaaggaaaccaaagactcgagatccttcttaaaattgtttcctatgttttcctttttagatttggtattttaacataattatgcttagagtcggttgtaagggtttctctataaaaggagactcaaacaatgaataaaattaacttccaagaattaaccttaatctccaagagagcttagggttaagaggaagcttatctttcaatctcttgttcttaagctttagcaacgggtcccttaacaagagctaaggctaaaacattggctcataacacatagtttctttttaatcacaggatgtgaattttgtggcctacgaaaacaaaaatttatgaattgcaaaaaaaagaaaagaaaagtgattttaacaaatgagacctgtgatcatcagtgttcctattgtgtttatgaagttcccaacagccatcactaccagaagaatgccacaaaccatcatttgaaaagcgacaacatttattttactttacttcctattttttagtctctgttcactattgaattaggatttgtcggcctataccgggaataaacccgttgaaaacaatgccaaaagagtgaaaataatatacctgccattcattaacaactccagttactgtttttcttagcaacagcagtccaacgtatgcttcaaacacctgagttttagcaacaaattgttaagcccaataagttaaacagaaaacctcaagactattgtggaaaaagcaaagaggttctactatacaagccatctaagagatctcattacatcagataatctattaaatatattgactttcaaatatatacatagaaatgttcacagttgttaaaaagaaggaagacattaaacgctttaaaatgtttaagcataaacttgattcatatatttacacaaaaaaaaaagctcacctgtaatatgaatagcatacataagagccatagttgtccgccaacgccagctgtttctccccatacaacatacattctcttagcctgaattttaaccacaaggcacactttagagctattttacaaaagcgaatacaagtttggaccgaagaatagaattgcacataataaggcacctttcctagtgcaatgcgagtgtataatctttggcgttgatatctgttttatagaagcatggcgacacctcttgcatcatagcccattgtaggaaaagatggactcctctctgtcgaggattgaacttcatcatggcatttactatgtgaacttttaatctgcacaaaaaagaaataactctgatcattacctgtttctggacacagtttggttgacctttgctttcccaagtgaggctgacaagggccagagccatggcacaatagtgatgatatagccacctgcaaaaccaaatcaagttcagagtttaattcactcccaacagatgagataagccaaacgaaacaccactacatgaatacatatatagagatatccactgcataataataacaatactaaacacccccaaccattgaggactccgtggaagctaaagttctctaatcctaatcatgaaatacttgacaaaaccatatatgtgtatgctaaagttctctatgtgtatgcttctatgccaaaatgaaagagaccctttagagggaaaaatccaaatgtttgccaatcaccatgccacatgatgatgcatttgatattttacaacattcaatagtcatcatttgctaactgcaaagcatgtgcgttgtggatatagaactcaagatccacacagtaacatgacacaacacttagaaacccaatattctctagacttaggtacgtcctatgacttccataaaactacagatgtgcttggtcgagcataggacagacgttcaacatatagcatgacgcatcactctgagatacacacatacaatgaaataacattctatggccttcactagcgacgcatgagacacaaagaacactccaaattcaaagaacttgacaacacgagcaaagaaaaacttaagagatcataacagtcataatcgaacgatgaggaaacatataagagtaccatggacgaatattgctccccttagctcttaatatgttctctagcatagctaacccagcatagagaaacaacagccaagcctagtaaaaaggataaaaaaattacattttaaagcaacccaaatcatactcaattatctcgtagagctggagaggagatgcaggcaaacatccaccccaataataagatctaaggtttaataatgtttcagggggaaaaaaaaaaggaaaagaagagcagtcttgtcttgtcctgttccatggcaacaagaaaaacaaccacacttagataactctgaaaacatgaaattgacattaaaggacacatgcaagcaaaaaaaagtaccaactcttaagctattgtattcttctttttaactttgagctgaacatctttacgcaacgctcaaacttttctgtctgacatacaaggtatatctccattatacataaacaagctttctgtcgaaaacgagttttaagagatggaaaagaaaccatacaagtaggagagtaaaagaacaagacattcatgatctgatctttgctggacaatcagacgagtctagatggaaactagaccctatttataaatgaaaacatcttaaaactcaaatcctcaagaaaagttgagttcacatgttgttgaagctcgggaagaacgagtcaattcctttatcatcttgagttctggaaccaaacatgtataagaatcgattgttgcattccttaagcaacaagcgtttttcaagatgtaaaccgcaatatctctgtcttgtgttcttcctaagtactgcgaccaggtgaacttttgtagactcgacaacaagcattcgggaacaatactcggttgattccagggaaacatacgcatattctcataactctgagatcaagagaagaatcagatttttttttttaaacataatgtgcaataaataagaaataatagctaatagaagaaacatacgtcatctagttcagagaagtactctagttcttgtaagttaggagagtctttgaggaactgggaaaggagattcgacgggttctcttccaatacatgtagtgtcagacgctcaaggcggttgaagatataaccgtcaccaaacatagcctgcggacgaataagaaaagtgttaacagagaatttagaaagcaagatcaaagatagattgaaactgattaccttagaggatattataagccgcttgacagaagtgattgatccaatgagactctggagatcagtggatctaacatcgacatatgcttccgtcagcttaggcatattctcaatcaaacatgggtgactatcataattacgatccacaagtttgaaatactctaaagaaggagtatctatgacaaactcatctaaaacacgcttataacctatatagagtgataaacgttgcaaagatgggacaataacaatgaactttcccatattgtcatgatgacataaattcactactagatcttcaagaacagggcaattagatagaagtcgctgaagagattcttgtttgaagtagttcacacctttaagtaccaaagttttcagagaaggaagacaaaccattcgaggaacatccatgagaatcccgccattgagcttcaaaatcacgagtgacttgcaggtatacaagctacttggcaatatgttttgcttatcctgatagcaagaactataaatctccagctcacgtacatagcgagaaagaactactacaacccacattctgatatcttcaggtttcaaaaccgaattacttagcttatgacagaagctttctataaccggagctctatgtaatgacagattc

SEQ ID NO: 563 - DNA, 95076 bp, Arabidopsis thaliana
gaattcaaatttaatatcaagaaaaaagaatagaaatgtcaacttctcttttttttttgttcaaatagaaatgtcaacttcaaactagaagttcttcagcttcacgaccctttaaactcttttaaaactaaccaaaatacagctaactttttattgatttttttttattctttgtatattattttgtaaaaatccatcaaaataaagctaaagttagtttttctttagtcataatctaaaaatagttaatatgtttatatatttggctattatattgtaattattttcggtcaaggacgtttttatactctttgttatagaaagtcgttaattattgttttcgattctctgtacggtcttctattttattgatacgattacgatttcttctatttagagagatggacgacatttcctgaatttagttatacaacagtaaattaaggaacatttaaagaagtcccactttgtaaacataattataatttatatacaactctaaataaaatgtaaaagaactgggtgttagacacgcgatgaatgagattaactttatttttaaatccaaattttttaaaaaacatataacattgacataatccagaatttatattaacatatcactacaaattaaagttcagttacatcaattgatttgcatcaaaaagaggtttcgtaactttcttatttatagtgacttttgtcaaaaaagtataaatcttaataacaataataattacctacttttatcccccaaaaaaagcttaataataatattaataagcaacttttatccccaaaacaaaaaattgttttcttactacataataaaacttaataatatatgttcacaaaaaaaattaatatatgaatattgttgaaataaatagatatatagggcttattagaatagtagacactttttaaaaagtaatttgagaagtaggtagtttttttagaaatttgtgaaatagacactttttttactttttgtgaaatagagattatgtgtaataagctaaaagacaaaaaatatgtcaaataccactttaccctttactttatatgaaaaatatgggtcaaactttttatattatttaactatttagacctatttttattatattatagttatttttttcatattcatctttttgaattttataaaaataaattattttataaaaaataatttcttcttccaaaaaaagatgatttatatgtttttaattataattctcgtacaccagcattaaaacatagttttgtacactaacacttatacaccaaatcattttatacatatgttctaaaatatttctatttatctcatatttataaaataaaataataattgttcataaattaataaaaatataatggtgtacaccatcacgtatactattaaattaaccataatggtgtataccattaaatgaaagtaatgattatacatttttacttatgtacactaacatttgtacacttttatgtacactaatctcatattattattatttaaactttgttttgtatattatcacttgacaaaaatggttttatcttttgaatatgaggtgtacacaataggtgaaggtgtacgatattatagacggtgtagaaggtgatttatggtttgatttattatctcattattgcatgtatactattaatatcatgtacaccatattttacattttcgtacaccatcttattatgtagttgtacatcgttgtatattatcgtttgtacatcactttgtacactgtctataccgtataccacttcttagaacaatattatacattatcgttgtacactattatttgtacaccattttttacaatatagcaaaatatagcaaaattattatcaaaataaaagtattatatatttgtaaaatatagcaaaattagactttttagattcagaaaaaaatttaaaagattaatatatattttatggtaattatttaataaagaattcataacaaaacaaactaaatatatataagtaaagagaagaagaaacaaaagttatttttgtctttatttgactatatgacaaaacaacagaaggttataaaggtcattcactaaaatctctattagatagaaagttgtattagagaggaaagagaaaagtgtctattctccctatttctaaaaaaactacctactttgcaaattatttgtgaaaaaagtgtctagtttccaacttatttctaaaaaattcttcctaaacttcttccaaattgggatgttaactttgaaacgcaacgatgcctctaaatcctcctgatattgttgggctgaggagagatgctatggtaatagaggttgtgaataatacttggcagtttcgtcgaggcagaaatttgcaactgacgagaatcatagacaagaatcttgtcacaagatcatggcctctccttttacctaacccacatgttggtaatgacagagtaacgtggaagcatggaacagacgcttaccgacactatttcacgggagaaaatacgaagccgcagagtaaaggtaagttggtcgcgagtaatctggttctcccaagaagttccaaagcttgcttttatctcttggctcgcaataaaataccgtttctccaatggtgctagacgagagaatgtggctgttttaaatcttgcatattctgtggtgagtcgagtgagatgagggacaatttttattttgatgtgttcccctatacgtttacggtttagattgacatagttggtgatctccttctcgccacgcttcagtttgggacaaacgcggatccagattgggatgcactcttcaccttctccccacgcttcagtttggtactcttacctataacttacttcggttacttttccagacaaatatcttcttttttattttgtaaacaattatctattacatttggaaagaacagaatgatggtcggcataacctacacaacatccgactaattatcttatgcgtattattgaaaactcaatatctaatcgatcgagtagtttatctactgtttaaaaaaaaaaagaaaaaagagtgtccatagctacgtttgcttcttcaaagatggtgtcgtgctcgaaccattcattagtttaaccatcgcgttttgtcgtctcccacttttgtatataaactcttatttttctatcaagaaatttaacatttcatgaaagaaacgttgtcaaatttaaatggtttgcttctaattataataataaaaaaaaaaaaaaaaactcgttggatttgtaggtgaatgccacttttgttcgtgttacatgggcttatttggaccatatctttgtaaaattcatgtccacttaattttctttaacgtgaccgtcccttaatggtttcttttgtgcgtgttaaattgaaccgaatctttagattgctatttcacaaaatctccgacataagaaatagttcaatcaatgttgtaaacaatgttttgaacagaaacttctttacacacacaacacattacacatgccatagattttattaataaaaacagcctcgtctccgaggtaacatacaacagcaaaccaacaaagaaacccaaaccacacataaaagtgtattattacacagacacaatttgacaatgacgagacaagttcgcatcaggtttatatagaccgatgccatgcgtggacttatagtcacatcgccttttattcttcacacaagcttccaaagctttttcatatcattacataatcatacagtaaaattatacaaagcaaaagacttgtaaacaagtctctcactcacttaacgacgaaagctcctaaccggacgaggcgggtcagtcacgctatcgttaagcttaacacctgtgtagaccgctgcaccagatatggcaccaagtgtaggagccaccagatacacccatagtgacctatagtttcctgatgcaacggctggtcctagagttctcacaggattcatagatccaccagtcgatggcctggcaaaaacccgaagtgttttagaaacttttttattaaagtaaagactcttaaaaaacctttaatatggacataccctgcgactagaatattgagcatgaccgtggctccaacggctatacctgccaattctccaacctgctcattaaacccaatgaagaaagattttaattagggttagttactaaattactatcactggctatttaatctgtataggatgcatgatgcgttgatctattttattgtattcgtgtttctttacgtatagaggttatatactaaaggaccatcccatcaaaaaaaattttttcctcttaaaatgtttttggatgtataaatatcaaaaccctaatttttgtaaagaaaacctcaaaaagttgtaaagaaagagagacttacggcacgagtgtcggtagcgacggcagttacaacaaagaggagaatgaaagtgatgatgaactcaagagcaaaggcttgtccaaggctaacagatggaatagtgacaccaccggacataaaaggatggaacactcctttaagtgcgaatgaagcgcaaatggaagctgagacttgagccgctatgtaagcagggacgtgtgcccaagggaagtgccttagagcagcgaatgctatggtcagtgatgggtttaggtgagcccctgagatatgacctgttgagagtattatgatcatcactgcgagtcctgcgcatgcagcgttaccgattagggtttctgctccatcgtatttctggttcacgattggaccggctgtcgcggtgaatatcaagatgaatgttcccacgaactcggctccaagctgcattacacacatacaagatagcaatgttaaacaagtactagatgaatagaggctagagagtaagaaagagatgtttcttgtctaacaagaatacagtttttgtattcttgaaaataaaaaatttctttttaataactagagggttctgagtcgaagcaataaaactattgaattagtattatttctgctgtccaatttttcaaaatttgtcattagtagttactagttagtaaaatacagtcaacggttagtattatagcgtgtgatctgtctatatcctcctccacgttaacgagcatcaaccaatcataatattaatcatatgttatatatcaaggaaaaaattcgtaaataattaacactaatcataagaattacaacactactttaatattattggttaatgattaactctagagttatattattggttaatgattaactctagagagtaatattattggttatgataaaaggacaagagccgtggattgcgctaaaagaatcccatccggtggcgctgcttccgtcatggacagaaaaagaaaacgctcacaacaattaaatgaatcaaagacctaaccaaaccatacgtaacatagatctttcacaaaaacaatacaagtaaattgacgtaatatttaactactttgtattcgtcattgcaaaacaaaaccgattaaatctaactatttttcgtttagtataaataagcgtgaccgttttatttttcgtcaaaacaaaaacaaaccattatatttacgcaacttgcgtgttaattttattaatgttatcatagtcaagactattagctcattgtcacaagaacaataaactaattgttacaagatcaataaactaacatacatatagtccataaaattgaaatatgaggtgagtcggtgtccattgaataaattaagttgagatcgagtgggccttaattcgagagttatactattattttctcttagtttttcttagacttattttgtttgtacattaatttcactctctttctatttgccaatttaattctcggttgcgactgctagttcatgtcgtgttaaaacctcctccaagtgtgacgtaaacccctatgatctttttcaatatcttatcatatacataaataataaaaatcggttacaagaataaagaagtattatcttttggtcactacttctctgtatttcagagcttacaaaaaccataaattacgatcgatttgtgagtttccctatagtacatctatatttataatattgtctcgatctcatttttttttttcccaattcattattttcccaacgtggattccaatgttttctaatgaacgagccattggatttcttttattagattaaaataaaatatgagatatttactttgtaaggttataacgctattgtaatttttaggcttacgtagggttcctagccagaaattttaaaacttttgataacactttcttaatcttaaaatatgtaaaatattaatgattttgactgtaattctattgttaggtttactgacaatatgcaatatgcggttatggatccggatggtgacgaatgagtatattgatattactagcacaaaccacttaacatacaatttgtagtcgattttcttacggtaatttggaattatatatattaaaaaaataagatatactaagaattatgagtaaaataaaataaaaagaggaagatggctaaccttgcgagtgagggagacatcaggagagggaaaatcggtgaagcatgtgtcatgttgaccccaagttgatcccatcaccggcaagcatttgcatcgaggcgttggtttccgatgatcaaacgacattgaatccactctcatccccgtgatcaacggtcctcccggtgttcccggtgtccccggcgttggaggagccatcaccattaccgcacccacctcagcctccggtggagccatttccaacgtttttttttttggttttttttttggtttttgtttaaaataaaagtactaaattctaatttttttttgtttttttttggtgaggggaaataaattgatagagacgaaatttacatgatttgaaatttttataaatttgtgtttacacttgtgttttaaacttcgccagtaccggtttcaccaaacacaagttaaaactagagagatcaataaatgagaaaactcatcaatcgatcaaaaactttttttttgtttttttttttgagaagaagaaaacgaaaatggagctaggacttaaatttacatgctttgaaagatttttataaagctgttactacgttttaagaagaagaacaagaaagatagccaccttaagaaataaaaaccaaactcagaaaccgaatcttataaaaagcaaagacaacacacacatagagagatatgcctacgttaacactgaacaaagactgattctcaaagctaaggttgtgaataaaaagagaaaagaagttggaatgaagatgatgggtttggttagtctttgagcttatgttatatttatatgtgtttgtgttttatatagaaaagagattattatgcattgaacccaaaaaaatgaattataagaaaaaaaagtcaactccaatatcttattgcttttatataacagcttcattcatctactgactctctttttgagattttgttgaactgctaaagtcaccggtgcttttgtcacaggcagattcgttaccgttggatctaagtaattctctccgtgtgtgacggttaggaattgcacatgcgcggtgagggcatcactcattcgccaccccacgaccctccaataattgaatataaaatttctcttaagtctagggaagagcgtttgattcgtgtaacaatatttaaatagaaccaatttcattttttttttcatatataaaattaacttaaatttaagtgtatatcaaatatatatatatatatatatatatttatttatttaatattcttcacactgattttttttcattttatttgatattttcaattttttattattttaaagtaatatttttttatctgtacaatttgttttattattgatgcgataatatttagttaaaaataatttttgtattaaataaaaaaggaaatgacttttaattttgtgccaaaatcttaaacatcacttatattaaaacataggataggaaataggtgtttgagttaaaaaagaattatcttaactaaattttataatacaagatataactagtttagactaacttaaatgacttttttgtccaaaaaaagaaaagaaaataagagattaacttaaatgacctaaagcaatcaccttagacataagttggccctttgtgtaagtctagtgaagaagcattgaaaattgacaatattactatcaaataattgacctaaagcaattgctttagacataagttcgctttatctaaattcttttcaatgggattttcgtcgcgatgattctacaatgtaaaacaggtccaacataacttaggtccgcaatattttgcaaaactggcattcgatgacatgagtaaatctcttgtgctatttctcacgattaagattttcttagttggccaaatgaaaacgtgttagtggcttgattttttagatttgacatagttgatggcaaaaaataatggattttctgtgttaaaaaggtatttaatgctgtagaatatgaagtttaattcgaataaaagaagtttaattcaaaatatattgtgacatgatatcacattttataaatataattgattaacactacttgcaaaatgagatatcatacaaaaaacattaattacacccctttctctaataagttaacatacttaactaaatctatgatgacaaaagaatacatacaatattgtggtataccatatacacacaaatgacattgtgtcactttgcttattattctcttacattaggtaccccaaaaaaaatgcaatttgtacaatgcactctgtttttttgaacaaaataaaagatgaagatatatctctttaatttattcctatgacctccccctctttcctcgtaggttcttttctttttctttttgtgtgtacaattataccgtataatatcaaagtgaatgattattccgaaacgtggggaggagcttcgtgagttgtattatgataataaacaaaaaggagatttgtcaaaactcaaagtgattattgtttagttctattcaacataaagcaaagcaactatacttgttccattgattgtgattattggaattaaatcaaattattaattaagggtttaattttttttatcaaaaagggtttaattactttagttactttaactagacatacaaaaagagattcctcagaccgtctaaattagcctattttagggtaaatttcagacaattggaaaagtaatttagtggcagggaatgcttgctttcgaattcacctttcctcgtcttgaatcttgattgatgtaattttttccttaattattgttcattaaatgcttgctattgccagagagagaggaatcatccttcgtagagttcatttttttttttgcttgtttgattcctttcgcatgtagtacatgcaagtggaacattcgaatagaacctcgattataaaacaaataaaataatacttttatagttgtgttcataaattatggtctataatttttttatttaaaaaaactgtacatgaaggacaagtttggcagttagctccgatatagttcttagaagcaaatctagcctcaatggctgttgatatacattatcatccgagtattaaaccgataagataaaatgatttcggatatcagtgttatattgatggtttttggaaagaaaataactttttcgttggattatgatggttttgtgcttatccaaccgatggaacgcatgatatggaaactgcaaatgttcgaagaagcttaacatcactacatgcagaggtagaaacagtagtttcggtgatgaaatgtatgatcgaccaagagaagcgagaaatagttttccatacagataacttagatatggtgaaaatcgcttgcatggttgataggaagcgattcaaaacaatatgaaagagtttgattcattttctttattttgatttctgaaaatgcaaatgcaaaaacggataatctagcacggaaatattttatacaaccacattttatcatctatgtgaacaatatttttcaatattgcttttgtttgagtcaatctaatacagtatatttgttgcaaacaaaaaaaaaaactgtacatacaaattagggatttattagttttctaaaagtataacttcatccaacatgtatttttaaataaaccctttataaaaaaatgtatatcttaaaatatttttctgaaacttacaaatagttacgtttgaaacggtccttcatgtagagatcaaaactaaaccaataaatttgcgtactgttagctaatatggagtgaaatgtgtaggttaatttaattcggtcatgtaacttatgaaataaacttataaactatattccataattttttttaataaactttaatattacttatatagaaacgggtttgaacgcaacttttaaatgtatgtgtcagatagagaaaacggattcatgctttaaactgttattaatattttaaatatgtataaattaatattataacatttcacatacgtaaatgtaataaaaagtgatacttatgtaaatgtatttatcttcttcaataattgtttttctaaattttattacataatgaataaatattatgtcactacacaagttaaaaaatagatttctattttaaatgaagcttctaaaaaccaaatttcaaaattttcacatcggaaactttttttctttttcttaaagctcatatcagtcatatggaaacctattctttgacttgccaatattttaaacaagtatcttcgccgacctgtatccggtcattcgcatccatgtttagcagctagtgagctaccatgaccacttgccacttcttgccattattgatgaccaccattaacaattatagtaaatcgtctagccgaaactatagaaatatatgtcatcaatagctatatataatatataactaatccgctgattagaaatcaatcaaatgggttcaatgtcttttactgttttagagacataagaaattcatctttacctgaaaactcttttgttgttttgcaatcgaaaacaccaacctctattattaggttaattataggccatttgcaaagaaagaaaaaatgctaattaagtatgtcatacagtaatattcaatgaccatatgttattataaacccttgcatgatacattaaattatactaagatattaattgaataatggaaataattgcatgatctctgttccggatgttgttttatagtaacaatttacataagtttgaatatttttttttaaaaaaaagtaatggaataatgaaataattgcatgagctctgtttgggtgttgttttatagtaattagattggattattttttttcgttcataagtcactattggctttgttttcgtgctaagtgatttggagatatatatttttgtgatgaatttagtatatgaccaaaatctaacccaaaacaacaagagtatgactcaaaaaaactttcaagaatatttttttttttcctgttatttttttcttaaaaaatggctactacctgttataaatacaagagtaaaatcgtagggactgagtaccaaaagaaagtgctcgaagaatggttacttagaaaagaagtctaattaataagcaatgttacaaaacagtaacaaccacgcatcgaacaaaccattaactatgaatgagaagcacacgggattacaaataaaaaggaattttgaattttcatatgtcacttgaattggctagaaaaatacatcacctctatttgaggaaatatttctaatttatatgcaacgttacaacttacaaatggtaaccacgagtggaacaaaaaagttgaaatgagagaacagtagaatgaaatattattatcctgtaatttcacattcatgattgattccacttacctaaacctttgcggatataaaatttgaattagtgataaactatattttggtgcggtccataaaatagaaatccaaaagacaagtttcccataccataaaggtcgagacatacaaaagtcacttcagacataatgatgtgatgactttgtctattttctcaaccatccaaaatggccgtgagaattgagacccctcttgaccttacatcacatttattcactatttaatccaactccattcaatatgattctctattcaattattcaactcttcgttcattttccctactcgcatgcatctctgtctttttgacttagaaccaacctattggggttcctattttatcaaatcatagctttttgatcaagtatcgaattatactattttctccattttagcatcacaaaaacttgcaattttctttgctgtgatatatgaactaatgattcttaagacactaattaacaagtcaagaaatgagcctatcatttaggttgagccattctcttagagaactcacaactaaaaattacgtttaactacacatgagactatattaccgtacataaaataaagtttcgtgtatttatagtctcaaaatcactagtttctcactatactggttcatgttaatcttatagcgtgccacatgggcgcggttaactccgatcaacccgtggacctttgaacctggcccacttaaactaagaagtaagaaccatgggtgttagataatctgggaggttgttccacaaaaaaggttgatctcacaacccacaaggtgtttaaaagctaaatcaaccaggtacattgtcgtgcatgtgtgtcattaccaaaaaggccatcatgttgatggagacgagtaggacccgagatttttggtaagattccaaatgcaatcccgcgaaaaagtcgtcaaagaacagaaacatagacaaatgagaagacattagtcacacataagacatatatgcacacatctagtcaaaattgatgtgtcgtcgaaattattgagtctaaacaatacaactaatttgagtatttaaaaaaatcagcttactctctacttgttcatcaagaatagagtttggcaaacgaagaatcatttcaactattgttcaataagacaaagttagtgattatccttcaactaaaaagttagtgactatcgttcaactaaagcaaaaatgaaaaaaaaaaaatctcaatttcagaatccaaaagctagaataagaggttcaaaataaagaccaccaaatttgaaatttaatcatcgaaagagagacagacgcaactagaattgactattagcaaactaacaaacaattttacatatgtttcattcctaaataatactgttcaaagtaaaacctaatataatgtgcatggttttatatggttttagtttgtattcggattataatcaaatatcattttagtttttgttttattttaaaatgttcttctttttgttttgtgttctggtttggttcatattcaaattctgtgattcgaattgagataaacattttcatttgaaccatatcaatatatagtttggtttgattcgaatcatatcgctttctgcggatttaacaccctagagtagacactataatcttgaagatagtgtcatatagtcatatcctcccttcaagatagacaaagcaccatgttcaaaggaaactgaagagcgcaactcttttaaacaagcccatatcttccttttttttttgtcaacaagaagcccatacattcattcattcaaaaaaaaaaaaagggaaaagaagcccataagctcactttcaaggaaacttcacaatggtgttttgggctttctcttcctgactttagtttcaaacttcagttttttttagcttattacagttatttctcctagaaaggcctttgattgctgtgttactgtatcttgaaggaattgagaatcagaacctttgaaattgcactacaagtcacataaactttgcttcatattcacaatgacatgcttctgctttaagctttactttacattacattgacatgaacagaacttctctttctctctaagatttcaagacaaaacaacaatcaaaattacatttcctaggaaatgttgatgaatgataattagacaaaatgttatttcctgcttctattcacaaaacaaaacaagagtatttacatggttattcttcttgctggttttccaagaaactcctaaatgcacaccaactttacagtgtcgttcacgcagccttaccacactacaacaaaaaccatcgacaccgataactcacactcctttaccgcaaccgaggaaactcaatgatggtatttcctttataagagtatccgctacttgagcagccgaaggtcttagagatagcttgctactgatacagaccgcagcaacactcaacattgtcttgacctcatcgatatcaagactatcccttaacaacctcgggtccaagaactgtctgaccttgtcctctgaaatgtctacactcgaatccaaaatctcattcataagtggagcagctatatgcaccagcatctcacctctctcagcagaaaacgcttcttttcctgaaaccaactcaagaaccacaactccaaacccatacatatccatcttcttcgaagcaatcccggttcttaaataatgagggtctgtgtaacctggagatcccaccatcttcacttgtctagatctaggcgacatcgtaggaggctgaaccatcgaagagaacccgactttagctgacccgaaatcgcaaagcttgcaatcaaagtttttgtctagaagaacgttggaagatttgatgtccccgtgcactatctgcgggctacatttctcatgaatatgttcaatagcttgaactaactgtaacgcaatcgctacacggttcctccattgcaagacttgcttgctattgctttggagcttctcttgtagatttccttgaggaagatactcaagaagaagagcaccattttcctctgaaatacaaagaagcagaacataagtctatatgcaaatatatcaaacaacttgataaaacaaataaagatcaaaactttgattaagacaaacttaatcactaaaattggcttaatcaagacaacaacacaattgaccagacaccaaatatttgcagaatctatgagatttcagaagtagtacctgaatcatcgaaatagccaagaagcttgacaatgttaggatgttgaagacgaagcaaaatatcaagctcaagtctaaagacttgataaagacggtgactactaacatgaaccttgagagccgctttatcagagccagagaagcgagccatgtagatactgctatagccaccagaaccaatcaatctagagaaattggaagtgagagtttcaacatcatcccagctgttataacaagtcacaccagatccttgacttgtgggtttgtcggtgatcgtcttggagacatcaaatctaacacaattcaagaaacaagccattataaaaacagagcaaaaacagagcagaacagagcaaagcaaagaaagattgagtctttatttgattctagggttaagattgatagaagaaaatgggtttgattagggttttgtaaaaaatgtaacagcagacagaggaagaacaaggggatcgaagaaagttatggatttggagacattgagattgttggatttgtaaagaaagaagaaggaaaggttttagactttggattgggaggcagagtttgaccgattatttaataataaagctgccattttcgatgaatgaaaccttccttcgaagtagctagctctctgacgttctaactactactcttctttcaagttttgtctctttgctttttggggctaagcaaaacatttaacacatttgtttttgcttttcaatcagggaaaagcagtagaaaatagttaaatatgaaaagcgattattaatgtcacgtccttcatatatgacaattttgtttttattattttttccgaaactaaaactcgctcattttaaagtaagaatgtatttattttgaaatgagaaagtatattagggtatcttcgacaagaaccctaactttaaaagtgacacatcttcaaaataagagtttgagagtcacttgttctaatagtgcatcctcaaatccatttatttgcattttgtataatggttttcaatattaataattaattataatgagaaactttcataaatatttataaatcattatgtgatataataattttcttaaaaagtgatatgataacataaaattacatatctataattataaacgaaacataaaatatatcataaaattatatctaaaataccaaatcatatatataactagtatttccgcagagcccacataaatttgctcaatgtaaatagtttttaatgttatgtaatattcttatacattactaattttaattctaatctactgtatttattagaatttatatgtgataattgaatttaaaaggatatatttgaaataattaaatataatataattatttgtaaaatacgtaagttatttgaactaaatatatatatatatataagatttctaaggttttgaatagtgcctcaatttgagagtgtacatttcaacggctatgaactctccatgattgcatacttgacatgcggtggtcggtggataaggcaaaatatatatatttaaccatcttgagagagccatagagcccatatatatgaagaacaataacatattttgtttaagcagattttcgtgtagattcattcatatacataatttgaaatgttttaagaaaggccttcatcactcgttacagatatatccaatatacagcataaatatgcatacgaaggtgtttaaaatttaaacccaaataactttgctatccaaattaatgttcactttataaaattgtggatttcttcaaaaattgttgggaaaacgaaagaaataaaccgtttgttttttaatctagagtattttttatttactaatctgatgaataattttacaaatctttaggttcagtttttgggaaccttctaaatttttttgtaccatattttaaatttcacacggtcggagaagaatcattgtcccaatagttttcatttctcttttaaaaatatactaaatattttaaataatgtcgtcaaatcataatcgttagatcttctgtcgctttctttgtctttttcttcagagaaaacgtgaaagatgctattatagaccaagtaacatactccataaaccctaccaaacaccgacagtctagtcttaaattaaatctcacacacacatacaataaacaaataggtttgatgccaaaaatacataaacaaagagtttattgtgactgggtcaagcattaggcttaataattgtgggtctaaaggttagccctggcccgatatgtgatgtgaaataagcaaatttgtttttgaccttgcatccacaattcaaatgcattattttccatattagaaccttagcttaatgcaacatgtgcataaagatttcgaattggaacaaacatataagagcaaaatacttaaaactcaacacctaatgcgatggaacgaactaccaaagattgacagcaaaaactgccaaaaccaactcatggtggtatagtgaaagatgtatcctaaggttggagattaaggtttaatcactacgatatcaacatgtttgcaattcgccatggcacatgatgaggcaatagagaatctagttatccactcgaaatataatgtcaacgataaattcagctatactctgaagagatgctaacacgcgttactagtagttctcatatatacttggtcaccatagccatcttaaatgacattccaaatggatattttatatcaatagaagatagtcttcatttgctaaaagcaaagaacgaaacataccgaaatagatctgttttggagaagtaagaatcaacagcatatagaatagataagcgagagagagaaagagatatgaggttgggtaagtatagaacctaagatccacatttagcatgacactatactcttagaaacacaccattttcaagactaagttatgtacttatttcctattgactttcattaaactacacatgtgcttggtgagcatatgattctaatttcaacttatatgtttgctctttttgaactacttccaagactacacaaataatgaaataaagaactagttgaggaaaatattatagataaatacttaagcttgggtggaactggcaaggaacttctgcaatgacacattgtatgattcaatttgtatcatacagccttagaaccttacaagttacaagcatcaaataagttgaccttaacttgtcgaatttgagaacgaatagtgtataagaagtgcaaagagacgtatggtccaaaacagaactagtactcttttcttgttcacaaagcatctccattatactatcggtatacaacttcgctctggtgtatctccattatacgtaaacaagtttttttttttatgacagactaaaccatacgagcaagagagtagaagaacaagaaattcgttataggatctttgttggacagtcagacgagtttagataggaattacaatcctattatataaatgtagacatcttagaatctcaaatcctcaagaaaagttgagttcgcatgttgatgaagcttgggaagaaagtctcaactccgttatcatctcgagttttgtaaacaaacgtgtatcagatttgattgttgcagtccttaagcggcaagcgtttttcaagatgtaaaccgcaatatctctgtcttgtggtcttcctaagtatttaaaccaagtgaatttttgtagactcgacaacatgcattcaggaacaatactcggttgattccaggaaagcataccaagattctcatgatcctgagatcaagcagaagaattagtttttaaagaacaaaataatgtaatagttaatggaagaaacttacatccgtttcggagacgagcattagttctcgtaagttaggagagtttttgaggaaccagacgaggagattcgaagaatacttgttccatagcgttagttcctcaaggtggttgaagataaaaccttcaccgtaaccaacctgcggacgataaagaaaagtattaacagagagtttttaaaatgagattaaggacaagcagtggatggattgaaattgattacctcagaggatattgcaagccgcttgacagatgtgattgatccgatgagactcttgatatcagcgaatggaacattgatatatgcttccctcagcttaggcatattctcaatcaaaaaggtgtgactattatcattacgatccacaagttggaaagacagtaaagaaggagtatctatgacaaactcacgactagaaggtgtagagagtgataaacgttgcaaagatgggacaataacagtaagctttcccatattgtcatgatgagatagattcactactagatcttcaagaacagggcaattacatagaagccgctgaagagatccttgcttgaagtatctcacacctttcagttccaaagttttcaaagagggaagacaaaccattcgaggaacatccaagagaaccccgccatcgagtttcaagatcacgagcgatttgcaggtatataagctacttggcaatatgttttgcttctccccatagtgagaactataaatcttcagctcacgtatgtagcgagaaactgctactacaacccacattctgatatcctcaggtttaaaatgcgaatcacttaacacaagacggaaactttctataacgggagctctatgtaatggcagattcctatcaagaaaacactgtaacctcttgaattcagactctgaataacgtttactaccaaacttaagtttagtcaaccacatccaaagaaactcccatcgtttcgacaaaatgctcgttgacacagcaactttagtcggaacaaacgacagtatcttaaccagtacttcatcaggtaacccactgattctgtccatagtcttacaacaaccaagaaaatgtcaccgaccctgaaaaagaatacacaataaagactcaaaggatttgtctcaagcataccaaacaagtgaaaacagaagaacaagagacaaaccctagaaagaagctctggtttgttaggtgatgagtcttgtccagtgaaattcagtggaggctcgatttatttgtaccggaaccggaatcagaaggttaatcaaaagcgcctgaagaactctgcggaagcatttctggaaactctacaactctgaaatcgagaaaaggagaaaatagaagaaggaatcagaatttgtagcgacactacacttaactactggctttagggattcattgatacctatatgggcctagagaagtgtttgatacgtaagtgggttgggcctctttttcaagaatcctacaaaggaatctttggtaataataatggctatcattttgatgcctggcacaacgaggcagtagctatcagctccatactttgtaaattcatgctagttaaccaggtaagtgtcaatatttcagaatcttttttcacgattgactttaggtctgagcgtggtatactgatacggtgtatttggctttggaagagactgtgagaaaagataaatgagattttggaacctctgcaatatatctttgacacattgtatgatacaatttgtatcatagagccttagaccctcacaagttctaagaatcaaataagattaacattatgttgtcaaacttaggtctaagcaacaagattgtatatctcctagttataaactagtcttaaagttttcagagatggaagagaaaccactgcaagtaggtaagacattcattacctgatctttgttgggcaatcagacgagtctagatggaacttatagaatcctattatataaatgaaaacatttaatgattcaaaacctcaataaaagataagctcgcatgttgttgaagctcgggaagaacgtgtcaactccgttatcatctcgagttttgtaaacaaacgtgtatcagaatcgattgttgcagtgcttaagcgacaagcgtttttcaagatgtaaaccgcaatatctgtgtcttctggtcttcctaaatattctgtccaggtgaacttttgtagactcgacaacatgcattcaggaacagtactcggttgatcccataaaaacagaccaaaattctgatgatgatcctgaagtcaagcagaagaattagatttgaacaacaaaataatgtacaaaagaaaacaagttaaacgaaggaacttacattcatttcagagaggcagcttagttcacgtaagttaggagagtctttgaggacctggacaaggacattccacggataatcatcccatacaggtagcgtcagatgctcaaggtggttgaaaataaaaccgtcaccaaacatagcctgcgaacgaataaaaaaaaagtataaacagagaatttaaagagcaagatcaaagatagattgaaactgattaccttagaggatattgttagatacttgacagaagtgattgatccgatgagactctgaagatcagtggatctaacatcgacgtatgctaccgttagcttaggcatattctcgatcaaacatgggtgactatcataattacgatcctcaagtttgaaatactctaaagaaggagtatctatgacaaactcatctacatcacaagtataacctatatagagtgacaaacgatgcaaagatgggacaataatagtcaactttagagtattgtcatgatgatataaattcacaactagatcttcaagaacagggcaattagatagaagccgctgaagagatgcgtcactgaagactctcacacctttaagttccaaagttctcagagagggaagacaaaccatcggaggaacatccaagataatcccaccatcgagtttcaagatcacgagagacttgcaggtatacaagctacttggcaatatgtgttgcttctctggacagtaaatctccagctcacgtacgtagcgagaaacaactactacaacccacattctgatatcttcagggttaaaatataaaccactaagctcaagacggaagctttctataactggagctctatgtaatggcagatttctatcaagaaaacactgtaaactcttgaattcagactctgaataaagttcatcaccaaactcaagtttcgtcaaccacatccaaagaaactcccatcgtttcgacaagatactagttgatacagcaactttagtcggagctaacgacattatcttaaccagtatttcatcaggtaacccactgattctgtccatatctttacaaaaatcaagaaaacacaataaatacttaggatttgtctcaagccaaccaaacaagaaaaaaaacacagaagaacaggagacaaaccctagaaagctctggattgttatgtaatgagactatttcagtaaattctcaatttttccgcctctgaaccggaatcataagggtaaatcaaaaccgcctcaagaactgcggaagatttttggaaactctatgattctgctgaataaaaaaattaagggaaaaaaaggtttaggaatactgtctttcttgtcttttaagaatactgtcttattttttaacactatcatcttcaagatgttcatagtgatacaagatatggaattacatatcagagaaggaaaccaaagactcgagatccttcttaaaattgtttcctatgttttcctttttagatttggtattttaacataattatgcttagagtcggttgtaagggtttctctataaaaggagactcaaacaatgaataaaattaacttccaagaattaaccttaatctccaagagagcttagggttaagaggaagcttatctttcaatctcttgttcttaagctttagcaacgggtcccttaacaagagctaaggctaaaacattggctcataacacatagtttctttttaatcacaggatgtgaattttgtggcctacgaaaacaaaaatttatgaattgcaaaaaaaagaaaagaaaagtgattttaacaaatgagacctgtgatcatcagtgttcctattgtgtttatgaagttcccaacagccatcactaccagaagaatgccacaaaccatcatttgaaaagcgacaacatttattttactttacttcctattttttagtctctgttcactattgaattaggatttgtcggcctataccgggaataaacccgttgaaaacaatgccaaaagagtgaaaataatatacctgccattcattaacaactccagttactgtttttcttagcaacagcagtccaacgtatgcttcaaacacctgagttttagcaacaaattgttaagcccaataagttaaacagaaaacctcaagactattgtggaaaaagcaaagaggttctactatacaagccatctaagagatctcattacatcagataatctattaaatatattgactttcaaatatatacatagaaatgttcacagttgttaaaaagaaggaagacattaaacgctttaaaatgtttaagcataaacttgattcatatatttacacaaaaaaaaaagctcacctgtaatatgaatagcatacataagagccatagttgtccgccaacgccagctgtttctccccatacaacatacattctcttagcctgaattttaaccacaaggcacactttagagctattttacaaaagcgaatacaagtttggaccgaagaatagaattgcacataataaggcacctttcctagtgcaatgcgagtgtataatctttggcgttgatatctgttttatagaagcatggcgacacctcttgcatcatagcccattgtaggaaaagatggactcctctctgtcgaggattgaacttcatcatggcatttactatgtgaacttttaatctgcacaaaaaagaaataactctgatcattacctgtttctggacacagtttggttgacctttgctttcccaagtgaggctgacaagggccagagccatggcacaatagtgatgatatagccacctgcaaaaccaaatcaagttcagagtttaattcactcccaacagatgagataagccaaacgaaacaccactacatgaatacatatatagagatatccactgcataataataacaatactaaacacccccaaccattgaggactccgtggaagctaaagttctctaatcctaatcatgaaatacttgacaaaaccatatatgtgtatgctaaagttctctatgtgtatgcttctatgccaaaatgaaagagaccctttagagggaaaaatccaaatgtttgccaatcaccatgccacatgatgatgcatttgatattttacaacattcaatagtcatcatttgctaactgcaaagcatgtgcgttgtggatatagaactcaagatccacacagtaacatgacacaacacttagaaacccaatattctctagacttaggtacgtcctatgacttccataaaactacagatgtgcttggtcgagcataggacagacgttcaacatatagcatgacgcatcactctgagatacacacatacaatgaaataacattctatggccttcactagcgacgcatgagacacaaagaacactccaaattcaaagaacttgacaacacgagcaaagaaaaacttaagagatcataacagtcataatcgaacgatgaggaaacatataagagtaccatggacgaatattgctccccttagctcttaatatgttctctagcatagctaacccagcatagagaaacaacagccaagcctagtaaaaaggataaaaaaattacattttaaagcaacccaaatcatactcaattatctcgtagagctggagaggagatgcaggcaaacatccaccccaataataagatctaaggtttaataatgtttcagggggaaaaaaaaaaggaaaagaagagcagtcttgtcttgtcctgttccatggcaacaagaaaaacaaccacacttagataactctgaaaacatgaaattgacattaaaggacacatgcaagcaaaaaaaagtaccaactcttaagctattgtattcttctttttaactttgagctgaacatctttacgcaacgctcaaacttttctgtctgacatacaaggtatatctccattatacataaacaagctttctgtcgaaaacgagttttaagagatggaaaagaaaccatacaagtaggagagtaaaagaacaagacattcatgatctgatctttgctggacaatcagacgagtctagatggaaactagaccctatttataaatgaaaacatcttaaaactcaaatcctcaagaaaagttgagttcacatgttgttgaagctcgggaagaacgagtcaattcctttatcatcttgagttctggaaccaaacatgtataagaatcgattgttgcattccttaagcaacaagcgtttttcaagatgtaaaccgcaatatctctgtcttgtgttcttcctaagtactgcgaccaggtgaacttttgtagactcgacaacaagcattcgggaacaatactcggttgattccagggaaacatacgcatattctcataactctgagatcaagagaagaatcagatttttttttttaaacataatgtgcaataaataagaaataatagctaatagaagaaacatacgtcatctagttcagagaagtactctagttcttgtaagttaggagagtctttgaggaactgggaaaggagattcgacgggttctcttccaatacatgtagtgtcagacgctcaaggcggttgaagatataaccgtcaccaaacatagcctgcggacgaataagaaaagtgttaacagagaatttagaaagcaagatcaaagatagattgaaactgattaccttagaggatattataagccgcttgacagaagtgattgatccaatgagactctggagatcagtggatctaacatcgacatatgcttccgtcagcttaggcatattctcaatcaaacatgggtgactatcataattacgatccacaagtttgaaatactctaaagaaggagtatctatgacaaactcatctaaaacacgcttataacctatatagagtgataaacgttgcaaagatgggacaataacaatgaactttcccatattgtcatgatgacataaattcactactagatcttcaagaacagggcaattagatagaagtcgctgaagagattcttgtttgaagtagttcacacctttaagtaccaaagttttcagagaaggaagacaaaccattcgaggaacatccatgagaatcccgccattgagcttcaaaatcacgagtgacttgcaggtatacaagctacttggcaatatgttttgcttatcctgatagcaagaactataaatctccagctcacgtacatagcgagaaagaactactacaacccacattctgatatcttcaggtttcaaaaccgaattacttagcttatgacagaagctttctataaccggagctctatgtaatgacagattcctatccagaaaacacttgaattcagactctgaataaagtttaccaccaaactcaagtttagtcaaccacatccaaagaaactcccatcgtttcgacaaaatgctagttgagacagcaactttagtcggagcaaacgacagtatcttaaccagtacttcgtcaggtaacccactgattctatccatatctttaaaacaatcaagaaaatgtcaccgatcctgaaaaaggaaacacaagaaaacacgcaataaagacgaattgtctcaagcgaaccaaacacaaccgcacagaggaaccctacaaagctctggactgttatttccagtgaaatccagtaaagtctcaatttttccgcctctgaaccggaatcagaagataaatcaaaagcgcccgaagaactgcggaagcatttctaaaaactctacaattctgaatcgagaaagggagaaagaagaagaagaagaagaaaggtatcagagcttcgttgtgacacactgacacagtgacacaacacttgactgggttttggaagtgtttgatacccaagtgggcctgggattgggcctagctcttcttgtttaaggatacttattttaacactatcatcttcaagatctgacacttaaaaaattcctacaaaacccagtcaagtgtacaaatacaacatcaattatcaaatatcaactgccacttccatttacacagaaaaaggatggtcacagttttattttatccgtggcctaaaaacaaaaaggacaaaaatttatgaactgcaaaaaaagcaagattttgaacagatgagagacctgtgaagtctaattaagctctgctctgcttttacttctcttcatctttgccttaactcttgactttgccatcagtgtctctactgtatttatgaagttcccaactgccatcactaccagaagaatcccacaaaccatcacctgaaagcgacaacattcctcttactctacttcctatttttttagtctttattctctattgaatcaggatttgtcggcctataccgggaatagacccgttgaaaacaatgccacgagagtgagaaaaatatacctgccattcattaacaactccagttactgtttttcttagcaacagcagtccaacgtatgcttcaaacacctgagttttagcaaagttacaaacagaaaacctcaacattaccagcatgaacacgtgcaaagtttctttttgattgttgtggaaagagcaaagaggttctactgtacaggccatctagagaattttgaatgggaaatattgacttccgaatttatacttgcgacaatacataatctatagttttgaatgagtttctttgcctctccaaagccatggaaacacagtagttaaaaagaacgaagtgattaaaatatcagtaaaccactctagcatggtgccacggtagagcaaatgaaacgcgttaaaatgttttagcataaacttgattcatctatgtacagaaaaaagctcacctgtaaaatgaacagtataggacataacagccatagttgtccatcaactccagccgtttctccccaaacaacatccattctcttagcctaaaacataaaccacaacgcaaactttacaaaaacaaatagaattttgaactgaagagaaaaagtgcacatgacataagaaggcacctttcctagtgcaatgcgagtgtataatctttggcgttgatatctgttttgtaaaagcatggcgacaccttgcatcatagcccattgtaggaaaagatggactcctctctgcagaattgaagtcatatataatatttactttgtgaactttttagtcttcataaacagatataagtctaagcattacctgtttctggacacagtttggttgacctttgatttcccatgtgaggctgacaagggccatagccatggcacaataatgatgatatagccacctgaagacccacatcaggttcagaggttaaagtcaccccaacttatgagaatatttcgaacaaaaaaagccaaacaaaacacctaagtcaatccagataaagagattctctccgaattcaaacccccacagaaagaggattccgcagatgctaaagctccctatatttacccatgaaatattcagatatctaatttctacttgaccaaatgattaaccaatatactaagtgtactctgaagaggtaccaacaacattactgtcaaaactaagttatgtcccctgactttcaccaagcaacacatgcttggtaaatataggaacaacaacattatcatggcgcatctatatctatctcggaaaattatgccctataactttatatatatagtgtaacagatgcactgagaacattcccaatttaccaagagcaaagagaaacttaagagaccataacagttataatcgactgaggaaaagtaccatggatgatatccacataagaacccttttatttttgggcaaagttgaatatagaacctaagatccacatactgtaggttgtagcgtgacacaacactcttagaaacacaatagtttccacactaaattatgccctatgactctcattaaagttcacatgtgcttggtgagcataggaccagaatgacacatcactccggacttaaattttatgtcatatggccttcactagcaacacctgccctcagttaacaggtccttaaatcaaaactaccacaacacaagaacactcccaaattcaaagcaaccaacagtaatagcaatgagaaacttaagtgatcataacagtcataaccgaacgaggagggaacgcataaaagtaccatggacgaatatcgcttccgttagctcttaatatattctcacgcatagccaacccagcatagagaaacaacagccaagcctagtaaaaagataaagattcacactttcatctcaagaacctccaacacatacaatgttcaaacaacccaaaaccaaactcttaaatacctcatagagctggacaggaaacgcaggcaaacatccaccccaataataagacctaaggattaaaagtgtggcagggaaaaaaagaaaaagaagagcagtcttgtcctgttccatgaccaaaaacaagactcatcaggacacaaaatcaacactgaagaacacatgcaagcaaaaaaaaatactaactctgtaacgattgtattcttctttaactttaagctgaacatctttacgcaaagctcgaacattcacaggtccacaaaacattctcacaaagcgtcctgctttcactcaaataggtcaatcaaaaaccaaaactgaatccaagattagacttttgaagtgagcatagaagaaaccttgtggtttggatgggagaaatgaagatgtttctccgtcaacaagcatgcatctagcacgatgcagatcttcctcaagctaaaaaatagatgagaaatttcaataattgatgaaacgaaatcagaggaagagataagagatttaagaagacaatgccttttcgacgagcttaggatcgagatttttgttggagacgatagtagagtggagacgacggatagaggaatcaacggcggaggctttttgacggagagagagctcttgttgagaagaagatgagatgaaagaagcggcggagtcatgaagctctttgacctcatctatgatttgtttaacttcttcttcaacttccattgatggttgatgattgcgaagacgagatcggatttagttatctttgtggagatgaagaaaacagaatttgattgaaactggtttgttctggaaaacgcaacaacaagaaatgtttttttttttttttgttagtgtttgcgtttgagatcaatcacacgcttgttcacacaatcacacccacacatttttttatacaatttagtcaaatatatttgtgcgttcactttcatagtgttgttgtttagtttattaaagcccaaaaagctaaagattattttaacatttgattcaacaccaaaagaaaaatctcaaaggtgagtgaaacaagttatagagcatcgagcaagggtccatagcctattgcagctgctttctagttcaacacttgttcttgctcttgtgtttgtggtgttgatgggaccatggaatctgtttgatctcaaaacaatgattttaagacgctgcaaagccttcagctagaaagggaaagtgttgttgatgtgatttccttctacattaagaaactttaggcttgtgcagtttactagagatcttggaagcttcccacttatttggttgttgccaacatcaagtagtactaagccattttccatgtcggaaagtatcctggtgaggttgttgttacaatgttttcaacgttgtagcatattacaagcatcttggaattgaaccattgaagttgttgtttgatagatcaaggagagtcagtcaaactgctttgtagaatgtaagagggatgctagtgaagttattatttgatgcagctattatgtgggtgttaggtagaataataggaaaatatccttgaaaggcgtttgaactcatatctaactctgaaattaacgaattaaagattatttttggcgtaccttccaaggaaacgatggagttgtgagagagatttacatggaccatagaagacagattacattacaactcgggcactcttcctttaattctattcttggaaatgtctaaccaccataatacttgtaagtccttgatatacatggggaactcggtgatgttgcagctcgacaaaagtagatgtgtcaaatttttctgaaccggtaccaaccattgacacactatttccggaaagatctaaatagtctagagaccggtaccagctcggtctttgttttttcatatatatcatataattataaaaactacaaaggaggagatatgtatatactcttttttgggtatcaaaagaaattcatatactgcgcttaatgatttataacaatggtacgggccaatcatactagcttgactcggcaattgtgcaagtcttgcgtttatgtatcgagtaccgaccacatatttgttccacactaacacggacacacgaggactaattaattatgttattggagactttggagtggacttgtttcacaaataatttaactagacgtcgttcttacttcttacgtccactgatatcgaaatcggtttgttctggagaacgcaagaagaacagtaatatatttaagtgttggttcaatttcaatttttcagaaataggtttaaattaaaaaaaattgttaacttataaattacgttaaaaatgttgtctaaacctaatagtcattaaacatgattgaaaaagaaaaaaaaataaaataaaaaatcagaatctgcgtaaagtaaaaaaaacacaacaacaacaaaagagtgaagagttcctagagagttggaacactagttgttgttgttgttgttgttgttgttgttcttgtcagaaggttgaccagtccaataagttttaacagcaacaagaatcttctcaggattaaaaggacctttctcatgatcaacaatttgactcttccacttcattcccttcactatcttctctaccttattcaacgtctccacattatctctcaacacaactgttccttctggtctcaaaattcgatccatctccaacaatatcaacgtcaaatcacaccttaaaacatacacaaagaacattccattagtcgcgtttcacggatatagttttgagttggaagaccatgaaactttacctatgttcgtataagctgaacaatcctcctgcatgaatcatatcataagttcttggatacgttgagaatccttcacaccaatcttgatacgtccctatcaatccacgttcgtagatcacacctaacgtttgtttctctgcatcgaccgggacaacgttcatgacccatgagggatatttcagcatggaagcagcgaatccgccgagaaaagcgttcatgtccataatgttcctgaatcttccatgtgaaagctcagggactatcttcttgtaatgtgctattctctctttccaaacctcgttgtcttctctaaatttctccgcgttcatttctggtatagttcctctgatgattcttggaggtaccgcgaatgctcggtctggccaatcctcgagtgcaccgcctgctgaatcatctggattgtttgtttctggtaatggtgttatacaagtttccaagtctttgtacctaaaacagagaaaaccaagttttgacattgttctttcacaaagttaagactacattttcgagatgtaaattagtattaccaagcggaatccgcgttatctgagctgcatatcggaggtgacttattgttttgtttgagctttttacactcaatgtgattgagaggcttttgccaaattgataagtcacctttttcagttactttcttccagcaaagactctttgctacatcttctattgaatcttgctctttcttcaaatcctcctctgttctctcccaccctctccagtactgtttccagttaatcggtggtcccgagaggatccagtaaccgcccggtcttaaaacccggtcgacctccataaggtacaaaccatctacaaaagatttcagtgttatgtttcttcctcagctatgaacagaaacagagtcaaatcattaccatttttaaaccaagggatcaaacaacgagaacaatgagcaagatcaaaagctctagctggataaggaagtcttcttgatcccataatcccgattatcgcaggaactccgcgttctaaagcaaactgtacctgagcttcatgagtgtctcttggagcaaaagacacagccataatgtctctcttcaagaggtaagcaccaaaacttgcaacctaatataaaaaacagatattgaatcaaacaatgatcaaaaagaagtgtatacgtatactcttacaatgaaacacttacaccacatccagtgtcaatagctgttctgattccaccatcagtaagaggaataagcctagcaatatcatcgatataagcatcagctccacgaggaaacatagtaccaccaccagggaatctaaagcggtcaccttcaacttgaatccagttttgaactgctttctcaacactaagttccttgtgagggatattgtcataccaagcatagtctctactttgtggccatttaaatggaatcttgtagtttggtggaggaggaatcaaacaataaagaagctcatcttttacaggacaatgtctttctctatatttcatcatgttcctatcgaatcttcttcctctttgtcggtcttcacaaggagtgtactcactgagagataattcacatggttcaaagtacttaatggtttggtttgtttcctttaactcaatctgattatggcttttgaaatctagttcagctgactctgaagatgaggaagaggaagaggacgaagaagggtttgattgcgtctcgcatccgagcttcgagatagaagatgggacggtattggcttgccatgcacctaaaacatagaacaaaatgcagagtccacttacaccaagaatcaaagttagtttctttcttcttgcttctgtttggtgatgatgaccactgttctctttcgccattcttgagtgcaaagactgaatctttatctaagatagagactgagacagaaacaaaaaagaggcaaaatcaaatcctctttagatggtcatagtggattttttgttaaggaatgtcaaatgtgaatcataatgttagaagatttattgaacaagatagaaacataaacaaaaataaggtaaaaaaaaaaagagatttgtctctaattctatagagaaaaaagagctaagaacagttacttagagagaaaataggagtattgaccaagaacaacctcactttcttctatagactcctttaaactcgttttaccatatgtatacaaacaaacattgccatgttgaattaaatgaaaaccttatatatgcatatacatttatgaatggacattcaataatcaatctcaagatttgcttacttttttccatgttgagatgatagagtaataaataggctatatttttctagagaaaatttttgtattctaaaaggaatgttgattagtgatattgacgccctaaaaaaaaatgttcaaacgatttatctatgtaacaaataactccacgcattacatatattatagaattggaagtgtcaaatttatggagtgtagtgtttaccttgaaggcaaaggcagtttttggagtcttatggatccaaaaccatcataacctggtccccatttattaggatttttatgtgtggagtctcttcttcttctccttataaagtataagcaaaaccatcactagatgagtggagaaaatcttgttggagaaaatcaaggtaaagatgctgaatggcaatattctagtaaccggtttcttattggatcaattctaaggccttacaagttttgttgttgcataaatcaaaccattcttgggtttacttcaagtaatctcattaatggcttctcttagtttttgtttcttcttatcattcaaatgtttaggatctaagcttttacaagcttaagtagaatcaattggaacaggtcaaaatatggttttaagcacagaatatggtttaactctatcaatcatatagcatataacagtttaatagagttaaaaagatgtctccaaaacttctgtaagaagagagtaaataaaagaccaaacatgaacggataatgaatttgcattcatcaatgattcaaaaggaaaaacaaaactacaaatccataagaaagatgtaaaacaaaaagctacgataatatcactgcttcaccatataaaatctaatatagaactttcaatagcgaacttcattcctcgactgcgatcttgcctttctcgctcacatagataccatcaagaaacttcctgatatccttcttcttcacatgacatttctattcaaagatcaaaaccatcatcaataagagagcatttacaaagtcaaagtttgcagctttagtttgcaaagcacactcaaaccaatcacaaataagattcacaccattacacacatttttccgtagtatctataacattttaaagaaacccatctggtacatttaccattatttcattctcaatgcacgaattcataacattaaggcttaaaacagaacaagtaataagaaacaaagacaaagcctatagctttattaagcaaaacatgacgatacaatcaaaaccatcacagattagcatgacaacaacatttcctagaaacccatctgataaaatttaccatttttaagtttcaatgcaagatttcataacacttaatctttcaaacagaacaagcaagaggaaacatagacaaagtctgcagctttatcatgcaaaacaacctcatcacaatttagcaccaagacaacaacatttccaagtaaccaatctaataaagttaccaaattttcattctcaatacaagatttcataactcataaaccttaaaacagaacaaccaacaaagaaagtacctgattgatcaaagcacaagaccgtgaaacaagctcaatatcatttccctcaagaataatctcatccttaaccttctcagatcgaacaatcttaacaccatccaacatctcaaccttcctcacctgttaattcacacaaaacacatcactcacaaatccaacaacagaacaccaaaactgaaacaaaaatcaaacacacaagagacaaaacacgaaccttcttctcaccaaggaagttacgaatctcaatactcttattgttaccatcaatagaagcattgataggaaaatgagcatacacaaatctcattctataaagaaaaccttgagtaacaccagcaatgagattatcaacatggcttaaagcagttctaatcgaagcacttgtcttacgagaaccaaaccaagaatcaatcttaagctgacgttttccagtgacttggtctttaatcaactggaaatcgagattcagatgcttgaagtcacgagtgagtttacctcgtggaccttcgacctcaatcaccttggcgtttaccttaatggcgacgccgtcggggatgtccatagtctccgaggacaaaatggtcttcattttttcgtctctgagggggaactttggagacgacggcttgaggtttagggtaacggagtttaagggtacagagagaagaaaaccctaaagcttatatataggtcgtctctaggttttgtttttggttttaatcttaaaaacaactcttttaaaaatcatttcattttttcttttaattttaattttataaatttttgtattcattaaaatagtaaaggataacttattttattaaattttcaaattgaaaatacaaattcattataccaaaattgaaaatgcaaattattacaaaaacaaaaggagaaaatcccctaaaaaagactttttaagtgtcaaccatttgcattttaaacttttaaggatttggactcgtataataaattagaacaattataggataatctaaatccctaaaccaaaaaaaaagaatttgcattataaatactaaggtagttttgataattaattttctgtgttaatatatagaaaacgataagacaaacactagtgtttgaagtttgattggtaaccctgtaccatacgtaaaacataaaaatattaaaattgctaatctcgatttaaaattccaaaaacgtgtaaaaaacccatcatctattatcgtgcatttattttatttcaaactcatttagttactaatacagtattagtaatactataaatgacttattttcattttttacgcactatgatgcgatatcttaattatattggttaatcgtttcagttttgcaatctattgtatcacgctttaatgctattataaaacaaacacgacattttcttatgtctaaaaaatatacacatcattttttataaatcaaaatataataataattatttgataacagatgtttagaattttgacgatactatagacgagtgtgttttcggttaatagtttagaagttttaaatagaccgactagtacttaaaatttttaatcacttaaatcttagttaaggttttcttattaataatataattgaaggttatcaaataaatctgccgatacttgagggattttaaatcccttataaatcctaatgtagcttttataattatttttctgtgttaatatattgaaaacgataaaacaaacactagtgtttgattggtaaccctttaccataggtaccaccttggcaactctcattttttttttttttttgtaccactttttttacaacaacgtacaaattttttgtataagtttatgatgttactaaaattggatcctatagttccatgatttataaaaatttgaatattaataatatataaaaatttataaaaagtttaaaagtattagttttaatatgaatactaaaattaaaattttatcgaataaattagtctcccaaattttttatatgattttctaaccctatgcatggagaacaaatcaatggacgactgcttacaacccacttaattccattaaaaactcaatggtagttagtagtttactaaagataagccattgttctcgtgacgctaaaaaaaaaatcgacggattattgaatttttcatcggtaatccataaaggattcaaaatgtgatatgattcggtaataaccttttttgtaccattagttttttttcaaatgtattaaaaaactagttgatattttttctgagcgtgtacaaatacttttcctcgtcataaggccaaaccctgcttctaactaaaacaacttaacaatggtaaggaaataaaacacaagccatcacgagatttgaaaacaaaaaagctgcgtactttgcttacataacattatcatctcaatttctacatattccttaatttccgtaatttaagatttctttttttgtttaaattgtttgttaggttagtctcttgtttactcatcatgtcacaatgtgtctgagcttctcctatctacaaagctttcttctatctctttgactctcgctatatattccatcatatgtatatatactgaatccaattaggttgatttgacttctataagagacttaatcagatgtgtaattcgttcataataaatgatgtttacatgttttgatactgtcattggccacatacgttatctcataagagaaacaaagtgcttgtactccacttttacaaaaaaaatatcattttgacacctctcacaaattaataaagccactaaataatacaaatatgtcctttatatatataataagtgattaattatacaataatgactaaaattcaaagaaaaataggtttggattaagggtatattagaaaaaagtcacattaaaatgaacatttttttgtagaatggagagctattaactcacaatcatatgtattttagaataacaagcaatctactttggcaaaaacttttttattttattttaaagcacgtcatgttctattagttatggaaatattataagacttaacaatcataatcacatctacatacacgctcgccaggcatacccctagctaaacttggacggtcagaacattcgcaacgtatatcacgattttttggtgcgcttggaagctttttcatgtcacttacccaagaactctttccattatttccacattttccaggaaaagggtgtgtagtgttgcacccaaacttcttcatggcttcaacctctgttgtgttatcaaccacaaaaataaaatgttaagactatgaaaatatatatacaaaacagttgataacacaaaataaggaaacaagttaccttcaacatggcttagaattagaaacatgacaccacaagaaaccataaacaaaactccatatttcatgacttatagtctaaacaaatagtctctttgagcttcaaaaatttgtgttttgttttactctcatagaaagtatattaagttttctttgccaacaatcttcataattaatatactcaacaagataaaaatatatgtggctatttgttaagatttagcaacaaagaacacaacatgaagaagcttgaggaagaagaaatgccaactcagcaaaggggacacgtcaacagcaggaccacaagacaaagaaggagccgttagcgccaaccagggttatgagtcgcacgactaaagcattcttgtcttggtttggtaaagttgcacgcgggttaagcccaatccaaattggtggaaggtgacaaatttggaggcagcttggagacagctgtagaggagcttgtagaggcaaaccaagaaggatccagaagggaacctaggttaaaacctctaagtccatttaagctgaaggtggtgcttagagacagagttagaaacgtagagacattcattagagagtaaacttgtagtgagtgttcttagggaaacaatgagtgagagagagtgaatcatattggttctgtaaggggctgagagggtgagagatctctttgtaaaactcaaaggttatagtggattccgggaaagatttcccggcccagacgtagcaccgttggtgtgaactgggttaacaatctgtttgtgtgctctgtgttgttatgtttcactttcagtcacaagtcttcttatctcaaagttctgttcttgttcgatttcaagtttcttagacatcaagtcttgaaacccttagtctgtatttggtctaaacactacaaagtggtatcagaacgaaggttctttgtattggcggttcagtaaggttcttacaaacaaagaagccatgtcgtcagcaagggtagagatggagaagtttgatgggcatggagactacacattgtggaaggagaagctgatggctcacatggatctgttgggtttaacggtggctctcagggaaacacagtcggtctcagatcctctagaatctgaggaagaaggaaaagaatctgaaaaaggagataaggaagcactcatggaagagaagagacagaaagcgagaagcaccattgttttaagtgtctcagatcaagttttgcggaagagtaagaaagagaagactgcaccttctatgttggaagccctagacaaactgtacatgtctaaggcacttccaaaccgcatttatctgaaacagaagctttatagctacaagatgcaggagaacttgtctgtagaaggaaacatagacgagtttctacgtctcatagctgatctggaaaacacaaatgtgttggtttcagatgaagaccaagctattctgctactgatgtctttaccaaagcagtttgatcaactgaaggatactctaaagtatggctcagggagaacaacactatccgtcgacgaagttgttgcagccatttactcaaaggagctagagttaggctcaaataagaagagtataagaggacaagcagagggcctgtatgtcaaagacaaaccagagacaagaggcatgtcagagcagaaagagaaagggaacaaaggacggtcaagatctagatctaaaggctggaaaggatgttggatctgcggtgaagaaggtcacttcaagacctcatgtcccaacaaagggaagcagcagaacaagggaaaagaccaagcaagcggtagtaaaggcgaagctgcaacgatcaaaggaaacacatccgaaggttcaggctattatgtgtcagaagcattacattcaactgatgtaaatctggggaatgaatgggtcatggacacgggttgcaactatcatatgactcataagaaggaatggttcgaggagctgagtgaagacgctggagggacagtgaggatgggaaacaaatcaacctcaaaggtcagaggcattggaagtgtcaaaatcctgaacaaggatggaacaacagtttcgtgtaaagtacattcctgacatggatcgtaatttactttctatgggaactctagaagaacatggttatagttttgagtcaaagaatggagtcttagtggtgaaagagggaactaggactttattgataggcagcagacatgaaaagctttacttactccaaggaaagcctgaggttagtcattctatgactgttgaaaggagaaatgatgatacagttctgtggcacagaagattaggccatataagtcagaaaaatatggatattctggtcaagaaaggatacttagatggaaagaaagtttctaagttagagttgtgcgaagactgtatttatggtaaagctaggaggctgagtttcgttgtggctacacataacactgaagacaagttgaattatgttcattctgatttgtggggagcaccatcggtccctctatccttaggaaaatgtcagtatttcatctcgttcatagatgtttactcaagaaaaacgtgggtttattttctgaaacacaaggatgaagcttttgggacctttgctgaatggagtgttatggtagagaaccaaacaggaagaaagatcaaaattctgaggatagacaacggtctggagttttgtaatcagcagtttaatgatttctgcaaggagaagggtattgtgaggcatcagacatgtgcttacacacctcaacaaaacggcgttgcagagaggatgaatcacacaatcatggaaaaagtcagaagaatgttaagttattctggcttacctaagacgttttgggcagaagcaactaacactgtagtgactctaatcaacaaaactccctcatctgcagtcaactttgagatttctgacaagagatggtcaggtaagtctcctgtttataactacttaaaaaggtttggttgtgtggcttttacttatgcagatgaaggaaagctagtacctagagccaagaaaggagtgttcttaggctatctcagtggagagaaagggtacaaggtctggttgttagaagaaagaaagtgcagtgttagtagaaatgtgacatttcaagagaatgcagtctaccgagatgtgatgcagaagaacaaagactctgaggaagtggacacatcaagcaggtctcttgatattgatcttgaagatgttggtgatttgagcttaggtggagatctcttggaagaaacatgatccctgggagatcactcacctgctcaggaccatcaccacactgaagacgcggagatcaatgaagaaacggtacctgaaacaccaaacagctaccatttggttagagacagagttagaagagaaatcagagctccaaaacgttttgatgtggagggttattacagtgagtttactgatgatgaagaagaatcatttaatgttgaagccttggtcaccacagtagatggagacaccagagaacctggaattatcaagaagctctaagagatgatgattgagaactatggaaagtcggcatggatgaagagatggactctctgttgaagaatcacacctggactgtagtaaagaagcctgttggagaaagagtgataggctgcaaatggattttcaagcgtaagcctggaactcctggaattgaacaacctagattcaaggctaggttagtttcaaaagggtatgcacaaagagaaggaatagactacacagatatcttctctccagtggtaaagcacgtttcaatacggatattgctggctattgttgcagaggagaattatgagcttgaacagctagacgtcaagactgcttttcttcatggagatctagaagaaaagattttcatggaagcaccagaaggttatgaaagtcagttcaagcaaggagaagtgtgtctgttaaacaagaccatgtatggtctaaagcaatcaccaagaagatggaatcaaaagtttgatagttacatgctggaaatcggctttgagagaagccctcgtaataagtgtgcatacattaaatcacttgaggatggctcaaaggtctatctacttatctatgtcgatgacatgttggtggctgctagagatatgcaggtcatttctgagttaaagcagaaactcagtgagaagtttgaaatgaaggatctcggagctgctaagaggatacttggcatggagatctcaagagacagagttaagggaactctcacactgtcacaagaagattacttgagcaaggttctggaaacatacaacgtggatcaatgcaagtttgtggtaacacctctcggtgctcacctaaagatgcatgcggcaacagaacaacaactgctcagtgatgaagagtacatgaagtcagtgccttattcaaacgcagtaggaagcattatgtactctatgatcgatacaagaccagatttggcttattgtgttggcatcatcagtcggtttatgagcaaaccagttaaagagcactagttaggggtcaagtgagtacttaggtacattaaaggaaccctgaacatgaagttgtgctagaagaagggagcagacttaaccctcagagggtattgtgactccgactatgctgcaaacctggagaacaggcgatcaataagcggaatggtattcacacttggtgggagcaccataaacttgagatcatgtctgcaaaaagtagtggtaatgtcatccactaaagccgggtatatgtctctcactgaagcagtaaaggaggctatatggcttaaaggtttgttacaggactttggctatgaacagaagacggtggagattttctgtgattctcaaagcgccatagccctgtcaaagaacaatgtgcaccatgacaggacaaagcacattgacatcaaataccacaagatccgcgaggtcattgcagatggagtggtagaagtgaagaagatatgcacactggtgaattcagctgatatcttcacaaaggttgtacccgttagcaagttcaagacagctttgcactcgctacgagtaaagactgagtaatctactcaggaccgggaaaggaatcctaaactataacaagttattctctctcaaaaaggtattctcgcttctgtcaattcgtgtttcatgttcttctattgctaggtggagatctgttaagatttagcaacaaagaacacaacatgaagaagcttgaggaagaagaaatgccaactcagcaaaggggacacgtcaacagcaggaccacaagacaaagaaggagccgttagcgccaaccagggttatgagtcgcacggctaaagcattcttgtcttggtttggtaaagttgcacgcgggttaagcccaatccaaattggtggaaggtgacaaatttggaggcagcttggagacagctgtagaggagcttgtagaggcaaaccaagaaggatccagaagggaacctagattaaaacctctaagtccatttaagctgaaggtagtgcttagagacagagttagaaacgtagagacattcattagaaagtaaacttgtagtgagtgttcttggggaaacagtgagtgagagagagagtgaatcattttggttctgtaaggggctgagagagtaagagatctctttgtaaaactcaaaggttatagtggattctgggaaagatttcccgacccagacgtagcaccgttggtgtgaactaggttaacaatctgtttgtgtgctctatgttgttctgtttcacttttagtcacaagtcttcttatctcaaagttctgttcttgttcgatttcaagttttttagacatcaagtcttgaaacccttcgtctgtgtttagtctaaaacattacactattaaataaaaataaagaatagaaaggtggagccaagtcaacgagatcgttggtatcggtcatatttaaaacaaatcttcagcttttctttgattgtttcaataatttcttatgaacatcagaacgtgtacatatacttttcctcttcataaggccaaacccctgcttctaactaaaaacaacattaatctttcttttgttttgttaaagaaacaatattaatacataaataaataaaacacaagtgtgcaagagcgtcgacgtgtatctaagagatcacgagatttaaaaacaaaaaaagctgctaagttagcttacataacatcatcatctcagtttctacatattcctttccgtaattaatgttagtctcttgtttactcctgtcgcaatgtgtctcttctcctatctccaaagctttcaactatccctgtctatatattcccatcatgtatataatgaatccaatatttcaatattcttttctaaattcttcgatcttatagtcgtagatgtcttccttgatagtgaaaagtctcgggtccattgtctctatcattgcaagaattttcttctttcgacgtagccgtcctgtgtctaatccaagaaccaccgcacatataagctacttcaggatgtctaggaaacgtccactctctttgcaggttattttttctttctctagatatccttgctcattctcctcaccgcaacggaaatcataggcatgaacatttggttttcgggtcggtcggtttcgtttgaatcctttgatttggtttcgactagacatgagtgttgccgaattggggccaaaatataaatttgagttgagtactcattgtagaatggtttataaatattttgggtatggttatgatatggtttagatcttcatccctatattcaaataattgtggttacatagatgcattttagaaaacatatttaattgaaagtataagaagatgcattttagacatctctcacttttctaaattttgcttaaacacaagccgcacttgatgtaaaacagtttttttccgaataattttacataatattcaaaaaacaaaagaataagaagattagcaaaacaaacgaaattcttttgataaacgaatcattgatggactataccattaatagtcaagctttccaattaatgacatttgaaaagctgatatttgcagaaccgattggtttatattttattttttttgaatttagtgttaagttatattcaaagaaaaaataaacgtttatacatgtgaatgcaaaattttcttagcatatagaataaagttttatatccttggtgttatatcgatgcgaaccacacttggaatccttccacatatttctctaccttcccttttacactagccatgattaaattatctcgatttaaatgtcaattcctacacaatcatctagttttcaaagtgctaataatttactaatgatcattttgataatagtatataccatactactttttttatttatatccaaagttctcataagaaaactaaagtttttgagtttgacattcgtggctcgtggactactagacggttgagctgaaggtaagaatgtgttgtactggttgcgtcaggatcgttaggaacgcgatctccaaactccgaggtaacaactaattgctttgctttaaaatttaaagacaagattagtgtaatgaacgaaaaaagagactagatgtaatgaatttgattaaattttaggagttgactcagtggaggtggataaagagttaggaagagtgagagtggtgggttatgttgacagaaacaaagtactcaaagccgtgaggcgagcggggaagagagctgagttttcgccataccctgaacctccactttacttcacatctactcaaaactatttcgtagatccttcgaaagagtttaaagagagctataactattatagacatggctacaatggtacagaacaacatggtaatatccccgtaggttctcgtggagacgacagggttagtaatatgttcaatgacgataacgttaatgcatgccgtctcatgtaaactacatacgtaatgacttaaaacttgtggagaagtaaactgtaattattatcatattgtactagtaatactataaaagaataagagaagtccagtgttccctacttgtattagaaacgtcattttatagtggttaaatgtcatattgcttatatttatctttaattcacttttgcaaatgtcatttcatggttgttgtttttcagtttttaatatgtttttttttgtgcaacactaatatgtttttgttctatatatcgttttcgatgtgtaatgagtttgatctccatttaagttaattatttatttgtattttctgaatttttagttccctcaaatgtgttttgcaataatattatgtaagatatgaaatttttggtctctcatgaaacattttatgaagactttcaattttaattttgagtacaatatctttttaaagtaaaacgttttcgggttagtctaattattgaatcaattttcttgaaagaaagtaagtaagtcatcagcttgatagaaattatttgtattgacttaaagatgtttaattagtttatttttatcattggtgaccgatcattatctttatactattttattcggttatagtaaaaaataaataatcacttcattattattgtaatattgttaaacttaatattttagtttgaacaaaaagaaatgattttatatttttgttaaatatggtataattagttttacttttataaaactacataagttacattaaataaattataatcaatcaagcaatggtcgaatccggttgaaccgaaatgtagtccggtttactgtcggagtttggtttagaaaacattggtaatcactaatcacagatagcacagtgaaaagggtaggacaaggttgatgaagctcgtcgtctctgcaaaatcccttcccttctttctttctatccacaaacaaaatttcgaatccatagagaagaaaacatgaagcaatgtgatcgtagtagtctatctccttttcctataagttcttcttccttatcttcttctttcgttgcttctgaatctgatcctgaagattctttatggagtgatttcactttcgatttctcattcttaacatccgaagaccacaagattagtcccaatgatgataatgatgcgaccactgttcctaaaggtttttttttttttttgtctttcttgaaatgttatggttttgttcttgttatgtgttgtgtaagagtttcttgaatcccttaggagagaatttactgtaatgtgctcttctatgacacttgtgaatgatttatttggacttgtgtagggaaagaattgaatcctttggcacctcagtttctaccattcaatgctaagaagaacctaaacaagaatgggagagaaattgaagtaaacagttccaaccaaaacactagaataggcgtcctgatccatgatgcagatgagagtttgggtttagtatctcaagatagtgtttccaacactatgagtatgttagatattagcaacgagttccaaaagtctaaaaagctggatccgttagctcctgtttttgttcctgcttgtgcaaaactaagtgagaagcacggtgcagcagatcacatgttaactatggagacaaatgttggctcaacttctggtgtaagttcttcagacagtatgttgcttaatacttttaaggttgttgggacacattctttagtggtcgaccgcagtttaaggaatagatactctaatacaagattggataggtccagcaacaagtctcatggtcggaagaagctaaatcctctggctcctcggttctcactagcagatcataaacaaaatgtatatggctgtgaggtaaaccaagctgcaaatgactttggtgatagacatggctgttccacatcatcaccatctcaaaaagtggatgttaagaaactacttacgacgattcatggattgtcagagttgctaacacatgtacacagttcagaaacttcggatttaccaaatgagcagtatcttgatctcatcaactgtactgtgcagaatctcaactcctatatcaataacagagttcaggagcatagtggggattatgcaagtgctgtacatagttcatgtgatttatattcgttgcctaatatgcgtaaggtatgttctcttgactacttttaaggatcatcgaagcattcttgttcggttttaaagcctgtagaccatcgttatcacaatgtgcaggttataagaaatcatcatcaaacagaagagcaaatcaacccagaggtgtgtttttataaaagcttatggctcaaggctaaggcagagagatcgttgatggaacatgaaacatttctttcaaaagcaagatcttgagcaattagtgaagagttatataaggtgacatcagatcatcctaacttttttacttcatagcaacaatgtcaaagattgatttctctttctatgaggtcctattgagcgtttgctttcgattttgcaggttagcgtgtagaaattcaagcggctgaatcgaggcggtgttactagctagagaagttttgctagcaaatgtatgtgtaggtcgaaaagagggacactcatgtcaattctagacaaagacttgaatctgtattttgtgttgtagaaacttgaaatactttatacacaaatctagctttgtttcttgaaccaaatttgtattttgaagctacatttcaatgaatatatgtaaagagattactcatcaatctttcttgctaaagagttaacaacactagacataaacgtctcaaattatagatgtgaagcaacattgtttatggctcagagaaaggtaaaaagaaatagcctcaaaaaagtggagaaacagagatgttcgagaaaattgctaaccgaatcagaaatgaagcaacaaagacgaaccatcacaagtcttttgcaactcactaaaacctatgtagtgagttccataatggcggaaacaatatctccgttactctctttaagagccttaacagccttgggcctcgagacaccggcttgagtcatcacaagatcaatgtccttggcttcaacaccagtctcatcaacatcttcatcgtcttcctcctcttgtgcaaccgtggctgcttcagaaccatcagtgttggggatcatagacgcaacgtcaggcatcttgaacctctgagcagcttgtgcttgtagctgagagctcatgtcatcaatcttagcctcaccgaatatcacataggtctcagagttcggactcttgaacacatccggcttcgagatgacaaacaacacctaaatgatacaataacatacagaatcaaacatcgctacacaataatggaatacagtcaattaggtcattacttacattctttgatctcttgatagtcactctgctaacatcagtaacaggtttcattccgagtttcagcatcgcctttcggcttttcttctcgcttctactttgcttggaagcctcattctcaccagctccttcacataaacaacaacaacaacaacaataacaacatcaaaaccctaacaaatgtcatacatagcaaaacctagaaaacctaatccagactcgaaacagattgattcaatcacaaatccacaacatgattccagaaacatccctaaaccaccaaacgaaaacaatcaaatcgagtaaaagagtaaaaataccatcagcaatctcatcgtcgtcgtcatcaacatcatcatcgtcttcgtctccatctttcacatcctcaacaacaacatcgttctccttctgctccataacacaaaccaaatcaaaatcgaacaaaaatcgattctcttaaaaaacaaatagagaagaagaagattacaatacctggagcttcatctgctctttaatggcatccataagagcctcctcattcacttcctcaataactggacctggcatcttcttcttcttcaacctcttatcttcttcttcggaggaaaagataaaaacgaaaacccttgaaacagcgcagcgaaactaacccttttctcagtttcagtggcgatgaatataaagaggggcgtaagatagtgatttgggcttaccctatcgtttaatgggccttagaaatagttcgtttaagttttattaattagcccattagataatacattagccccaaactatttgttttcataaatatattagcccaagtccaccaattctgatgtggtgtgttttccattgataactaaaaaaacaaccaattttaacgcatgaatatctaggtcgtttagtttttttttttctattacagattacgagagttgttacatagacaattttattatgcataatttctttcccttattagatccacgatatacgacacctcattcttcttctccatgcgcttgatggataccaaaaatatcttctctgcgtataatcctggcgaacggctataattgtacatcgttgtagatctcctgcacacttgcctcaattaatctgcaaatctattaataaattgcagtagctgggattcaaactccaaacctcttagtatataagtattaatgaacccttgatcaaccattgaaccaaggaggctttctgggtcgttaagttaagagacaaaatttaataaataattaacttagagacaattagttttttttctttttaaggtatattgacaaaaaaaatagatttgacgttggaaaatatttaaaaaaataataattatctctgcttttttgccttgcgtatgggacaatacgtatattcaattgactttttgtgcaaggaacgagttgagtgcattttaaaggttaaagcttgtcatgtgaaataatacacatacaacaaaaaagaacgagttaacatgcatattagtaacggctagactattaattattgttttttttttcagattggagaagttttaacatacaaacagatattatacgattctagaatgtgtacacgtgaaaacacatatataaagcactaaaaggtcaatattatacaagcagacaatttgttaatatctgtgtgcgattaagttagtctagccgttattaaatgcatgtcaactcgctcttgctcgttgcatgtccgtgaactcgttctatcacgcaaggcaaaagctgaggctgttttttttttgaactttttcaacttcatatctatttatttactttatttgtctttttacaaagatagaaaaactaattgtctctaagttcattatttatcaaattttgtcccttagctaaacgaccccaatatccatgcgttagaattggttgtctttagtttaccagtgtgcaagtgaaaacacaccaacatacaaattggtggacacaattatttaggcttatatatttacgaaaacgaattatttggactaatgtatttactccgatggaaagtaatggaacctaaacgagctatttttatggtccattgaacgataaggtaatcccaaaggactatcttatacactttttacaaatcaatgttataaatttttctaagatctgaattttgttttgacaaaatatgatgaattcaacaaaatccggtgaccattcgataaaaccgccattggaatcataagtttcccgaaagatcaattaaaaaacctttgttggacaagcgagcagtgtagtaagcagttccttcattgcaaagatggttttatatatttttggtgcgtttaaaaacgaaatcttataaacgtacataaaaacgaattaatgtattaatgtcacttggttaaccaagcacaacaatacaatatcgtttcataaatgctgcgttgtttcttttgacgtcatattgcgtacgttacgtttttaaatattctcgtctagaaaaaaaatatactaaccaatttcatacaaatgccttgtcattgaaataggtgtactgccttttttgattacttcaatcttggatcattcaattaggagactcttaggccaacattaaggttgaggttcatgtgtttaaattggtcgtatttggtttatcaatgcaagtgaaagcaagagttggtagacaaatgtttagcacatcatgcccggaggcaggaacgcaagatataacatttgcctaattatttaaaggctccttcaatttgttatattttttgtagttttaccttatatcttcaataacgcggtctagagttaatggtcttttcattaaataccatgtcacaatgtgaatctagagttaatggtcttttcttttttgtttttgttttcaataattgtttcttattttgtcttatacatattaactacttctttaaatgcggtcggtggtctaaaatatttaactaataccaataaccagtgcactggcaatcttaattgctactactcctttcaaattatttttctgttttaaaatgactagtattgtttagatttcaatatgaatttccatagaaaatacataattccaatccaattctaaacaaatataaaaataataaatacaataccaagaataattgctttttacgagatattttttatatactttattaattatgtgaaatgatatttattgagaaacggatatatgtattgataatactctgattttctttgtagaaatgaaagatttgaatattaccttgccataggcttgattatttgagatgaaaacaaactgatcaacggaagaaacacaattggccaatgactgaaactttaaaaacagaaaaaaaaaacataaacacaagttagaaattcgaaacaacacttgatatcggtcaaccccattaagtattgtgaagtaattagatgtgagtttaatgttaaacgaaaattcaaaaatgatagatttgtttaggtttagaaattatcttgtgaaaaaatcaatttcattaagttatcgaaaagacacagtcatctgaaacgtcaatgcatgcattcgatgacaacaacacaaaagattaggtttggaagtggagactatgtttaatcgatctcttatcagtttgttttggtgagatttgatataggaacaggtgggaggcgatcactttcacttttttcggtaagaaaaaaccggatttgctcgaaaggcaaggagaggatttggtgactctactcaaaatgtatcatcataaatctgttgaatgagataagattttgagcgagagttgggttagagatatgtatgttctcgattgacggttttttttgtttgtttgttgattgtgtcatgaaggtttcacccaatataaatagagatttttggaaaagaaaactttttatggaccttatcccttttttagtaaaataaatccatttttcaagtttttactttttttacttttcatgggcctagtgtttttgttttagtaatatattgtatatacaacaataaaagttacaaatgagaattaaaatagagaaaacagataaatattaattcattattttccttttattttattttattttgattatccatagtttaataccttgttcaattaattgcccgcctagccgcttaggcgtgatcagatgggatccgcggcaattttgtccaaatcggaaagattaattgttgatccgatttttttcgtctagacccgtctagagggtgcctagcccatttttattttttcattttttaaaatcaaaattttttaatatccaacttatattcgtaatttgtatgaaaaatcataaatttgaacctaaaatcttgtttttatgtgtttaatataattttaaaaataattttatactaatttcttaattataatagattaatatgttttaaaaatattaaattatcctaaaactaatcctgattaatccacgtataatctttgattttctgctaggggctaggcccaccctcaccgtctgactagcgcctagcgattttttgagcaaatgtaaaacaaatcaatttatttttgtgtccatagataaataattgtttttcaatgtttttttaaaaagcattccggaataaatccgtataatattattaattattatagaattaatagttattagatgaaaaacatatataatttatttagttaaaataatgttttatatattacaatcaaattcttatttattcaaaattttatgtataattaatagcatgcaaacttttttttctttcttttagtttttagtagtgatatactcttgatacatataaagacaaatgttaaaaatgacaaaacaaaaaaaaaatcaatgttacaacttttattagcagcatgggaaatcgaaaatatatattttaaattatttctgtatattaattattttgtctctttactaacatgcaaaacctgttttccaattttataaaagttctcgtacaacaaagataaaagttacaaatgaccaaaaaatagataaacgttacagtttctctggttttcctttttaaaaaacttttagtaatacgttacttgtgtacacaatatataataaagttgcaaatggcaaaaatcccaagacaaagagataagatgataaagattacaatttctattattaatttatttttccttcttttttgagtagttaaatacttaaatcatttccgtagataaaacatgtcaccagatttcttacttaaaaaggacaaagtataaaactcgtgcggtgtccttgtccttatataacacatctttgagactatgactcatgtgatattgtaccataacatatctctctctttctctcattatcgctctcacttcagattttaaaccaatcatggcagcatcaaaactcctcgtatccgacatcgcctctgtcgttgatcacgtcccttcaaactacgtcagaccagtctctgaccgtccaaaaatgtccgaggttcaaacttccggcgactctattcctctaatcgatctccacgacctccatggacctaatcgagctgacattatcaatcagtttgctcatgcatgctcttcttgtggcttcttccaggtaagtgcacaaacaatccacttttaatctcctatactctggtttcttgagtaacactcttatcttttcttgattttacactagggttttgcaatactgtttttctttctttcatgattttacactagatttgtttcctctgttccagatcaagaaccatggagtaccagaagaaacgatcaaaaaaatgatgaatgcggcaagagagtttttccggcaatcagagagcgaaagagtgaagcattactcagcagataccaaaaagacaacgagactctccacaagtttcaacgtttccaaagagaaagtctctaactggagagacttccttcgactccattgctaccctatcgaagatttcatcaatgaatggccctcaacaccgatctctttcagagaagtcacagccgaatacgctacaagcgttagagccttggttctgacacttcttgaggcaatctcagagagcttaggtcttgcgaaagaccgtgtaagcaatacaataggcaaacatggtcaacacatggctattaactactatccccggtgtcctcaaccagagctaacttacggacttccggggcataaagatgcaaacttgatcactgttcttcttcaagatgaagtctctggtttacaggtgtttaaagatggtaaatggatcgctgttaatcctgttcccaacactttcatagtcaaccttggtgaccaaatgcaggtaattaggagacaaagtgaaaaaaaaatcatctgttttgttcactctctttgtacttactttatgtgcttgtttctcctcataggttataagcaatgaaaaatacaagagtgttcttcacagagcggttgtgaacagcgacatggagcggatatcgataccgacattctactgtccttctgaagatgctgtgattagtccagcacaagagctgatcaatgaggaagaagactctcctgctatttacagaaactttacatatgctgaatattttgaaaagttttgggacacagcatttgatactgagagctgtattgactcgttcaaagcatccaccgcctaagatagtgtactatcgaatcaatcatccgtcatgactaggccggtccttagttcttgattggaactcaaatacccatttgtgttgccatttcaagatcagtatagttttctttaatgaacaaatctgcctgagaagtaaaacaaactgttcttgcaacattttgaaatcattatgtttttatatttacacttgcacatattgtagaagtcattcaaggaggagcaatagtagaatgatacacagaaatcgatctcgcagacttgagggtcatgtcgctcatgttaagtagattctcagcttccatcaatgcctattatccaaactaaatatgtttaaacatcattgctgctgagaatatatatccaatgtggatttcatattgaggaaactaaatcccaaaacatagtgttcctagtaacaagttcttacaacatatgactttctagctacattaatattcttgtccatgttaattatatatctcaacatcaggtttagtcgcagcaagctatgtaacatgtcatcttcaaaatacataaaacacttgataaaaaaagtttatatgataatatttccttcggctacattgcatgtagtgaccaaattaaccattaacggtggttattgaagatccttctacatcttcaagcttcaacaaagagcttattacacttcaatactcttcattctttatctcgtctctcttcacccaaggtataaacttatctgatatcaaactgtgtaatcttccgggaggctattacagatcctattttcaatcaaccactctgatacttctagggctttacaaaagcacttggaatcgtggagcttctcgaaaatacctctcaccaaagaagggtttaaattataccccaattgttgttgttgtttttttgttgttgccattgcttaagaacagtagtgcttgctggtgtatgatccacaaccacttcgagcctaaacagtacagttcttcggagacgataaggttccggttctgtagtaggagcagaagaatcgaggtctgctattgtaaacgcgaattcactttgcgtgttgctgaagatttgcatcatgctcatttttttatgatgaaagttagggtttatttattcgagttataagaagtcagagattcaaaacttgaaaaacaagttttaggctgtctagctaaataatagcgaagcttcccgaaaatatggcccaatagatttgtagttgggcaaaattatggcgccgttttagcataaacttgcgaaacaagaaatcgactataacctctaataaaagctataaaacagatgcattaggtttctgacaaataagtaggaaaggtgggtctttttatattattaaatctattaaaagttttcttttgttattggacgattgtgcaactcaaagtcgaactataacatttttcagtgaaagcgaaaaaaagtcgtcgaaaatatattttacgttatcgtatcgcttgtggatttcacgcaagtgcttgctgatgctttagtagggatcttagagttcacattattgtttttttcatattatatgtataacgttccaattcatgtgtgtgtgcgtctatactactttttctttcttctcttaattaaaaacaaattgtttccaccactctacgaagaaaactttttgctgatcattttagtaagtgtgatttatatttataattacaatatttctcgtacgaatgatactttctgacgtgtttctgactatgtctccagagaaagaaaaggtttttttttttttttaaaacaaaattaataataatatttcttttgttgaaagtttttatgttgcttaagattcaaacctcggattttataaatatacgatgcttctgatacagtattctaggaaccagctccaaggaaggaaactacatacgcttgcatacaagtgatatttcctgtgataaggcatcgattcgctatttcctgagttcgatttatactactatcacaatcacaaacatgttagaaaacatgaatttggacgatatgttttggtgatggttgtgttgtctggtctttacaaagtgttagaaattaaggtagggattactgaccatgaaaataaaacttataatccttaggaaacatgtactgtcccatatctgaaaagtgagagcgattttaagtaatatataagagatatgagtcactctacttatatatagccaattggttttgggttgaaaacttatgtaactttaatatggtatcaaagcacgatccaaatgcttctgtaatcaagttcgcgatgggcccacaccttggatccatgagagaggtgtcataaaatctccgagattaattgttgtatagctattatctcgagagaggttgttagagattaaagtaaggattactgggccatgagattaaggtccataatccttaggtagcatgtaatgttccacatttgaaagatgagaaataccttgaatataatataagagacatgatccactccacatataaccaatcaattttgggttggaaactcatgtaactttcaaacaaaataacttgaacaacgtctctctaattcagggtcaaagtttagttgaaaatccactgagccaaatttttttaatgatgtagataaattcagaacacttgtttgaacacagaacatatcatagtttccaaaagtgtaagagtaaatttgcatgttaactccctattcctcaagataagctctatcaacatcgaacacacaatttttccacaagtaattccgaagaaaagactttcaacatatctctccacaagtaatttccctaagagaaggaatttcagaggtggaggaatgcttaagtttcagtcgtttaccatagcaaactaataaaatatcacacaaaatacggaacaaaggctttttcatactccacgtaaaagagatatgttcgaggcatacatcaaatattataatcaatcatcgtgctaacttatactacaacaaaatattaatataaatttactatccaatcttacgaattcgtgcaaaaatcatctaatttttttgccacaatggcaagaaactattaaattttgatgacgtggacacgcacatgtaaaaaacgtggatgtcaagtcataatgttaacaaactgttttttttttcatttccttcaattctggtttttgttttttaaaagttgtgtataaacataaataaatatatatatttatttatatatttccaatggattctccaaaactcttatactcactttcagcatattcttccatcgtgaaaccttaccaaaaaactaatattaaatttctatggtcgtgagtatgcttaaaatgtacctactatttatgtgtagtggtttataaaatctaatattattggaaacattttaaccattgaatttttgatgacttaaatttttttttagataatttaattcgttaaaaatgtaaagatccaaataacatggtgttaagtgtccctactaaaaaattaaaagtggtgttaagtgagacttaacaacaaatcatacaaatttcagaattcacctaaaatcattaaagtcatccaaaaactcattaaaactcaaactgatttaaaatataagattaaatgttttattctatatcacttagaaaactgaaaataaaataaaattgtttgttaacactatgatgtatcattcacgtcgtttcacacatggtctacattatctattatagtttcttgccaccatgacaagaaatgtataattttgcacaaaatcataaatttagatggtaaattttaattaacgatttgttcacgtatgaattagtattcatacttatattttaattgaacttgtcgctttagttgaggtaagaaaatactataatagtaatgaaatctcaccaaataacaatcaaaaatttatttcaatcacataagatcttgtcaaaatccaccaaatcatcatgcgtgtttttcaacatctctccaaatcttctaaaaattactaatccaatacaccgcctaactaatgtatttggtaataactcttgatatgtacaactaatttacgtgttctccaccataggttatatctgttaactagttacgtacgtcgaccaaaaacatattactttatcgtggttttatcgttgaattattcactttcatgttgggatatcaagatttgaatctttcaatcatgattttaattatagttgtcaaatgtcatatcaaaaatatctattttcttatagtttttaactgattagtatgagtttcgatttggaatatttcagatatgaacatacaactaaggaacaaaatattgatattagtttcctatatctttttatttattttaaatacaatagcagatcacatgtatatattttaactcaatagttacgtcgaccaaaaacatataactttaaatatcgtggtttcattgttgatttattcactttcaggttgggacatcggaatttgaatttttcaatacgaattttaaacatagttaaatattttcttatagttcttacttcttaacgattagtatgagtttagatttggaatattttaaatatgaacatatagttaaggaacgaaaggcgatcacatgtttgtagttcacctaagtattgtagttataatctcatccagtacctggagcagttgagctaatctttagattaagcttgggcaaaaaatccggactaaaatacttgaaccgaaaccgatccaaaaaatcggtttgggacgagtacggatattacctatttactttattgagtcttgaattgtcgtacccgtgagtatagggtaaaatccaacccgaacctgatactcgaacatgtatccgcttacccgaaattacatatacttattcatagatttatatatataaaatcttattttatatttaatatttgaactaaatacatttatatccaaatatctaaaaataattaccaaaaactaaatacatttgtaaatacttaagactaaatatttttatacgcaagatacttataagttttttggatattgggacaaaatttcggttatgtgggtaaaattcagatatttgggtaaaatattcaggtatttagataaaattttagatatttggctataaaatacctgaatctcaaagatacccatttttttggtatttagcggttctaaaattatatatccgaaccgacccgaaccccattggatccaaaccgaaacaaaacagaaattttagatttatcttattgggtcctaaacttttctacccaaaaaattcttatccgatcgaattttacccgaatattccgacccacatacctgaatgcccaaccgtactttagggaattacatccgatgcacaaaagaactaacaattttgtactatcattaacaccacccatttgcaactccgaaagacgatcacatattgtagatttaaaatgcaatcttaatcacattttcactaaaagttttccttaacgtatttggtgggcatgatttaacagctcaatttggcaggtcaacgaatcaaccgtgctttaaacgttgtaatgtttttcaacttaagataagactcgaaatcaattaaaaaaacaaacaaaaatcatagtcattgtttttctttgttaattcatatacactcatacaaaacattgacaacttatctattgtttaatctaaataatacaattatgtacaagtgttactttagtaatactgccgtccatataacggcacaaaacggagaatgacgtcaccattgttgatgtcacacctccatgtaacttctgttataaacgcattaaacgttacacttgtgtatattatatagatctctgtccctttatatttcatcttttgacattacaaaattacattaccaaacacattaaatggcaacttctgcaatatctaagctcttagtgtctgatttcgcctcctccgttcacatcccttcaaactatgtccgaccaatctccgaccgtccgaacttgtccgaggtcgagagttctggcgattccatccctctgatcgatctccgggacctccatggacctaatcgagccgtaattgtccaacaacttgctagtgcgtgttccacttatggtttctttcaggtaactccatgttagtatttctctgtttcaaattcactctgttttccttgcaacacactacgatctctgttttccttgtgatacacgtttgctctgtttcaaattttcttgtttattatgttctagatcaagaatcatggagtaccagatacaaccgtcaataaaatgcaaaccgttgcgagagagttcttccatcaacccgagagcgaaagagtcaaacactactccgcagatccaacaaagacaacgagactctccaccagtttcaacgtcggcgcagacaaagtcttgaactggagagacttccttagactccattgctttcccatagaagatttcatcgaagaatggccatctagtcccatctctttcagagaagtcacagctgaatatgccacgagcgtaagagctttggttttgagacttcttgaggccatctcagagagtttaggccttgaaagcgaccatataagcaatatattaggcaaacacgctcaacacatggcgtttaactactatccgccgtgtccagaacccgagctaacttacggacttcccggacataaagacccaaccgttatcactgtccttcttcaagaccaagtctctggtttgcaagtctttaaggatgataaatgggtcgctgttagtccaattcccaacactttcatcgtcaatatcggcgaccaaatgcaggtttggtaatcaaaacaaatcagaatccgttgtttaactttactagtatttttatatggttgtgtctccttgttttaggtcataagcaatgataaatacaagagtgtgctccatagagccgtagtaaacaccgagaacgagcggttatcgattccgactttctatttcccttcaacagatgcagtgattggtccagcacacgagctggtcaatgaacaagactctcttgccatttacagaacctacccgtttgttgagtattgggacaagttttggaacagatcacttgctactgcgagctgtctagacgccttcaaagctccaacaacctaaagagagtctattttgtaatcaatcttgaattggctctttagctatattgtaaggaatccaaaaaagcttatctctatttaataaggacttttcaaaatcagtttgtttcttatgaatattatcaaattttcttcaaaaaacagttgagacaaaactagggaaaaaggcctattcagaccaaacttttccattgtactttttcatttacgaacaaagtttcaactaaaaaattcaaataacctgtatgaacttcaataaaggtgcctaattcgaagttgatttttacgaaaattactaaaccgttgctaactcggatggtgatgttacaacgacgtggcatcacatttttgaaaacgatcaaaaataattttaaattttttcgctccagagacaaatgaaatcgaacgtactgaaaagtatctaattgcataaagaaaatcgaacttactaaaaataaaatttacaccacctcctgaaccattttaaatggaaatatattagtaacaaaattgatatacttataagattctctaagtaaactataatagatagtattttttgttattaataatatatgtagtggtaaatattatatgctattcattaaagtaagaccttggcatgtacaaatttctataatgtttggtagaaatgagtttttaataataagaatagagtttgttaattcgtaccaaaaagatatataatctaaagtttcatttcaaagattatacttttaaaaaatatttattttgtgaccaaaacgacttgtgataccacgtcattgccacgttctcagtcgagtcagcacaataaaccgtcgttgactatttccgtcaatattagctttgatttagccatttttagtgaagttcatgcatgttatttgaatattttagtttttcaggttgtaataaccattgtgactttgttagttatatgaaaagtacagtacgatgaaaaatttcagtgtgaaataaacctttttccgacaaaactataccactagacatctcttttcaaaactaaactgtttttacacaaatggtccgtttaagtccacggtctttggacccaccaaaacaaccttatttataattggattggccataatcttagagggtcacaagtcgcaatcattgggatggagagagttgtgtttataaagagttaaatgaatgtttaagatttgccaaatatggtaacgtaagcttgggaccaaagtgggaagctgggaacatagttgtgtggatgattggttcggcttatcgttggatgagttcgtatccggagtaacattgcatgacctcatgaaaattggagcattaaccttttgcacaagcctttttttcagttacttgggaaacaagaattagcaagaaattttcatttttcttgtctcatctaggttataatttttcatgttcgaatatatttcatttttcgtgggaagtaggaattataattaaaaacagtgtagtttacaaaaaggcgacgataatcaatagcagtgatggcgttagagagattcggtattgcctagtgtttattcatcatatatactaaattttctataacattaattaataaatttagttttcttataatttttatcctaaaccgaacaaaaaaccaaaataaaatttgtatctatttggtataaaaaacggaagaataatatataaaaaaagaaacctaaccgtttaaatcgataactgaatttccatgtctaaactaaatctatctttgcataattatattttaattctttttgcataattccaagttggttccaacaacgaaaatacacaaatctctagtatagttggtgtttacaagttatgtccttttaattatttttaactgttattttttcttattgatggtagaaaaacaaaatagtaactgttatatgattctgatgattttagagaagctgatgtgatttattgtaaaatattttccaattccatctaaaatcatgagatttggatttctgtatttttaactaaagaagtcttatcaaatcttctcaaatcctttaaaattaataagaataaaatccacaaactatttttaataacaatgaagtttaaggtagatttttaaattttaataacattggattttattagagtttttaaaatccatgataaaatttaaatacccttaaaatacacaaatcacttaaaatactagattgaatatatacccttctaggattacaaaataataaacttttccaaaaaaaaaaaaggaaaacgttgtaagaaaaaagaggaaaaaaagttggaatttagattccttgtatgatacggcaaagtttgttctctatataaacaaacttatttgcttcttttcttcattacaaaaatacacaaagctttttcgagttcataaggatatctcttttcaagtcgagtttgattatagaatcatgaattcattgttcactatgtttgattccttttgtgcagagattatgaggaacaaatttacatctaagtcaccttctcatggatcatctgcttcttcctctggtgttcaagccgtgtcgattgagaagacaccaaagaaggtcctggtggagaaagtactgaggtttgcgccggagtttgacgggcttcattgcttcgaaaccatagttccttcttgattattccactacgattttcctttttttttttttttttgatagattttgtcatgaaatagttacgaaagtgttgcttaaatacaaacatgaataattatatggattggattatgtcacaagtttctttatttgctcctagtcttcgttgtttttttaaaatttcatattggtgatgatgttcttccgaattataattttattctctttttatgcaacaatgaacaatcgattcacggtcatctaaatgcgaaactagtttaaccaaactttgcaagagattataattttttttacagctgactagggtttaggcatttaaacctaacttaatttggtttaaccaaaccaaatcaaacctaagtttggccaattcagtttagatttggtttagttggtgaccttattggcaataggaatcatgaaattcagtaaccaattcggctcggaaaccaccaaaccgaaaattccaaatatttttttaacaaatatagccaaaataccaaaaattgtcgaaattttgtcctaaacgaaatccaaatttaatcacaatcttttacacgagattcttttgtagtttctaattccttcggagctaaggaatgacgaatgagcatgaaacatacttaggtttgctctgatgatgtgttcaatacattgcaataaactagattttagttgacttagaacaggatgtttgatatattctttacacattgtttattggattaaagtaaaactctgtgactctgactatatgacgaaagataacaaattcaaacaagaaaaacttagaacaattccaagaaatagaaacattttggtcaaaaaactcatctaaaggccacatcgatataaatgtttaaggttccccattattagtccccaaatacattctcttgtaatgagaaatcatagaacatcaatctttgtggtactaagtttggttataattctcaatgggcagagcggtttcttgccgcgagccggtgctgagagcaaggtactcaacaattatatatgttcattctttttttccagaaacataaacagagaccaagagattaacagttttgaatatgttgtgataatcaataggttcatatagtgtatttgggtgagaagcaacatgatgatcccgagtttgtcacggaatctcatcatcggatgttgtggtcacttcttggaaggtatgtaagtgtagttttctccattctatactcatggttaatggttcttgcttttgcttcatcattcatgttacagtaaagaagaggcccatggttcaatggtgcatagttttcgacatggcttctcaggtttcgccgccaaacttaccgagtcccaagccaagaaaatagcgggtactccatcctaatctcaaattttcttagcttcttaggaaccagaaacatagatttaaaggccatcttgattgtctcaacagaacaatctgtttttgttttctttgctaatgctttttggcaacagatttacctgaagttgttcatgtcataccggatagattctacaaaccggcaacaactaggacttgggactacttaggcctttctcccaccaatccaaagaatcttctaaatcaaactaatatgggtgaacagatgatcattggcattatagactcaggtatatatatttttacatttcttaagtttctgttcttatatatgtcttagcgtctcaatgactaaactttgttttgtcaatataggagtatggccagaatctgaagtatttaacgacaacgagattggtccggtaccaagccattggaaaggaggctgtgaatcaggagaggattttaactcctctcactgcaacaaaaagctcataggagccaagtacttcatcaatgcttttcttgcgacacacgaaagcttcaactccagtgagtcacttgacttcatttctccgagaggctacaatggtcatggaacacacgtggcaaccatagcgggcggttcatacgtgcctaatacaagctacaagggcttagctggagggactgtgagaggtggggcaccacgtgctcgcatagcagtgtacaagacttgttggtatcttgatttagacatagcggcttgctcatccgctgacatcttgaaagcaatggacgaggcaatccatgatggtgttgatgttctctctctttctctaggctttgaacctctgtatccagaaaccgatgttcgagatgggatagctactggtgcattccatgcagtcttaaagggtattacagttgtttgtgccgctggtaatgcgggtcctgcggctcagactgttggtaacacggctccttggattttgacagtggctgcaactactttagaccggtcctttgttacacctatgacacttgggaacaataaagtgatattggtaacaacaagatatatacaccataatgttttcacaacataatgtttaatgatctgtgtcttattgtgagtttggtaactgtattacagggtcaagcaatatacacaggtacagaagttggctttactagcttggtttatccagagaatccagggaacagcaatgaaagtttttctgggtaatatcgaatcttgaactataagaagaagattgatacactatattcacccttgttcttgtaatgcagtacatgtgagcgtcttctcatcaactctaaccgtacaatggcagggaaagtcgtgttatgtttcacagaatcaccttacagtatttctgtaacaagggctgcacattatgtgaagagagcgggtggtctcggtgttatcatcgcaggacaaccaggaaacgttctcagaccatgtctagatgatttcccttgtgttgctgttgactacgagctagggacctatatacttttttacatacgttccaatgggtatgaaaacatagactaacatcttcaccacttagacaagtaagaaaataagaaacatgttgttttatggtagatcacctgttgtgaagatacaaccttctaggacacttattggacaaccagttggtacaaaggtagcaagtttttcatcaagagggcctaatccaatttcagcagcgatcctcaaagttagtcaaaatctttacatgttctgttttgatcagactcaagaaattatcttgccttagaagttatcaatcatatgaatgcagccggatatagcagcaccgggagtgagcatattagcggctacaaccactaatacaactttcaacgaccgagggttcattttcttgtcagggacatcaatggcgactcctactatttcaggaattgttgcacttctcaaagctctgcatcctgattggtctcctgctgccattagatcagctattgtcactacaggtgcttatcttcttcattcaatatagattagacaaatcaagaacatactgatcttgataatcgtttttactctgtgtagcttggagaacagatccatttggagagcagatatttgcagaagggtcacctaggaagccagctgatccattcgactatggtggaggccttgtgaatccagagaaagctacaaaaccaggtcttgtatatgacttgggactcgaagactatgttctctacatgtgttctgttggttacaacgagacttcaatctctcagcttgtcggtaaaggaactgtctgttcgtatcccaaaccatctgttcttgatttcaacttgccttctatcacaattccaaatctcaaagaagaagtcactcttcccagaaccctcactaacgttggaccacttgagtcggtctatagagtagcggtggagccaccgttgggcacccaagtgaccgtgacgccggaaacgctagtgttcaactcaacgaccaaaagggtctcttttaaagtcagtgtctcgaccacacacaaaatcaacacaggttactactttggaagcttgacttggagtgactctctgcataatgtcaccattcctctctctgtgagaactcaacttctgccctactactacgatgagaattgaacaaacaaataaacaaacactaaccatttgtgacttatgatgagtttgtactgatgaaagcatatacattgataaacccaatcataaacaaatacaaaagtatgtgatgatgatgattgagtgaaaagtagctagctcgtaaataatcacatctttccgaaaaggaatatcaatatttttccatgtatcaacaataaagaaattagtttagtgttcataatctgaccatttctaatccagacaggttcacttctctaagatacttctttagtcttcttatttcataacacaacttttaatctctggtagagaactattcagagtagcttgatatttaccatccaatattaattagtagaagaactattcagagttaatatttaaaattcgagattaagagtaatttagccaagaaaatattctagtgttcttaacctaattagttttattctcagtagagaattattcaaagtttcttaatatttttaaattcaatatttgaattacttttaacttagatacaactctagtgttgttatgttgatcacttctaatctcattagagaactattcacagctgcttaatattgaaaatccaatgtttaaaataatatagattttcaatttgaactatgtcaaggatgaaacattgaatctcaaaaacaaagcaaccgacatggttgtagaaagagtcctcgaacgttagaccttatataaagcctttgcttcattgacaatcttaaacatcgaaacatttatctctttcttctttcaaacgagaaaatgagcaaaaccatacttttcttggcgttatttctatctatagttttgaatgtgcagatcagtttcgtcgtagctgagagcaaggtaattggtatttatgcgagatgtctcttgctcatgcaacataagcattgactattgtttttgcttttgtgattaaataggtttatgtagtttacttgggagagaaggaacatgacaatcctgagtctgtcactgaatctcaccatcagatgttgtggtcacttcttggaaggtatgatttagtacttcaacacaggaacttttggaagatatacatacatatgtcgaaatatctcagatagattacgttactttcttgatttgtcatgtttcagcaaagaggctgtccttgattcaatagtgtatagttatcgacacggcttttcaggctttgcagccaagctcactgagtcccaagcacagcaaatttctggtacttttagcgttgaactctgtttcttgatttgacctaaaccaagaagttgttttttttaaaaacaaatcaatgccctttcttgaaaacagaactgcctgaagtagtacaagtcataccaaatacattatacgaaatgacaacaacaagaacttgggattacttaggtgtatctccgggaaattcagatagtctcctacaaaaggccaatatggggtacaatgtaatcgttggagtcatcgactcaggtatgtgcatatcgaaaatatgtttgattctctttaagacatgattactaatagaaaacataaaatgtggttacaggagtgtggccagagtctgaaatgtttaatgacaaaggctttggacctataccaagtcgttggaaaggcggctgtgaatctggagaactcttcaacgcctcgattcattgcaacagaaagctgataggagcaaaatactttgttgatggtcttgttgccgaatttggagtcgtgaacagaactcagaaccctgagtatctttctcccagagactttgccggtcatggcacacatgtcgcctcgaccattggtggttcttttctgcctaatgtaagctacgtaggcctcggacgaggaactgcaagaggcggtgctcccggtgttcatatagctgtttataaggcatgctggagtgggtattgttcgggagctgatgtattaaaagcaatggatgaagctatccatgatggtgttgatattttgtcactttctttgggacctagtgttcctttatttcctgaaacggagcatacctccgtgggagcattccatgcggtcgcaaagggaattcctgttgtaattgcagctggtaatgctggccccacggctcagaccatttcgaatgtagctccttgggtcttgacagtggctgcaaccactcaagaccgttcttttcctacagccataacacttgggaacaatataacaatactggtatacatatgttctgttttactatagcataaactgtttttctatagttttaaatcattatgctaagatttcctctttgtttaatgtagggtcaagcaatatacggcggtccagaactcggtttcgttggtcttacttatccagagagtccactttcagggtaacattgatttacatatttcatgttttgaccatttgcttgttcaatacgttcaaaacctgcgagattgcgtgtttggacatgatatagcttttaacttgcagtgactgcgagaagctctctgctaatcccaacagtacaatggaaggaaaagttgtgttgtgtttcgcagcatctacaccatcaaatgctgctatagccgcagtaataaatgctggtggtcttgggttaatcatggcaaaaaatccgacccactcgcttactccaactcgtaagtttccctgggtttccatagatttcgagctagggaccgacattttgttctatatacgctccacaaggtatattttcaaaatgatcacaacctcttcaacaaaaaaattcaactaaacatattgtgtttttttggtagatctcccattgtaaagatacaggcttcaaagacgctttttggacaatccgtgtcgacaaaggtagcaaccttctcgtcaagaggacctaattcagtttctccggcgattcttaaggtagatcataccatttcatacatttctaaccttttaagattctctgttttgtaaccgcttctatgttttgtaaccgttttttttgctgttattgcagccggatatagcagcacctggtgtgaacatactagcagctatttctccaaatagctctataaatgatggaggttttgctatgatgtcagggacatcaatggctactcctgttgtttcaggagttgtagtgctcctcaaatcattacatcctgattggtctccttctgctatcaaatcagctattgttaccacaggttcttatcatcatcatcagaaatgttgttataacagttttcttatcagaataacttattaatccgaaggaatacattttaacatttcagcttggagaactgatccatcaggagagccaatattcgcagacgggtcaagccgcaagctagctgatccgtttgattacggaggaggactcataaatccagagaaagctgtaaaaccaggtctcatatacgacatgacaacagatgactacgttatgtacatgtgctctgttgattacagtgacatttccatttctcgagtcctcggaaaaataactgtctgtcctaatcccaaaccttctgttcttgatctaaatttgccttccatcacaattccaaaccttagaggcgaagtcactctcacaagaaccgtcactaacgttggacccgttaactcggtgtacaaggttgtaatcgatcctccaacaggcattaacgtggctgttacgccagcggaactagtgttcgactatacaactacaaagcgatctttcactgttcgggtctcgactacacacaaagtaaacactggttactattttggaagcttgacttggactgataatatgcacaatgtagccatcccagtttctgtaagaacacaaatcttgcaacgatactacgacgaaaactgatttaggaaaactcctcaaatattttactatgttgttgtgttgatgaaatatctaaagtatcacgttgatgtataatactatctaagttgtgttctattgatttgttgaagattatgtaaagcattatatcatactgatgaataatactattatctaaatagaatctcataacacactctagtttatcgactgatactcatgtataacgtgatcagtgacattggtctacgaaaatgattatatcctcgatgatcaagaatcactagctaatagaattagacacacgctcaaaagactttcagactcattaccactttttccgagaaagagtggcgttagggtcccttgttgttcagcatattccagcccacttgcagcttgcggacatatttaccaagccattgccgtatgctgagtttgcttctctcaggtataaacttggtgttgatatgttccacccacacaaagtttgtggaggagtattagagagaagctcaaaaatagagcttggtgaaggatggggattgggctcagttgttcagcccaataataacattcaaaccgaaaggcccatcaagcccactcaacaacgtgtcacaaaagacaaaagaattgacgaagagaaacaaggacgaaacaatgccgttgcaaaaggaacaaagctacaggaaaggacagtgactcatcttgagacatagaatagtttaattgcacttagcttgttaccaaacaatgccaatgtgtaaggcaactagggttttacaagaattagctttagtataaataatgaactatgcctcttgtaatattttaagcaagaaaacttaatagaaaagttctaatctttcttcacggttctactcaagtttacaggtttgacccttctaaacttttttcatgaggtaaatgaaaggcaaatatggcattaccaaaccaagcaataacagcagtgttgacccaaaataataaaaagtcaaatgtgtctagcaacgtcgtttggttcaatcttctcctctctctcgtcgtgtcgcttagagggattttgattcttttgtttctgtttgttagcattataaattaactagaattatgttccttcatatttacaatatatattaaaatattttgagaatatcaaccatatgcgttagtgttaaagatataaagaagttgtatatatcgttataacgaagcaataaaaaaacagttaggaaataagaaacagtttttaatttttaaacgaataactggatattagtcccgcgtataccgtatgactatattttttaaaaaatgtaaaagtttaatttgtttagtcgactaaaattaaatatgatttaatgttttgtattttctaaatgtacaattcttatatctatattttttagtgtacaattactatgtttgatttttactgtttaaaaatataaaaacaataacatatagttcattaagttaaaatataaattataaataattttaattttaattatatttttttttattattgtttgttttgtttagtgtttaagataatataattgtattttgattgttatatctaggatttcatccgtggtatactgtctcgtattactattgatccaaatccgtcctactatctaattttgttcactgaaattaaatatatttaatggattccccctggtataccgtctcgtattactaacgatccaaactcgtcctaccatctaaccacgttcagtgaaattaaacatatctaatagatttcacctatggtataccgtcgcatactactatcgacccaaaatcgtcctaccatctaaccctgttcagtgaaattaaacattatattgttaaatttttaataatactttaatttaaaagataaataattcaaatcaatttaaaaagttttatttcaaatggttatttaattgttataaagttcatatattataatattctaaagctttcctaccatctaatctcgttcggtgaaattaaacattattttttattaatttttgttttaataatacatttattgtaagttttctaattcaaatcaatttaaattttttctttcaaatggttatttatttttttttagattttctatattataaatattctgaacgttgttccgttaaatattctaaacatttaataaacttttaataattacaatattttccttttaataaagtataatattaattttgtcctaagatttctcattttgtaagtaattagaattgatggagatgtatattaaataaagaaatgctaataattaagaatattaattaattgataataattaatgctaatgatatttattgttaataagttccaacttgaggatttatttaataaaagtgttgcaaaaatgtatatgtagattgtgatttttttttttttttttgtcgtgaataggtgtgaaaaagagtttgtttggagattgtagagatcttgcgatatggagaagaaaaaattattttttgtttttctctttgttttgtcgtaaatagatgtgaaaacaaaaaagtaagagaatagaatttgagacttattgcacatgtcaaaaagagaatgcatcctttattggaaaaaagactattgatagtataattagatttagcaagaaaaacaaattaagtgttctaaccaattctaatctatggtaggtctgaagtcattttccaaggatatttctctattctttcttgatattcgtatttatttatggtagaaaactatttagagttgccttattatatagaactagatgattacccgcgctacgccgaggttttttcggattttttgtattatttaatttaaatttaatttttatttatctaatcattcactcatgcaataaacaattacttttagtattaaaaatatttttttctaacaacattctcaacaatgcatcatacatataattcataaacaacgtttgtcttaaaccaatttaagagagggtagtgttggattctagaaacctaagaatttgatgatagagctccttacgtatgcttcagcctcagtgatttattatataaatgtcataagagaatataaatatcaatttaagagaataacttattcaaatcattaagtaattcacgactattatacattcatactttgagtttggattacaaaaaaaaaatcttcgagtatgagaaaactattaaaataattttattgaaaaatcatataaataaaaataaatttagtaatagtataattaaatatgtaaaataaaattaaataagaaatatatcattaacctataaattagaagttgaagagcttacattaattatttaatagacacatgtcaaatgctaaagtgatgatgtgtcaatcatacggagagagttgaccaactttcatatatatgattcagtattacaagaaattaaaccaagaaactactttaatgttaacaattcagaattaatacttaaaattcaatgtatgcagtaatttggccaataaactattctagtgttccgaatttgatcatttttaatctcaatattgaactatatagctttaatgtatttttgttaaaaattaaaaaaaaacttttaaatttgataaacccaatcagaaacagaaacaaaaacagaaaatattgatgatgataattgagtcaaaagtagctggtaaatttatcacatctttcccaaaagggaaatctatataacttcaatatacaaactataaagtaatttagcaaagaaactagtttaatgtcataatctgaccaattattatttaggtagttacgtttatagtcatttcttcaagatacttctctagttttcttatgtcttatcacgaattgtaatctctgatagagaattattcagagttgcttaacatttaccatcgaatattaattagaagaattttaggcaagactactcatagttaatatttaaattcaatatagcacacctattgtttctactatgttgagtaattttttcaaataaataacagaacattttttttgagaaaatttcatagaaaatctaaaatattaccacacaatacataaacaatatttttaaataaaagtttataaatttgacgtttcttatataaaaaaatgaatttgaagaacatatagacatggtacttgtagtaacgaaagtgtggtttgattaaatcagatttaatctatttttatttatatcatgtattgtgaaatgattctcccatgaattaatgttgtattttataagctagggatcagtttttaatataattattttagtaggttgtgataaaaaaaaattgtgtatattattttaattatattatatgtggtagatttgttacttgttagtattgctgaggcggatggaatctcggttagatgggttcgatttcgatttccaacctaaacattgctaaacatttttcttttatttaggtaaatgaaggtcaaatatggcatttctaaaccaagcaataaccacagtctaagttgaccaaaaataataaaaagttaaatgtctctagcgatgtcgtttggttgagaattgtattcttctcctctctctcgtcgtgacgcttagggatttggttcttctgcttcttagcattataaattaatttagcaagaaaaactacttatgtgttcttaatctgaccaattctaatctattgtaggtatgaagtcattttcccatgatatttctctattctttcttaacattcgtatttatctatgaactatttaaagttgccttattatatagaactcagtattacaagaaatttagccaagaaactaatttaatattaattattcaaaattaatacttaaaattcagtgtatggagtaagttagctaataaactattctagtgttctgaatttgatcattttttatctcaatatcgaactatatagctttaatgtatttttggtgaaaattaaaaaacaaacttttaaacttgataaacccaatcagaaacagaaacaaaaacaaaaactattaatgatgatgattgagtcaaaagtagctggtaaataatcacatctttcccaaaagggaaatcaatataacttcaatgtaaacattatttgagctctaattaattcggatgacaaaaaaaaaaaaattagcaaagaaactagtttattagtgttcataatctaaccaattctagcctaggtaggttatgtttatagtcatttctccaagatacttctctagtcttcttgtaatctctgatagagaattattcagagttgcttaatatttaccattcaatattaattagaagaattattaagactactcaaagttaataattaaattcaatgtttgaagtaatttagccaaacaaatattatagtgttcttaacctaatcagttttattctcggtagagaattattcaaagttgcttactatttttaaattagtgcttgaattaatttaacttacatacaactatagtgttcttattttgatcagttctaatcttattagagaacaactcaaagctgcttaatattgaaaatccaatgtttgaaataattatagattttttaatttgaattatgtcaagattgaaacattgactctcaaaaacaaagcaacccacatggttgtagaaagagtcctcgaacgttagaccttatataaagcctttgcttcattgacaatcttaaacatcgaaacatttatctctttatcatttcaagagggaaaatgagcaaaaccataattctcttggcgttttttctatctatagttttgaatgtgcagatcagtttcgtcgttgctgagagcaaggtaattggtatttatgcgagatctctcttgctcatgcaacataagcattgacttttgtattgtttttgcctttgtgatcaaataggtttatgtagtttacttgggagagaaggaacatgacaatcctgagtctgtcactgaatctcaccatcagatgttgtggtcacttcttggaaggtatgatttagtacttctgcataggaacttttgaaatatctcagatagtttactttcttgatttgtcatgtttcagcaaagaggctgtccttgattcaatagtgtatagttaccgacacggcttttcaggctttgcagccaagctcactgagtcccaagcacagcaaatttctggtacttttagcgttgaactcttctctgtttcttgatttgatttaaaccaagaagttctttttaaaaaaaacaaatcaatgccctttcttgaaaacagaactgcctgaagtagtacaagtcataccaaatacattatacgaaatgacaacaacaagaacttgggattacttaggtgtatctccgggaaattcagatagtctcctacaaaaggccaacatggggtacaatgtaatcgttggagtcatcgacacaggtatgtgcatatcgaaaatatgtttgattctctcttaaagacatgattactaatagaaaacattaaatgtggtgacaggagtgtggccagaatctgaaatgtttaatgacaaaggttatggaccaataccaagccgttggaaaggcggctgcgaatctggcgaacttttcaatggctccattcattgcaacagaaagctgataggagcaaaatactttattgatgccaacaatgcccaatttggagtcttgaacaaaacagagaacccggactacctttccccaagagactttaacggtcatggcacgcatgttgcctcgactattggtggttcttttctgcctaatgtaagctacttaggcctcggacgaggaaccgcaagaggcggtgcgcccggtgttcatatagctgtttataaggcatgctgggttcaaagagggtgttcgggagctgatgtcttaaaagcaatggatgaagctatccatgatggtgttgatattttgtcactctctttgcagactagtgttcctttatttcctgaaaccgatgcgagggagcttacctccgtgggagcattccatgcggtcgcaaaggggattcctgttgtagctgcagctagtaatgctggccccacggctcagaccctttcgaatgtagctccttgggtcttgacagtggctgcaaccactcaagaccgttcttttcctacagccataacacttgggaacaatataacaatactggtatatatatgttctgttttactatatataaactataaaatttactgtttctatgtagtttaaaatcattatgctaaaatttcctctttgtttaatgtagggtcaagcaatatttggcggttcagaactcggttttgttggtcttacttatccagagagtccactttcagggtaacacagaattacatatttcatgttttaatcatttgcttgttccgtacgttaaaaacccgcgagattgcgtctttggacatgacatagcttttaacttgcagtgactgcgagaagctctctgccaatcccaagagtgcaatggaaggaaaagttgtgttgtgtttcgcagcatctacaccgtcaaatgctgctataaccgcagtaataaatgctggtggtcttgggttaatcatggcaagaaatccgacccacttgcttcgtccacttcgtaactttccatatgtttccgtagatttcgagctcgggaccgacattttgttttacatacgctccacaaggtatattttcgaaacactcacaatatcttttacaaacacattgactaaacatattgtgttttgtttttttagatcacccattgtaaacatacaagcttcaagaacactttttggacaatccgtgtcgaccaaggtagcaactttctcatcaagaggacctaattcagtctctccagcgattcttaaggtagataataccatttctaaccttttaagattctctgttttgtaaccgcttctatgttttgtaaccgttttttttgctgttattgcagccggatatagcagcacctggtgtgaacatactagcagctatttctccaaatagctataaatgatggaggttttgctatgatgtcagggacatcaatggctactcctgttgtttcaggagttgtagtgctcctcaaatcattacatcctgattggtctccttctgctatcaaatcagctattgttaccacaggttcttatcatcatcatcagaaatgttgttataacagttttcttatcagaataacttattaatccgaaggaatacattttaacatttcagcttggagaactgatccatcaggagagccaatattcgcagacgggtcaagccgcaagctagctgatccgtttgattacggaggaggactcataaatccagagaaagctgtaaaaccaggtctcatatacgacatgacaacagatgactacgttatgtacatgtgctctgttgattacagtgacatttccatttctcgagtcctcggaaaaataactgtctgtcctaatcccaaaccttctgttcttgatctaaatttgccttccatcacaattccaaaccttagaggcgaagtcactctcacaagaaccgtcactaacgttggacccgttaactcggtgtacaaggttgtaatcgatcctccaacaggcgttaacgtggctgttacgccaacggaactagtgttcgactctactactacaaagcgatctttcactgttcgggtctcgactacacacaaagtaaacactggttactattttggaagcttgacttggaccgatactctgcacaatgtagccattccagtttctgtaagaacacaaatcttgcaacgatactacgacgaaaactgatttaggaaaactcctcaaatatttttctatattgttttgttgaagaaatatgtaaagaatcatgctgatgaataataatattatctaagctgttttatattgatttgctgaagaatatgtaaagcattatatcatactgatgaataacactattatctaaatagaatctcataaaacactctagtttatcgactgatactcatgtatgacgtgatcagtgacattggtctacgaaaatgactatatcctcgatgatcaagaatcactacctaatataaaaatccctaatttttttcttgtccatattcctctcacgtttggacagccctaaccggttaccggtggtattatatgaatcatagtttcacggcaagctggggctctactccttccaatcctcacggccacatcaacctctcgacatcaatcgtttgtgatgaggtatgcgtttcagattactatatatacacagcatttggcgagaacgaaatggacgtcgtcatggtgagtctcacacgccagtttcaaagctcacatctatgattgataagagtagatccgcaatcgtctaagcacaatggccacttagggttctatggactacgaaggcatgtaaaatctgaaaggtaaagcttggaggaaatttggtgtgaagtatcaaagtagaaacttcagcattattaaacaacgttaacttgaacataattaaacaacgttacataaagtcaaacagtttgatacatacaagtatacagtataagtatagatggttacataaaattaaatactttcaacgttaaataaactttaatacttccacgaatggttagtcatttttataggttcagttttcatcgtagtagttctgcaaaatttgagttctcacagagagaggaatggtcacattatgtagagagtcactccaagtcaagcttccaaagaagtaacctgtgttgattttgtgtgtggtcgaaactttgactttaaaagagacccttttggttgtagagttaaacagaagcgtctctggtgtcacagtcacttgaatgcctatcggtggctcgatcacaactttatagaccgactcaagttgtccaacgttagtgagggttctggtgagagtgacttcatctttgaggtttgggattgtgatggaaggcaagttaaaatcaagaacagatggtttgggattcgaacaaactgttccttttccgacaagttgagagattgatgtctcgttgtaaccaacagagcacatgtagagaacatagtcttcaagtcccaagtcatatacaagaccaggttttgcagctttctctggattcacaaggcctccaccatagtcaaacggatcagctagcttccgaggtgacccttctgcaaatatctgctctccaaatggatctgttctccaagctacatagagtaaataaaacaattaagatcagtatgtttttgtttttttctagcattgtataaagaaggtaagaacctgtggtgacaatggctgatctaatggcagcaggagaccaatcacggtgcagagctttgagaagagcaacaactcctgaaatggtaggagctgccattgatgtccctgacaagaaaatgaatcctcggtcgttgaaagttttattggtagttgtagccgctaatatgctcactcctggtgctgctatatccggctgcatttgtgacaataccatgagattacacacatcttgtagtaaaataatgtaatatgtctgaaaaacagaacaacaaaaaaccagaacatactttgaggatggcaggctcaattgaattaggtcctcttgatgagaaatctgcaacctttgtgcccactggttgtccaacaagtgttttagaaggttgtatcttcacaacaggtaatctgaaaattatatacaagtccataaaaatactgatgcatgttcatatttgctcatagttcatatattcataccctgtggaacgtatgtataaaagtatatctgtcccaagctcgtagtcaacagcaacacaaggaaaatcatcttcacatggtgaaagattgtcgccggggtttcttgctacaattacgccaagaccaccagcttccttcacataagacacagcacttgatacagtgatgtaacgtgttgatgttgtgaagcataacacgactttccccgccattgtatgattggagttgaaaaatagaagctcacagtcactgcatgatatgatgttagagaaatgatgtcatccacatagaaagatttggtcctaattaatgagaaactagagatttgatcttcacccagaaaaactctcgttgctgttccctggattctctgggtaaaccaagctagtgaagccaagttctggaccggtgtacattgcttgaccctgtaatacaattaccaaactcacactaaggcacgtatcatcaaacattatgttgtgaaaaaaaaattatggtgttgtatatatcttgttgttaccaatatcagtttattgttcccaagtgtgataggtgtgggaaaagatcggtctaaagtagttgcagccactgtcaaaatccatggagccgtgtttcccacagtctgagccgcaggaccagagttacctcccgaacaaacaactgtgataccctttaaaacagcatggaatgctcccgtggctatcacggcgcgaacatcagtttctgggaagtaaggaaaacgatagccgatagacaaggacaaaacatcaacaccatcatgcatagcttcatccatagctttcaagatatcagcagatgaacatgtatttatgtcaaaacgatctagataccaacaagctttgtacatcgctatacgagcacgtggtgccccacctctcacagtccctccagctaaccccttgtagcttatgctaggcacgtaggaaccacccgctatggtggctacatgcgtgccatgtccgctacggtctctaggggaaataaagtcaagtgattctgtggagttgaagctttcgtgcgtcgcaagaaacccattgatgaagtatttggctcctataagctttttgttgcactgagaggaagtgaaattctctcctgatacacagcctcctttccagtggcttggcactggtccaatcccattgtcattaaagacttcagattctggccaaactcctacaacctcagaaaatgatttattgatagaggaaacaaaagcaacaagagaactaaaatcaatctacaatgtagcaaaaaagaaatgcacaaataaacactcaaacctgagtctacaatgccaatgataacttcttcacccatattagtgtcatttagaagatttttaggattggcgacggaaaggcctaagtagtcccaagtccgagttgtatctagttggtagaagctatccggcgtgacgtgaacaacttcaggtaaatctgttgtcaaagagaataagaaatgaaattgattccacgtgggtttgttgagacaaatgaaagatgtcatgtaaaatatatgtcctatctatctgtttccttgcaagccaagtaaaatataagattttaaaattatttacctgcaagcttcttggcttgggacttggtaagcttggctgcaaaacccgagaagccatgtcggtaactatggaccattgaactatgggcatcctctttactgtttaacatggaacaaaaggcaagaaatctgagtaatcttttgagaaatttttaaacttgagatagagaaatattgaagcaaacgcaagaaccatcaatcatgattgtacaaatagagacatagtatagaatggagaaaactacacttacataccttccaagaagtgaccacaacatccgatgatgagattccgtgacaaactcgggatcatcgtgctgcttctcacccaaataaactatgtgaacctattgaaacagaaaaactttttaagctatttatgttgcttgtaagagaatagccttatataattgtaaagtaccttgctctcagcaccggcatgtgcaacgaaagtactcagcccgttgagaattattgccacaaaaattaaggttctgcaactcttcattccaagaaaaaaagggttaaccatttttcaatctcaagccacaaagaaagagatgtaatgtatattttggagtctaatatcgagaagcttaagcatttatatagatgtctactcaagcagagtttgaccaagaatgtttctattccttggaattgttctgaattttgcttgtttgaatctccaaattttcatcatcgtcagaatataaaatccacacatattaatctgaagaatatatcaaactctgttgattattcaactaaactctagtttattacaaatgatggagcaaacacaccgatcaatagattatgacttatatcaacaattaatggtaaacatagcaagcaatggatggaacaaacacatcaatccacagaccaatcgagagatttactttgtaatatgctgcaaaaggattgggttgactctcctagaccataataaactcaagtgttcatgctcatacaagcttgttttgctatttctgaccaaaaaaaaattaaacttgaagtgtaataaagctggaatcagtatgagttttgaccaaagaaaagaaagattctttagctaagtttagagctttacttggcaagctccatgctgattctttggctctatagaaaacagaacaaatctcttgtgttaaaagtttggtcaaagttgatttcagaaaaagtctctgcgacaatctccgagctttgtcaaattataagtttcttagcaaatgttgaggcaactgagataatatttgggaattttcccttctttaattaaagtttacaaagagtcaaggagttcaatacatacatgtatagaatataagtagataagtataagcacacaaatggttagtcatttttataagtttaattttcatcataatagttctgcaggatttgcgtcctcacagacaaaggaatggtgacattgtgcagagagtcactccatgtcaagcttccaaagtagtaacctgtattggttttgtgtgtggttgagactttaactttaaaatagacttttttggtcgtagagttgaatactagcgtctccggtgtcacagtcacttgaaaacccaaaggtggctcgaccgttactctatagactgagttgagaggtccaacgttagtgacagttcttgtgatagtcacttcgtctttgaggtttgggattgtgatggaaggcaagttgaaatcaagaacagatggtttcggatttgaacagactgttgttttaccgataagctgagagattgatgtctcgttgtaaccaacagagcacatgtagagaacatagtcttcgaggcccatgtcatatacaagacctggatttgcagatttctctggatttacaaggcctccaccatagtcgaacggatcagctagcttcggaggtgacccttcagcaaatatctgctctccaaatggatctgttttccaagctgcagccagagtaaaagacgcttatagagattagtatgttcttgttttgtcctagttacatttgatgagaagataagaacctgtagtgacaatggctgatctaatggcagcaggagaccaatcacggtgcagagctttgagaagtgcagcaactcctgaaattgcaggagctgccattgatgttccagacaacataatgaacccttggtcgctgaaagtggtgttggttgtagctgccaatatgctcactcccggtgctgctatatccggctgcattcatatgattgataaaaccttaggcaagatcatttaatgggtctgaaaagaaaagacaaagcaaggattctgtactttgagaatcgcaggggcgatcgaattaggccctcttgatgagaacgttgccacttttgtaccaactggttgtcctacaagtgttttagaaggttgtatcttcaccacaggcgatctgtaaaccacaagtgtgaaacttagtctcagatatatttccttaaaatcctgagtggtgaagatatattttcatacccactggaccgtgtgtagagaagtatatcagtcccaagctcccagtcaacagcaacacaagggaaatcatctagacatggctggatagcgtaacccgggtgtcttgcgatgattacgccaagaccacctgctctcttcacataacgcgcagcgcttaatacagcaccgccgtaaggtgatgttgtgaaacacaacacaactttcccctccattgtacgattagaattgaataaaagctcctcacaagtactgcattacaggaaccatggtgatgtcagagaattgatcttcttcacattgcaagatttgatgaacatcaagaaactagaaatataaaaattacccagaaaaactttcgttgctattccctggattctcaggataaaccaagctagtgaagccaagtcctggacctgtgtacattgcttgaccctgcaatatagtgaacagactcacaataagacacagatgtaatctgagtactgagtagaacaattaataaagagcgtatatcttgttgttaccaatatcactttattattcccaagtgtaagaggtgtggcaaaggaccggtccagagtagttgcagccactgtgatgatccaaggagctgtgtttgtcacggtaagagaatctgggccagagttaccaccggaacaaacaacagtgataccctttaagactgcatggaacgctccagtagttatcccatcgcgaatatcagtttcaccatatagaggaacgctggagcctaaagagattgacagaacatcaacaccatcatgcatagcctcgtccatagctttcaagatgtcagcagatgaacaagtcgttgtgtcatcatcatccagataccaacaagccttgtacattgctatatgagcacgaggtgccccgcctctgacagtccctccagctaagcccttgtagcttatattgggcacgaaagaaccacccgcaatggtggaaacatgtgtgccatgaccatcaaggtctctaggggaaatgaaatcaagtgaatttgtggagttgaagctttcgttctccgctagaaaaccattgatgaaatacttggctcctatgagctttttattgcagttagaggagttgaaattctctcctgtttcacaacctcctttccagtggcttggcacaggcccaaacccactgtcattaaatacttcagattcaggccatactcctgcaaccacagacaacattttagtcatagatgcactaagaaaaggaatcaaaagaagcacaagacttaagaagtctaccactataagcagagaatggatgtacaaataaacattcatacctgtgtctataacaccgatgataatttgttcacccatattagtttcatgtagaagactctttggattggcagcagaaaggcctagataatcccaagttcgagttgttgccagcttatagaaactatccggtataacatgaacaacatcaggtaaatctgtggccaaataacattatcaatgaaaaggaaaaaaatcagatggtcttgttgagacaatcaagatttcatgtaagaaaatgtgagaagaagaatgagtaccagctatcttcttggcttgggactcggtaagtttagccgcaaaacctgagaagccatgtcggtaactatacaccattgaatcattggcatcctctttactgtaacatggaacaaaacacaagaaacatgaataaccatttgagacatgattatacttgaaaggagaaactacccttcacataccttccaagaagtgaccataacatccgatgatgagattccgtaacaaactcaggatcatcatgttgcttctcacccaaatacactatatgaacctattattgatgatcaaaaacataaccaaccaattatatcagtctctgtttatgttatctgataaaaaagaatgactctctagtacctttctcttagcacttgattctgccacaaaacttctctgcacattgagaaatattaccaaacttagtaccacatatatggatgttctgtaattcatcattctaatcacaaagtcaaagagatatgtaatactaatgaaggagaataaatcatttatatagatatctcctgaagacgtgttaaggcaaagaatgtttcaatttcttggaattgttcttaagttttaattaaaccccagttgctaacatacactaaagaatatatcccagttgctgtttttgcttagtcaactaaaggttagtttattgcaatgtatgaagcaaaaacatatcaaacagagaaaatatgatggatgattaataataacctttacaggtaaaaccttcctaaggtatgattccttctcaatgtaacttacttctttggtcaaaaagattgtttctttggatgatttcagagctttacttggtgctgtttcttaagaacaagtctctgttgttcaaagcgaaacttagcttcacaatgctcccttacttcggggggttacggaggtggccggtgaatttcaacgccggagatattggattctgtaatcggagcttcatctcgagaaattttctctgaaatgaagagaggaagaaacgcaggagactggtgattggtgaagaatatttttttaagcgaacaacagcttaatgggtttgggcttctataattgatgatgggctttttttgatccatttgtaggctcgcacattaaaatctaacaataacagaaatgatattgattaatgatttttctttttggacttgaaaaaaatgagagaagcaattttggtttgtttagattactaacggcacacagttcatattccattcttatatttcacgtacttgctcaagttaagatcgtgaattgggaaattcacaaacgtattaatcttgttcttgagatatctgctatatgtgaattgttttaaatggaacaaaagaataaaaacatgttcactgatgcaaagttctagtggacgtctcagtggttgactaatcaatacaacaaaatacatatttgataatagtttttacaaccagagaagtgtcccttaaaatatcaagaaagtaaaaatacaatctgacgaacaatatattgatccagaccactccaaacatattttgtatggacaacgcttctcacaatagcagcaaataggtcgagtcatatgatgattattggacagaacgtctaccgttttctctaaataaaatgaagatgaaccatgcttcatgtataagtcccacccaagcaaacatttaatgtgtagagtgagacaacagtactcatcacacacataaaaccgctttgttggatctattgttccctcgcaaatttcgcaccaatacgttatggtacttgtctcgttcccataaaaaagagtgagcacatgcttatcatgcttatacctcaccttttgaggtaaagtagcgcatacaaaacataaagcaaagtcacactcaatgcaattgaatgtttcatttgtcctagcatatctgctctctttgcaaaccgaacatcttcttggatcctcttcaggtttggatgttaggaataaaggatgcatatggctttcatggactagtggctcagatgttgtggcgaactgcacaggtagcttgaaatcacatccttctttaccacactcgtagaagaaaccggctgtccacaacgaagggtaagctgcacacataacctcatggtctacaatattgtcatatcctagactgagcatatgtggatgtataggatgataaatttggcgaaaaagatttgcacattcttcgtggagaataaactcacactgcatgcatgagtagaagttaccaaaatagattggcctgatgcatgcttgacactccttgttctcatcgtagtctctatttatgttgtcatcaagtctcaaatgatgatgttgatgactaaaatgttgtatgattccatcgcttatcttgacaaatggctcaacttctttaatttcttcttcttgctctccctcaagttctttaccatcccacacatttctttgtgtagcacattttgaatgtgctgcataaaaacaaccctccttgatgcaagaatatcccccataatcattgtcgatgtttttttgacaaacaccacaagacaatctttcttggtcaaaagaaggggtaaaagagatacgatggtgatgccgtgagatccttatgacacgtggtaagtcgatacatcttagatggaccacaaagtcacaagggggacacatataaagaggagatcttgcatcagccaagccgcaaaggttgcaagttaagaaagcacgtcttggaaacagaacaagagtatgctcatgccacttcggatggtctatagataagactggtggtttcttcgcacaagccatattcatagcataatcacaggacacgcaacaataaattaccttttcgagatcatcatcgcaacaatagcatttcctctctttgccttcactgaaaaagacaagctggagagaatgttttcggtggagatggtgtttgatctcatccggagcctgttcatattcttcatggttcttgccgttgcatcctttacagccaaaataagtagcgtcttctcctgtaaacttgaatttcacccagtttccagggagacaataccacttaccccaaggctggaaatattcactcacatgaaaatttcctttttccaattctactaatagttgaggacacaaggaaataaacttctccgactttgaattgatagagctgacgagggagaagatttgatagatgagggacacgagttctggctctggctgaccgaataatgtttcacatagaggtctatcgaggtcccactccaccttcctattcgaatccgaatccgaatccgtagaaatgatttgagaaaggagtgatatgagctccgacagtgggctcagctcgggatttaaatccatggagtcaaagagtgagattgcttgagtaactagtgacatgaactccgactctggcttcggctgtgaatgcaaatccattgagctgaccagagagattatttgagcaatgagtgatataatctccgaatgagtaactgaattc

SEQ ID NO: 564 - DNA, 78530 bp, Arabidopsis thaliana
aagcttggctgcaaaacccgagaagccatgtcggtaactatggaccattgaactatgggcatcctctttactgtttaacatggaacaaaaggcaagaaatctgagtaatcttttgagaaatttttaaacttgagatagagaaatattgaagcaaacgcaagaaccatcaatcatgattgtacaaatagagacatagtatagaatggagaaaactacacttacataccttccaagaagtgaccacaacatccgatgatgagattccgtgacaaactcgggatcatcgtgctgcttctcacccaaataaactatgtgaacctattgaaacagaaaaactttttaagctatttatgttgcttgtaagagaatagccttatataattgtaaagtaccttgctctcagcaccggcatgtgcaacgaaagtactcagcccgttgagaattattgccacaaaaattaaggttctgcaactcttcattccaagaaaaaaagggttaaccatttttcaatctcaagccacaaagaaagagatgtaatgtatattttggagtctaatatcgagaagcttaagcatttatatagatgtctactcaagcagagtttgaccaagaatgtttctattccttggaattgttctgaattttgcttgtttgaatctccaaattttcatcatcgtcagaatataaaatccacacatattaatctgaagaatatatcaaactctgttgattattcaactaaactctagtttattacaaatgatggagcaaacacaccgatcaatagattatgacttatatcaacaattaatggtaaacatagcaagcaatggatggaacaaacacatcaatccacagaccaatcgagagatttactttgtaatatgctgcaaaaggattgggttgactctcctagaccataataaactcaagtgttcatgctcatacaagcttgttttgctatttctgaccaaaaaaaaattaaacttgaagtgtaataaagctggaatcagtatgagttttgaccaaagaaaagaaagattctttagctaagtttagagctttacttggcaagctccatgctgattctttggctctatagaaaacagaacaaatctcttgtgttaaaagtttggtcaaagttgatttcagaaaaagtctctgcgacaatctccgagctttgtcaaattataagtttcttagcaaatgttgaggcaactgagataatatttgggaattttcccttctttaattaaagtttacaaagagtcaaggagttcaatacatacatgtatagaatataagtagataagtataagcacacaaatggttagtcatttttataagtttaattttcatcataatagttctgcaggatttgcgtcctcacagacaaaggaatggtgacattgtgcagagagtcactccatgtcaagcttccaaagtagtaacctgtattggttttgtgtgtggttgagactttaactttaaaatagacttttttggtcgtagagttgaatactagcgtctccggtgtcacagtcacttgaaaacccaaaggtggctcgaccgttactctatagactgagttgagaggtccaacgttagtgacagttcttgtgatagtcacttcgtctttgaggtttgggattgtgatggaaggcaagttgaaatcaagaacagatggtttcggatttgaacagactgttgttttaccgataagctgagagattgatgtctcgttgtaaccaacagagcacatgtagagaacatagtcttcgaggcccatgtcatatacaagacctggatttgcagatttctctggatttacaaggcctccaccatagtcgaacggatcagctagcttcggaggtgacccttcagcaaatatctgctctccaaatggatctgttttccaagctgcagccagagtaaaagacgcttatagagattagtatgttcttgttttgtcctagttacatttgatgagaagataagaacctgtagtgacaatggctgatctaatggcagcaggagaccaatcacggtgcagagctttgagaagtgcagcaactcctgaaattgcaggagctgccattgatgttccagacaacataatgaacccttggtcgctgaaagtggtgttggttgtagctgccaatatgctcactcccggtgctgctatatccggctgcattcatatgattgataaaaccttaggcaagatcatttaatgggtctgaaaagaaaagacaaagcaaggattctgtactttgagaatcgcaggggcgatcgaattaggccctcttgatgagaacgttgccacttttgtaccaactggttgtcctacaagtgttttagaaggttgtatcttcaccacaggcgatctgtaaaccacaagtgtgaaacttagtctcagatatatttccttaaaatcctgagtggtgaagatatattttcatacccactggaccgtgtgtagagaagtatatcagtcccaagctcccagtcaacagcaacacaagggaaatcatctagacatggctggatagcgtaacccgggtgtcttgcgatgattacgccaagaccacctgctctcttcacataacgcgcagcgcttaatacagcaccgccgtaaggtgatgttgtgaaacacaacacaactttcccctccattgtacgattagaattgaataaaagctcctcacaagtactgcattacaggaaccatggtgatgtcagagaattgatcttcttcacattgcaagatttgatgaacatcaagaaactagaaatataaaaattacccagaaaaactttcgttgctattccctggattctcaggataaaccaagctagtgaagccaagtcctggacctgtgtacattgcttgaccctgcaatatagtgaacagactcacaataagacacagatgtaatctgagtactgagtagaacaattaataaagagcgtatatcttgttgttaccaatatcactttattattcccaagtgtaagaggtgtggcaaaggaccggtccagagtagttgcagccactgtgatgatccaaggagctgtgtttgtcacggtaagagaatctgggccagagttaccaccggaacaaacaacagtgataccctttaagactgcatggaacgctccagtagttatcccatcgcgaatatcagtttcaccatatagaggaacgctggagcctaaagagattgacagaacatcaacaccatcatgcatagcctcgtccatagctttcaagatgtcagcagatgaacaagtcgttgtgtcatcatcatccagataccaacaagccttgtacattgctatatgagcacgaggtgccccgcctctgacagtccctccagctaagcccttgtagcttatattgggcacgaaagaaccacccgcaatggtggaaacatgtgtgccatgaccatcaaggtctctaggggaaatgaaatcaagtgaatttgtggagttgaagctttcgttctccgctagaaaaccattgatgaaatacttggctcctatgagctttttattgcagttagaggagttgaaattctctcctgtttcacaacctcctttccagtggcttggcacaggcccaaacccactgtcattaaatacttcagattcaggccatactcctgcaaccacagacaacattttagtcatagatgcactaagaaaaggaatcaaaagaagcacaagacttaagaagtctaccactataagcagagaatggatgtacaaataaacattcatacctgtgtctataacaccgatgataatttgttcacccatattagtttcatgtagaagactctttggattggcagcagaaaggcctagataatcccaagttcgagttgttgccagcttatagaaactatccggtataacatgaacaacatcaggtaaatctgtggccaaataacattatcaatgaaaaggaaaaaaatcagatggtcttgttgagacaatcaagatttcatgtaagaaaatgtgagaagaagaatgagtaccagctatcttcttggcttgggactcggtaagtttagccgcaaaacctgagaagccatgtcggtaactatacaccattgaatcattggcatcctctttactgtaacatggaacaaaacacaagaaacatgaataaccatttgagacatgattatacttgaaaggagaaactacccttcacataccttccaagaagtgaccataacatccgatgatgagattccgtaacaaactcaggatcatcatgttgcttctcacccaaatacactatatgaacctattattgatgatcaaaaacataaccaaccaattatatcagtctctgtttatgttatctgataaaaaagaatgactctctagtacctttctcttagcacttgattctgccacaaaacttctctgcacattgagaaatattaccaaacttagtaccacatatatggatgttctgtaattcatcattctaatcacaaagtcaaagagatatgtaatactaatgaaggagaataaatcatttatatagatatctcctgaagacgtgttaaggcaaagaatgtttcaatttcttggaattgttcttaagttttaattaaaccccagttgctaacatacactaaagaatatatcccagttgctgtttttgcttagtcaactaaaggttagtttattgcaatgtatgaagcaaaaacatatcaaacagagaaaatatgatggatgattaataataacctttacaggtaaaaccttcctaaggtatgattccttctcaatgtaacttacttctttggtcaaaaagattgtttctttggatgatttcagagctttacttggtgctgtttcttaagaacaagtctctgttgttcaaagcgaaacttagcttcacaatgctcccttacttcggggggttacggaggtggccggtgaatttcaacgccggagatattggattctgtaatcggagcttcatctcgagaaattttctctgaaatgaagagaggaagaaacgcaggagactggtgattggtgaagaatatttttttaagcgaacaacagcttaatgggtttgggcttctataattgatgatgggctttttttgatccatttgtaggctcgcacattaaaatctaacaataacagaaatgatattgattaatgatttttctttttggacttgaaaaaaatgagagaagcaattttggtttgtttagattactaacggcacacagttcatattccattcttatatttcacgtacttgctcaagttaagatcgtgaattgggaaattcacaaacgtattaatcttgttcttgagatatctgctatatgtgaattgttttaaatggaacaaaagaataaaaacatgttcactgatgcaaagttctagtggacgtctcagtggttgactaatcaatacaacaaaatacatatttgataatagtttttacaaccagagaagtgtcccttaaaatatcaagaaagtaaaaatacaatctgacgaacaatatattgatccagaccactccaaacatattttgtatggacaacgcttctcacaatagcagcaaataggtcgagtcatatgatgattattggacagaacgtctaccgttttctctaaataaaatgaagatgaaccatgcttcatgtataagtcccacccaagcaaacatttaatgtgtagagtgagacaacagtactcatcacacacataaaaccgctttgttggatctattgttccctcgcaaatttcgcaccaatacgttatggtacttgtctcgttcccataaaaaagagtgagcacatgcttatcatgcttatacctcaccttttgaggtaaagtagcgcatacaaaacataaagcaaagtcacactcaatgcaattgaatgtttcatttgtcctagcatatctgctctctttgcaaaccgaacatcttcttggatcctcttcaggtttggatgttaggaataaaggatgcatatggctttcatggactagtggctcagatgttgtggcgaactgcacaggtagcttgaaatcacatccttctttaccacactcgtagaagaaaccggctgtccacaacgaagggtaagctgcacacataacctcatggtctacaatattgtcatatcctagactgagcatatgtggatgtataggatgataaatttggcgaaaaagatttgcacattcttcgtggagaataaactcacactgcatgcatgagtagaagttaccaaaatagattggcctgatgcatgcttgacactccttgttctcatcgtagtctctatttatgttgtcatcaagtctcaaatgatgatgttgatgactaaaatgttgtatgattccatcgcttatcttgacaaatggctcaacttctttaatttcttcttcttgctctccctcaagttctttaccatcccacacatttctttgtgtagcacattttgaatgtgctgcataaaaacaaccctccttgatgcaagaatatcccccataatcattgtcgatgtttttttgacaaacaccacaagacaatctttcttggtcaaaagaaggggtaaaagagatacgatggtgatgccgtgagatccttatgacacgtggtaagtcgatacatcttagatggaccacaaagtcacaagggggacacatataaagaggagatcttgcatcagccaagccgcaaaggttgcaagttaagaaagcacgtcttggaaacagaacaagagtatgctcatgccacttcggatggtctatagataagactggtggtttcttcgcacaagccatattcatagcataatcacaggacacgcaacaataaattaccttttcgagatcatcatcgcaacaatagcatttcctctctttgccttcactgaaaaagacaagctggagagaatgttttcggtggagatggtgtttgatctcatccggagcctgttcatattcttcatggttcttgccgttgcatcctttacagccaaaataagtagcgtcttctcctgtaaacttgaatttcacccagtttccagggagacaataccacttaccccaaggctggaaatattcactcacatgaaaatttcctttttccaattctactaatagttgaggacacaaggaaataaacttctccgactttgaattgatagagctgacgagggagaagatttgatagatgagggacacgagttctggctctggctgaccgaataatgtttcacatagaggtctatcgaggtcccactccaccttcctattcgaatccgaatccgaatccgtagaaatgatttgagaaaggagtgatatgagctccgacagtgggctcagctcgggatttaaatccatggagtcaaagagtgagattgcttgagtaactagtgacatgaactccgactctggcttcggctgtgaatgcaaatccattgagctgaccagagagattatttgagcaatgagtgatataatctccgaatgagtaactgaattccatttcgaatccagaatcttgggaagacttattagttgagaaatgagtgatatgagctctaactctgaatccatagtgttgccgagagaaaattgtttctgagtgatatgagaaaatatttttttgccaaagctttgaaacttactgtctccctccacatgggttgtgactcttgttctcacgcttttctatactacccataacttgcggatcttgctttaaacattatatataacaagataagattcagatgcacagatcagatcgtgtagattgactatgaaacatacaataaatgtataatcagcagctctgagtaatttacgtagcgttgttcgtactcgtttttgatctgtctactagttggtcttttttcggctttcggttttatattgttgtgttagcgtaatggtaagtgcctcagtggaaaacttcactataaatgtgactatggttaatgagcattagtcattttcctcatagccatagctacacaagttatttttttcagctcaataatatcaataggttccaaaagaacaaacatcttcttggtgttgaaaatcacaatgaaggatataactatatctctacacttctaaagcagttcatcacttgatttactaccaaaaaattacctcctcacctagaaaattcgtaaaccaaataatttccgtgacctattaccccaaatttccacagagatctgccataataacatcattaaagctgaagcagaaccctccaaccgaaccaccaacttcaaaatcaagaaagaatagaggtgtcatcacctgacatgagagtgagggagagacagatgcttctttgagaaaaatgcatcaacgtcatgatgctttgtcattatgagaatttaggcatgaataatccatatcagtcgacatctcagctgtttgtgtctctgtttcacttctcactcttcggtagaaaagaacatatgcagctgagtttctgatttcagattcatttacagatgacacatgactgtcgtcgaaatggtaccatttgttgtcatcaatcaactgcatgaaaattgacacataatgatcaaataaagaactcacagaagatctagtggcaagcacaatgggacaactgtcgagtggatatatattatataagtctataatatgatgaattaagattatgatgcagtgagaccaaatgaagtcaccaaccttagcgtaggcagtgtagtggccaccaccaagtccaccgtaatgattactaacggcatacagttcataaagatatgactggccattcttgtttttcacatacttgctcaagtctagatcatgaactgggaaattcacaaacgtatcaatcttgttcttcagatatctgctgtaagtgaacctttttaaatgaaacacaagaatatctggtaacttccacaggtctagctttttgttcgcttgtctgtgttctttgcagctcggacaaaacctgattcagaaccgtaagaaagagggtcaaagctaaatcttaaaatgaatatatcagtccatgtgattttaagttcaggctacgagttataccacatgtcatctggtcccagaggttcttctgctaaaaaagcctccaaacacgaaaacagggatatcgattcttgccttgtcttctttgcagagaaacttgttttatgaacctctggaagatcactcaagtagctggaatcatatctttcatgctcaccctcattccactcgactaaaactcttgtaacggtacccgggcttatagaagattcagactgcagtggtttaatgttcaaaccacgttcatctgtcaagaatatcctgaaggataactctctatcagatgcattgtctatctcggtatctggggatgataaaattccggatgcttggtcaacagtagcatcagcaaggtggccattatcacttccgttatgaatcttagatggggcatggaccttgtgcagaggcgacaaaaatccagagataactgcatcaatgtcagttccacttagtggttctgtgttgacataagtcacaaaaggagttccaaaaagcttcacgtcgctgcctctaacactatccagaacagccctgtggaacccaataattaagattcataaagcttaacaagaggactgaagaagagttcttgagtaacaaataaaaccaaaacatggttacctttcctgccctccatgaagaatttcgagttttgcttttcttgatcctttcggaatctgattcaaccgatacgccacaatatgctcatcatcttttatcgcactcagtgaatccaggggaatctcaaaatatctaaagatcttgtgatcatatacctgagaggaaaattacacacaatcttcagggatttcagccccaaaaaaaaggatggagaaaaaatattaatacaagaaaggaacaagccaaaaatcatacctctgcaagtaaaagactctcatcttcagctaaacaacaagcagtacctaatgcggtaatgagatctctaatagatccctgtttaggcactattactgtgtatggcatcggaagacgacttccatcgcaataaaacaccgtaattgtcatggatcgcgtaagtgttgatggcaaaggtacagacaagtacatgaagggatcaaaagtgattgatatttttccgcaaactggacaaaccagagttgacttgtattggccctgaaagaagttgaacacctcataagaactggtcgggaaaataaaatagagaaacttgtagtacttgtataaaaaactacaaccagatgaacattcaatggaagaagcgattaggaaacggtaagagagagacttacttgacagacgtcaactattacagaatcatttcgggccttatgataattccaaagctcttcagcaacttcatcatccggacgactgtcagaatctttaagttcgatgtaaggttttcgtttgaccttattcaaatcttcatgcagcccatctaataagaaagcaagcagttcctaagacaacaacaatgtcaggaacaaagaatctgattaattatgcaccatcatacagattagaggaaatgactaacttgagaatcatgctgattgtaaccactaaactgtggggcaaatctagccaatttcgtcttaaaagcgcgtggtgcaactgcattccttcctgatgaccataatttcttcaacaaatcaccaaacgcgatagcaagctcaccctgaaaattaagagttagaattatattcagaatgcatgtgagtaccatcacgaggaaatagaacatgtaagtatcaagcacttacacacattcccaaaggattatctctatttatgtcgtcactgtaatcttgcaagaagtattcaacaattggaggtgtgtgggccaaacactgaagagcgctattcataaagcaggtatttcccaaattactcaatcctgctaatcctcccttttctccttttccaagaatactcaaagaatctctgccgtcgtcttcagaagttattctcggaaagagactaaagttggacgtagtggaatgaccatttgatagggtaggccccccagcaattgtaacaatcgaccttgaaggttccagaggtaccagagctaactcatttcctgtcgagctcatagcagattgagaggaggaagacaacccatcaacttcaacaagaatctgcatggaatgcgccagtcaatgtcaaacaaagagacgaacattgatatcatgtgagttaaatgggattcggtttgtgtcgataaaagaactcaagaggcatgcattatccaacagtaaaatatttgtcaacaaagattcaagacaatgacccaaaatcaagcattattacaaactgaagtccaagtgacaaaggtgattcgtcaatatttgtcaatatacatatcacagacagttctctagatacttacatcttggtccatatgaaggcttgactcttccaggctcttgtaagataaaggatccaacagtccgtttttcctcttatcgaagtaatcccagatatgagcctgcttataaaaaaaattatcaatgtgaggcaaagctgcaaagagcacgacttcataacgaaacaatgcgtttttcatcagcaaaaactagaaatagaaatgaaacatctcaaaaacacaccttttcttgcggtacccctgtcatagcacaaaccttctcataaagttcccttatagaggcctgaaacacgaacaacccatgtaagaaagggaccaaagtggggcctaacagtttaaacacaaagattcattggctatgcataagcaccataagtaggtcgtagcaaaacaaagagcctgagtagtatgatcggggccacctaatacctgttttcccaaccgtattacagttctactttcatctcgtccgtctgtcaacataaggcagagtggataaacctctacactataactccttgtataaaagccttgacagatcaacttcctttctatcggaggacctccgctatacctgcaagagacataagaccaggtatataaacaaagaaattaaatgaaacaatcatgcagcaaaacctggaccttgtcccaatcagaaagaaccaaaagctcaccattcaacaagtcttttccaaacttgtttaggaactaaaacgtagtcctccccttccaccagcaatctacgaagttgtggatcattaatgtcgctatcactttcgataatatcatggttatcaatcggtccaggcctcggagcttccgaagactctccagttgaacattcattagccgaattctcaacatattcctgccagcttgtataccacctacactaacacaaacgttaattacgataattccttacctaatcttacaatctatagaattcaacaaaccatcaaacaatagatcaagactatccaaaacacagataccaaaaaaggaaaatctacacatagatttgaacagagaagcattacattcaatcatgcaatgatgctaattggatcaagattcacaaagatcggaacagagaagcattgattcatggaatgatactaaactggatcatcatcaagtaagtaagtaacgagagaaccttttagagatgacaaaatacaagttgccttgtttcaaattatcctccgattcgctagtaagctccgatacaatccgtttctcttcctcaggagtaaaaggcaaatcacagactccgttttctaacatgaaatcggaattagggatcgtcatcttcgaagaggagcccccaatttcaaacgaaatcagagagaatttgaaggaaccctaaattggaggagaagaaggaagaagagagtcagagaaatgtcttgttggttggattcacgatttccaattaacaatggccaatttccaaagaagtaacaatttcttttcttgtaaacaatgaattagtgtagttttaattgcgagaccctctttgtttaatgatagccttaacgtaattatatctgtgtttttttgctaccaaccaggcaaccatgaaccattgccaatacagtatacaccatttgagtatagttttagcatcaaacttttacctaatactccctttgtccttttttttttttaagaaaaacaaattatttcaaaaaaattgagtttttaggttttcaatgcaataattattagttataattgataacttgtaaacttcaatacaaattattaaatattattggtttagagttcttaaaaattgtaaatcacaaaaaataatacatttaaaacaacatttaatacgttttcttaatatttgtatttttcctaaaagatcaaacaaaaaggaacagaagcataataaaaatacaattttctattactaaactatttatttaatatttttattttatttgatcattttgataaatattactattttataattaattattagttaatataatgtaaaaatagataaattaaaaatgattaattaaatatattctttattaaagtgatgaattaaaattttattttacaattacattacttattattgttatattaagctttcggatatcagtataaataaaatgtttcaaacatattaaatagaaaataccaaatagatttgtttcttctcaaaaatatggccacaaccacaaagttcatcaaacacatcatgtttcctttgttgttattaacttattattcgtgtaatcgtgttcattgtgtttccatttacaaacgtgatgcttttcaaagacatataccattttacacggagacaactgatgtggacttctgcttgaaatacattggattcgttaaacttacgggatgtttaatattaaattttggctgacaacttttttataatgatcttttttgtatactaatacgtagaattgtaacttgaaataattaatacagtttttgaattttttataataatttcatcattttctaaaatgaatgaaaagagaaaaagagcaaaggtacatctagaaatatttaaatgtttgtgaaacaacttgacccattttttttttttaaatataattaaatattctcataaatatttaattaaaccaactaataacataataattaaactgcaagtcaaaaatactattttatgaataaataaataaatcgaccaacaaaaccaagaataactgacaatcctaaccgggttccaataaccaaaaacaccaaaaataaaacaaacgagttcctagatcatcctctcttccttgttatgattccacgatcacactttatctttacatgcatcaacaacacaatgagatgcgtaagtattatcataaatacttagtgaggcgatactcccatctacgaactatacacacaagcaaatacaaaggtataatcacgaatacaatacaaacaaaccagtcattgaacaattcacccaaaacacattcacaacacttacatatcatcacacaaaacaaatcacacaacccaatcgcttagataagctcatggtcacgcactcaccttaacaaattgattctaatagcaattaaacccaggagagactctccttgcgtcggaaacagtccagaaacgtcctacaacaagtccacaaccaaaagcaaccttgaagcaaactggacaggaaaacaccagaaacaaacagtctcaaagacgaaaccctaaaatacaagctaaccgttaactattcaatcgctccggtaaaatcctagctgcagacgtcacaaagctgcccacaaaatctcgtgccgatcggaaaacagacgagaccacgatctcagtttcaatctccgctggtcctaattcgcgtctgagaaaacgtgtctcacgaaactgcgaataactcaaccaattttaatccaaattcaattctgtaaactggagaataacgataaaggatttgggaataactctaccaaattttgttaccttttaccacgatttgatatgacgaaactgatttctcccaaaccctaacgattctgctcattctccttttctctctttttctcctttataaaacgaaaagtggctaactaaagccctaatttcgagtttccttcttttataggcacactctagggtttccaattaacccaaccaattaaaccggatgatttaaaaacaaatcctaaccgattttctggttcacgggcgttacaattctcccccactaacatagattcgtcttcgaatctagcttcacccttccactccgaggaactccgtgcaaccatcactacagtctgcattccctccaaccagaccccctctaggtctctctatccagtcgatatactcacgatttactagtcattgttgctcacaacttactctccactctcagaccgcaatcttcgagcataaaccgtcactctcaggcctcggcctacggtatctcggatatcacacatattatcttccccactcaaagtcaaaccctgagttgtgtcggctcactctcagccacaaagtcatcgagttacgacacttggagaaaataataccacaaaactcgctctcggatcgtcaccctaaagcgtgctctcggatcgtcacccgaagccaccgtacccctcgtactctaaagacaccatgtccctcgagttaccggtaccttaggagcataccccgctcctcacgagtcgttgggaccctcatttccttcgagcaacaatactaaacgcttccgagcatatctccagactctctcatggattcgcgtaagacacctctatgcctcaccatccatcataccccctcaaaaatatccttatgaccaactcccggccatctcgtaaacacacctttctcttatgttgtttactcaaactttccaaaaatagacaagtcctttctaggaaactttccatttttggaaaccgcacaacacaatcttaaataagacaactcaagtcaaatccaagaaaaaaatactcatcttattaatcatcaactgtcatgatcgttacaactccaaacgaaaatacaaatgaaagagaaataagaacaacaactcaaaagctcaaaaactcaacaacactgaaactggaaaccaaggaaaggcaaactcatgcagcaacctgcttctcgaaccacttcttgaaccttgccttcatcctcgcctctggctcccaagtctcctctgtcacaccatcgcagtcccacaggactttgatcaaaggaatcttcttctgccgaagttccttgatcctcctctcgagaactctcactggtctcgcctccaaagtcatgttgggctgaagatcctctggaatcttagccaacgcctcatcatccttgtgaagacacttcctcagcatcgacacatgaaagaccttgtgaaacgcacgcataacatcaggcaactctaacctgtatgccactggttccaccctctcaacaatcttgaacggacccatgtacctcggactcaacttagtctctgagatagacctgttcggacctcgcaacatggccatcttaagatacactctgtccccaacctcaaactcaagctctctcctcctcttgtcagcataactccgttgtcgatcctgagcttccttcatgttcagcttaagaacccggatcctctctgtggtctcctgaacataatctgcaccatatatgctcctctcccccacttgggtccagcataacggtgtcctgcatggcctcccgtacaacgcttcaaaaggagccatcccaatactcgcctgatagctattgttataagcaaactctaccagactcaagtgatccgcccaatgacctccccaatccaagacacacatccgcaacatatcctcaagcgtctaaatagtcctctcagattgcccatctgtttgtggatgataagccgtgctcatctgcaccttagtacccatctctgcctgaaagactctccaaaatgcagaagtaaacttggaatccctgtctgacacaatactcacaggtactccatgcaacttcacgatctcgctcacaaatttcttagccaacaccgccgctccatcggtttttctgatggccagaaaatgtgctgacttagtcagacggtccacgatcacccaaatagcatctttggttcgcgatacacgcaacccaaccaccaaatccatcgtgataaaatcccacttccactcaggaatgggtaaactctgcaacatgccacctagcacctgatgctcagccttaactaactggcaaacatcgcactctgcaacccaattagctacatccatcttcatcccgacccactgatagtaccgcttgaggtctcggtacatcttagtcgctcctggatgaatggaaaacatgctcgcatgagcctcactcaagatctcccgtcgcaactactcatccttaggcacacaaactcgcccatgcacaaggatagtcccattagctgcaaactgatacttagagccctctgccttataagccgcactcaacccctcatccttcttctgagccaaccgaactctagtcagaagatctgctcgatccacagcttccaatcctaatggctctcgtgccacagcacacaaccgcaaagcaccaatctcactcaccaagacctcaacactctgccctagagccgcgcccacgcgcttacggctcaacgcgtctacaaccacattagccttaccgggatggtaagctatctccaaatcataatcagccaccaactccatccatcgcctctgcctcaggttcagctctggctgagtgaagatatatttcaaactcttatgatccgtgaacacctgcactttcccgccataaagataagacctccaaatcttcaaggcaaagattactgcagccatctccaaatcgtgagtaggatagttgccctcatgcttcatcaactgtcgtgatgcataagcaataaccttcccatgctgcattagaacacaacccaaaccaactctcgaggcatcagtatacaccatataaggttgtccatgctctggcaatgctaacactggtgtactcgtcaacatctccttcaggctcacgaaaccctcctcgcactcctgtgaccacacaaaaggaacatccttccctgtcagcttagtcatcggctgtgccatactcgcaaaccccttgacgaacctcctgtaataccctgcccacccaagaaaactcctgatctcagtggcattcgtcggtctaggccaatctctgatagcctcaatcttctctggatccactgaaactccctctgcagaaacaatgtgacccagaaaacccatttctctctgccagaaactgcacttactcaacttagcgaacaacttctgctcccgcagcttctccatcactctcctcagatgtacctcctgctcctcaggacttttagaatataccagaatgtcatcaataaagatgatcacaaactcatccaaaaactcctggaacacgctgttcatcaacctcatgaacactgcaggtgcattagtcaacccgaaaggcatcaccacaaactcaaaatgtccatatctcgtcctgaaagcagtcttgcgaacatctgcctccgctatcgggatctggtgataacccgacgtcaaatcgattttggagaaacaagtagcacccctcaactgatccaacaactcatcgatccttggcaaagggtacctgttcttcacagtgacccggttcaactcccggtagtcaatacataagcggaaactcccgtccttcttcttcacaaataacaccggcgctccccaaggtgaagtactaggacgaatgaatcccttacccaacaaatcctttagctgcttctttagctctgccatctctgctggagccatcctgtagggtgccttagacaacggcgctgtccctggttccaactcaatcgtgaaaggatcagactgtgatggtggtaatccctgcaacgattgaaacacatcctggaactcctgaacaacccgaatgtcgctcactgctacctgccccacagactccggcatagatatcgtcaccaggtaagcctcgcagcccttctcgatcattttctctgcctgcactgctgagatgacgagactccctgagataggtctcactccctgataaaccaaccttccctctggccgctcaaaaaaaactctcccacggtgccagtcaagatgtactctgtaataatccaaccaatccattcccagaataacatcatacaactctacagggctgataatcaaatctgctggcattgactcccctgcaatctgaatatctacacccttcgctctccccagaaccgctagaaactgccctccagcatccttgacgtggagatgtcccctctccctgcagtggtagcactccctcgtctaagctcgctgcgtgcaatccgccaccttgtggtcaaggctcccacaagaaaaacatcgtgcacgaccaccctgtccagctctggaaggatgatcccacttcctcttctgcccctgtgcaggcttgccgcccttgctaggtgtcacctgctgctgagtcttcttcggttgtaccactggactcactcccaccacctgcctctgaaagtcctcctcgacctcagcagccgtctccaccagtgccgccttcgtggcgtactgcgacactctacaccgcactctcaaatccggtcgaagtcccctcaagaacctcctcatctgggcctggtcatcctccatgccctgacccgcatacgctaagagtcggtcaaactcagctcaagaaaacgtgcctccatacggtcgagcgcctcctgcggaaagtacttggccttaaactcagccacgaaatctgcccaagacatatccgtctgcctcctcctggcagtcacactccgccaccacaaatgtgcatccccctctagaaaatgcactgctagatctacccgatactccgccgggcatctgctcgaaccgaagttccgtccaacccgcgacctccaactgtcggcctcctcaggactagtaccaccagaaaaataaccggtgtcaatcctctgcaactgctccatcatcctcaaataagaaagaacctcctcagcaaccgcagcccgctgctgcacctccgccactcgtggcgcaactggagtctccactggtaccacacctggtaaccgctccaacaactgcctcaacaggcccgccaaaccaacctctggaacctgggctcctccagctgcggcacccatcactcctgggccctcagcaccaacggcatgcacaccggtaccgacaccagctccaccagcccccactccggttgcaccagctatatcggcaccaagaccgttcctaaccccgggctccacaaactcaggctgcgaacccacactctgctcaactttggcactgtggccatcactctcgccggtacccttgaggactcgtcccctaccgcgaccacgactacgaactccagctcctctaaccatctgcgctactcaagaacaaatggctaagaaactaaaacaaacgaatatatcacaaacaacttaccgtggaatctcatttaaggctcggagaagatgatgctaggactccaacaacacacaattgactaaacactccataatcaatcctcaatatgctaacaccctagctcatcccacatcaatcaacaggaaaataattcatcaattaatttttctacacatcctagaaccgtaatcgctctgataccaaattgaaacaacccgacccattttttttttaaaaaatataatcaaatattcccacaaaatatctaattaaaccaaccaataacataataattaaagcgcaagtcaaaaatactattttatgaataaataaataattcgaccaacaaaaccaagaataactgacaatcctaaccgggttccaataaccaaaaacaccaaaaataaaacaaacgagttcctagatcatcctctcttccttgccatgattccacgatcacactttatctttacatgcatcaacaacacaatgagatgcgtaagtattatcataaatacttagtgaggcgatactcccatctacgagctatacacacaagcaaatacaaaggtataatcacgaatacaatacaaacaaaccagtcattgaacaattcacccaaaacacattcaccacacttacatatcatcacacaaaacaaatcacacaacccaatcgcttagataagctcatggtcacgcactcaccttaacaagattctaatagcaattgaacccaggagagactctccttgcgtctgaaacagtccagaaacgtcctacaacaagtccacaaccaaaagcaaccttgaagcaaactggacaggaaaacaccagaaacaagcagtctcaaaaacgaaaccctaaaatacaagctaaccgttaacaattcaatcgctccggtgaaatcctagctgcagacgtcacaaagctgcccacaaaatctcgtgccgatcggaaaacagacgagaccacgatctcagtttcaatctccgctggtcctaattcgcgtctgagaaaacgtgtctcacgaaactgcgaataactcaaccaattttaatccaaattcaattctgtaaactggagaataacaataaaggacttggaaataactctaccaaatttcgttgccttttaccacgatttgatatgacgaaactgatttctcccaaaccctaacgattctgctcattctctttttctctctttttctcctttataaaacgaaaagtggctaactaaagccctaatttcgaatttccttcttttataggcacactctagggtttccaattaacccaaccaattaaaccggatgatttaagaacaaaccctaaccgattttccggttcacgggcgttacagtttggaacagaaatatttaatagaaataaaagaaagtatctctaataaaattgggtaaatatataagatgaaaaaaggaaagcaatctcttgtgaaaaataaaatattaactaaatggaacattgctgattttttgaataattagaaatttttttatcttattaagttaaaatttattttaatatctacatatacatttttgtaaccattttgtggaataaatcctggagttgggacttatttacaatgcttgccactggcatttattatttagttaaaaaaattaaaaaagatattaaccaaactatatcttgcctaatttgtttctaaaaatctctacacaatcttttcatatatctttttgaaaaaaaatcgtgaattttacttcacaaaatatgcataaatccaatttatagcaaatatttatattaacattttgcatagcaataaaaatactaatttataataattaaaatattcacataaaaaatcatatacacatacaggaaaaaaaactatatttatcatcacttaaaccgttcttttatttaaattaaaagcacaaaacttgaaatcatatactttatatgataaatttaaaatctatattagtaatatatattttaaatcattcaaggaacggtataccacgggtgagatcctaaattattggaattagaacaataataatttattttcttggattttataacactaataatttagctaacgagataatatatacggatttatatgggatgacgggttttgatcaatattaataaagaaaggtatattacggatgaaatcataaaattaacaatcaaaatacaatcatacaaccttaaacacaaaaacatacaatattaacaaaacaaatataactcaaaatacaagctataaaaaattgacccgcggtatactgcagacaaaatattcaaaattttaaaatctaccacacattgttacttaaaaaaatataggttttcatatctatacttcaaaatttgaaacctaaataatagtaatcatatactaaataatacaaggatagatatctatattttaaaatacaaattaatatgatatatcttcagttaatcttttaaaaaataaatttatattttttaaagcataatagcaccgcgggttaaattcttagttttattgataatagtaaacgcaagttcatatgatgattgttaggccgaacatgtaccgttttctcgttatagaatagaaccaactaaccaaggtgtatcaggcttcatgtatgaggatgtctagggaatttttgtgacacaaccatactcgtgtcctaatgataaattcaaacatcaatgtttcctcatagctgaagctacaaaagttatttctatataaaaaaaagggaattattaataagctttttttttttgcatgtctgctcaataatatgatattatgtattaatatcaatgggttccaaaaggatacacatcttcttggtgttgaacatcacaacaaaggatcaatctatatttctacacttctaaagctgttcaaaaatattaccccctcacctataaaattcgcaaatcaaaacaatttccgttacctattacctcaaattccacagagatcataataacatcattaaaccggaagcagaacctccaaccaaaccaccaacttcaaaatcaataaagaatagaggtgtcatcacctgacatgcgagacagatgcgtctttgagaaaaatgcatcaactctttgtgtctaatccatatcagtcgacatctccactgtttgtgtctctgtttcacttctcactcttcggtagaaaagaacatatgcagctgagttttttatttcagattcatttacagatgacacatgactgtcgtcgaaatggtaccattcattgtcatcaatcaactgcatgaaaaatgacacctaataatcagataaagaactcacagaagaactagtagcaagcacaaagggacaactgtcgagtctgtaatatgatgcatttatgcatatgaagaggtaaaaataaaccaaaatagatagtgagaccaaatgtttagtcagcaaaccttagcgtaggcagtgtagtggccaccaccaagtccaccataatgattactaacggcatacagttcatatagatatgactggtcattcttgtttttcacatacttgctcaagtctagatcatgaactgggaaattcacaaacgtatcaatcttattcttgagatatctgctgtaagtgaacctttttaaatgaaacacaagaatatctggtaacttccacaggtctagctttttgttcgcttgtctgtgttctttgcagctcggacaaaacctgattcagaaccgtaagaaagagggtcaaagctaaatcttaaaatgagtatctcagttcatgtgattttaagttcaggctacgagctataccacatgtcatctggtcccagaggttcttctgctaaaaacgcctccaaacacgaaaacagggatatcgattcttgccttgtcttctttgcagagaaacttgttttatgaacctccggaagatcactcaagtagctggaatcatatctttcatgctcaccctcattccactcgactaaaactcttgtagcgatacccaggcttatggaagattcagactgcagtggtttaaagttcaaaccacgttcatctgtcaagaatatcctgaaggataactctctatcagatgcatcgtctatctcggtatctggggatgataaaatttcggatgcttcgtcaacagtagcatcaggaaggtggccattttcacttccgttatgaatcttagatggggcatggaccttgtgcagaggcgacagaaatcgagagagaactgcatcaatgtcagctccacttagtggttctgtgttgacataagtcacaaaaggagttccaaagagcttcacatctctgcctctaacactctccagaataggcctgtggaatccaataattatgatccataaaggtttacataagaggagaggaaaataaaggagctcttgagtaacaaataaaaccaagcatgctcaccttttctgccctccatgaagaatttcgagttttgctttccctgatcctttcggcatctgatttaaccgataggctacaatatgctcatcatcttttatcgaactcagtgaatccaggggattctcaaaatatttaaaaatcttgtggtcatatacctaagaaaacaattacaaacaatcggcagggatttcatttcagccccaaaaaataggatggagaaaaatattaatacaagaaaggaacacaccaaaaatcatacctctgcaagtaaaagactctcatcttcggctaataaacaagcagtacctaatgcggtaatgagatctctaatagatccatttttaggcactattactgtgtatggcatcggaagatgacttccatcgcaataaaacaccgtaactgtcatggatcgcgtaagtgttgatggcaaaggtacagacaagtacatgaagggatcaaaagtgattgatatttttccgcaagctggacaaaccagagtggacttgtattggccctgaaagaaattgaacacctcataagaactggtcgggaaaataaaatagagaaacttgtagtacttgtatgaaaaacaagaaccagatgaacattcaatggaaggaaatggtaaccgatacttacttgacaaacatcaactattacagaatcatttcgggccttatgataattccaaagctcttcagcaacttcatcatccggacgactgtcagaatctttaagttcgatgtaaggttttcgtttgaccttattcagatcttcatgcagcccatccaataagaaagcaagcagttcctgagacaacaatataatactgtcaaagaggatagcatagaacaacaacaatgtcaggaacaaagaccttaattatgcaccatcatacagattagaggaaatgactaacttgagaatcatgctgattgtaaccactaaactgtggagcaaatctagccaattttgtcttaaatgcgcgtggtgcaactgagttccttcctgatgaccataatttcttcaacaaatcaccaaacgcgatagcaagctcaccctggaaaattaagagttagaattatattcaaaatgcatgtgagtaccatcacatgagtaaatagaagatttaagtagcaagcacttacacacattcccaaaggattatctctatttatgtcgtcactgtaatcttgcaagaagtattcaacaattggaggtgtgtgggccaaacactgaagagcgctattcataaagcaggtatttcccaaattactcaatcctgctaatcctcccttttctccttttccaagaatactcaaagaattgctgccgtcgtcttcagaagttattctcggaaagagactaaagttggacgtagtggaatgaccatttgatagggtaggccccccagcaattgtaacactcgacctggaaggttccagaggtaccagagctaactcatttcctgtcgagctcatagcagactgagaggaagacgacccatcaacttcaagtagaatctgcatgggatgtaccagtcaatgtcaaacaaagagacgaacattgatatcaagtgagttaaatgggattcggtttgtgtcgataaaagaactcaagaggcatgcattatgacaaactgaagtccaagtgacaaaggtgattcatcaagatttgtcaatatacatatcacagacagttctctagatacttacatcttggtccatatgaaggcttgactcttccaggctcttgtaagataaagaatccaagagtccgtttttcctcttatcgaagtaatcccagatatgagcctgcttataaaaaaaaatatcaatgtgaggcaaagctgcaaagtcttcataacgaaacaatgcgtccttcatcagcaaaaactaaaaatagaaatgaaacatctcgaaacacacaccttttcttgtggtacccctgtcaaagcacaaaccttctcataaagttcccttatagaggcctgaaacacggacaacccatgtaagaaagggacctaagtggggcctaacagtttaaacacaaagagtctttggctatgcataagcaccataagtaggtcgcagcaaaacaaagagcctgagtagtatgatgggggcacctaatacctgttttcccaaccgtattacagttctactttcatctcgtccgtccgtcaacataaggcagagtgggtaaacctctacactataactcctagtataaaatccttgacagatcaacttcctttctatcggaggacctccgctatacctgcaagagatataagaccaggtatataaacaaagaaactaaatgaaacaatcatgcaccaaaacctggaccatgtcccaatcagaaagaaccaaaagctcaccattcaacaagtcttttccaaacttcttgaggaactaaaacgtagtcaacccgttccatcaacaatctacgaagttgtggatcattaacgtcgctttcactttcgataatatcatggttatcaatcggtcctggccttgaagcttcagaggactctccacttatatattcttttgtcgattgctcaacatatttctcccagcttgtataccacctgcaataacacaaacattaaccacgactcagaacacacatattttatttcctcgcctaatcttagaatctacagaattcatcacaacatcaaacaatagatccaaaacacagataccaaaagaggaaaatctacagatagatttgaacagagaagcattacaacaatcaatctaagaagcaattatcataaacattcattcatgcaatgatactacttggatcatcatcagcatcagctaacaaaacgctaaaagcagaatcaactaaaacctaagtgaagagaaccttttagagatgacaaaatacaagttcccttccttcaaattatcctccgattcggtaatcagctccgatacaatccgtttctcttcttcaggagtagtcggaaaatcacagactccgttctcgatcatgaaatcggaattagggatcgtcatatttgaaagatgaaccgatcaatggcagcaaaaaaaagatccaagatccttcaattcgagacgatttcagaggaaacaacagcgacaacgtgcagagaatcggagagggacacgaagaagaattcggagtaaccctagattggaggagaaagaataagagtcagagaaaggtctttgatggattcacgcaagatcccaatttatggtctgtgatgttttccaattaacaacggccaatttccaaagtatcaattttctactatgaattagtatattcattttaaaatattcaaatttataaatattaactttataagagttttaaaatagaataatattaaaatttataaaagtttataattttcataatatttaaactctatataatgtctaaaatctaattaatatttaatgtttctaaagtttgaaaacaattatatactatttaaggcatataaaaaattcaagtagtattatcaatttccaatctttttttctactataatcagtttttattttggaacttgttaaaagggaaatttctcaacaaaaaaaaatccaactatttttttgctgaaaaaaatacccatagtaatttaatttctcctctagccgttaattctttaaaaaaaactctaattatttaattttactagaaaaatatccgaatgtttccgttgctcgcatataacttacaaatttctaagttatgaattcttaaaaggactttcactagttacgaagtaattttggttctttagaatgatttgccaaattttgttttttttcttttgtcaagtccattacatagatgcatcgattctcttacctatgtggccgaggacatgacatgagatgtgaatcgattttgatgaattggtcttgcgcttatcatctaggaaccttatcgctaaactcaactctggccacgttttatgaaagcataaacttgatgatccttgatcggtggtgcgactttgataatggatcctctatgtacgttcactttaggtcgacaatattttaaaatgatctcaagtatctcacaatcaccaacatctttacggatcagatcaagctcccacaaaaaattattgcatcttccatgagagatcccgacctatttcttagagctacaaagctaaggctatccgactatgagagtcttccgaatccttatccctcgctcaatgagaaaccatgaattcaattggtttctttatggagaaactaaccatctccttctcttatacgaagagaactctatttacaagttttcatcctcagcttttggcttctaaactgtgtaagctaccgatcttccttacctttatgataaactgtgtaaaacgtctcatgcaagcaagaatcaaagtcttggaatttttttcaacatcacgaaatcaatcaaccgtcactatcgactcaccatggatttgcttgtgccaatttcctttctaacatttgtctccaagcgcttatgaatcacaagtcggactacctaatctattgttatgttgcattagggaacactctatcttttcatgttataaacattgggatcttggaatcattcctatcattgtactttgatttggtttgttttgattgaatgaatgaaatcaagtatttgcacaaaaaaactgaaaaacaaaagtctatttcaatagttacattctaaattaatttttcctttttatgaaaaccaaaatgctatttttataaccttttccattttagtatatctattctctaaattatatatgaattttactaatttatcacttttacttaatttggaaaaatattttgtataggactagctggtaaaaagcttttaacatatcaaatgagtaaaaagctcaatcggaatttaaggagatagatggcttaatatagataagttataatgtgggatatacctaacttcttatatatatgtatgctttcttcgttctttttttctttttttctttttttctttttttctttttaaacacaatcaattttcagattaaaatatatatatatatatatatatatatataatcatttatatcagctaagatgaataaaaacattatattctcgtttaccgttctaactctcttcgtcatttttgtgcaaggtttgtaattattttatacgtaacatatagtctttttaaaacaaataaatacaaatatcatataataattttgtttgttcaattatgttatataaaatttgtttcaaagttaaaaatttcactatctaactacattatattgactattgagtaaagctctttgatgaaaactttatataaaacataaaaattgagtaaaacattttgtgctagaccaagaaaaccgatacccaaaacgtatagtttaaatttcttcacctatttttggttaatttcttatattaatggtcttattatattacgaaaatttatatttgctatacattttctcgacatgttttctttgcttcattttcattaacaatagtttcttttttgtgccctatagaaaatgtattaagctagatctgttttgtataagaaatattaatattttgttttaaaaagggtaaatttatagaatattttgaaagtacctctatataatttattttttagttagagataaactatttgataatatgtctagctacatttttctgctttcataatatttacgttatagtttgtttaaagtaaaattatatgacatttaaaatttaatttatataatttttttagtaagaatgttatgtattcgtcaaaactaatgacaattgaaaaaaattgttactgtaaatatgttattaatattcagaaaaatctgtagcacaactatgttttactaaacaaaataaaattttttttttcattacaagaactgataatttgttttatatttactagtaacaggagttatcgggaatttacaacaaagaagacaaatgaaccaaacatggtgttctaggcctctacttacccataaacaaacagggaaatgtgtcatcgaagattgtgaatctaaatgtaggcagaagtggaaagggaatggtactcaggctacatgtcgtaaccagtgcaactgccattttcgttgtccatggattcaaggccaaccatgaaatttaaggaatcaatgttaaatttccttaaaataagtcttttcaaaaagtttcgaaaattatagaaattcatttcagtaaaactcatatcatagtgacatagtgatactatacgtctagtactaatggtaatcaaataaaatatttgttcctagtgagtagtgactgacttgtacaagtgtctttattgaattttgatatagtatccttttatcaccttcatagaagaagagatcagatccgagcatctcaataaaactctagctctgtagaaaaatgatcgattgggttgaagttagagttggatagggtgctgaggagataaaggagtcgcatgcaacttccttctcttttcaagacccgatttaactctagcataaacccaattgatcattatcctcaggcgaacgagttacggcaacgacggtggctagggtttcctcggactctctctaagattttgactaaggagaaaattaaggagactacctatctatttataaggatattaatcggctagggttttctttttgtctaacgaaattttaggtttactctctcgttacgggcttatatggataattaagggcttttctccaatgagttttaatggatttacatgagtttcatatagaattgagacttttcttttacttagcgatttggatcctacaacaatggccactaaatatgtgcctaccaagcgacacaaaacatcaaacataaaccatgtggcacttaagatttgagcttctagcgattcttgaagtaaagccatatcagatggctgatgttagcttgcacagttgcacttaagcataaaacagactcaatgcaatgcaataactttggcatttcaagtttattcttgttccataaagcacaaaattctgcatatactccgtaagttccggaaacaatttggaagtcgcaccaacgctttgcagcctttcatattcaagagaagagttttttggaatacaagtaggatatcaggaccctttagtgcactgccttccaacaagagctttcttatctatttgaaatcacctaaaattgttcatggtgagaattgtcagagaattcaacttcatctatggaaggacggagggcgaggagagtccgcgaagccttcaagattttgagcgcctactaatcctgaaactgcgaaccgctcacatgaatgactaagattgagttaatcatcaagataaaacaagcctttcttgctcctaatttgacctacacaaacttataaaccaagcaatcgagtttatcatcaatggaaagaatttacactttttattgcatattatgtggatgttaagtatcctacaactgttagttgattgcaaagacaaatgaaaccatgaaccattgtggttatatctgaatataaggttaagaatctaaactagtgacaaagttataaaccttaccattcttgtgtaagaaatctattaaaataagaaatgttggttgtgtaacacataatgcctcttctgtatccaaatcaaagccttcttacatcattattcttcctctttatcagcaactttaaccttcttctttaccccatcttcaaaaccacccaccgactcgtttctcctcttatatatactcaaaggatcacaaagcaagctcttctctttctctacatcactctcaatttctctagaaccacaattcctagcattgtctcccttaccatccacaccgttttctttcgacatagacaacaaaacaccagcaagattactatcatcttcatccccaacaacatcacacacattctccttctcatcccaacaaggaaactccctacactgaaacctaaacttcttaggcacataaccactacacttccataactgccgactaaaaaccgaagaaacacattcaaacaaacccaaatcaccaccaggaactccttgtacatgaaccctttcttcaattggtatctctgaacaagccttcaatacaacactctcactactctgcgtacataaattctccattctcaacgatttagtaaccgataacttggacaattcatcttcattgttttttatcttacacttgtggcaaacaaacaaatcatcacctttaacataacgagaacaccatgtatgaacccaaacaccacattcatcacaatcaaccatctctttaccatcatcaaaattcacaccacaaacacaatctactgtccatgattcataaacccaatcttcgtgtggcttcatctcaaatttacccccaaaaaaaaaactctaaatttctctgattctttcacaaattaacccagaaatctccctgaatatcgaagctttgtcaaacccaattcgtttcttctgaacgacgattgtaatgttacgcgaaatagctttgcgattcttgatagaaaaaaagctatcttgacgtaaatctatggttctcgcttcccatttctgaacgaagaagacgaagataggaaccataattactaaaatatgggccggtatgggccgggatgggccgggatgggccgggatgggccgggatgggccgggcttagaggataggtactgttttttttttgtggacggaccaaacgatttcatttaaaaaccaaaagcagataaaaaacagaatggtcaagctcaaagaggaatacaagcggaaattaacggtcaaataactaaatcataatgaagttagcaaaaatatttgcacgtataatttagcctaaagacacgtgtagaagatgtgttcttctgaaaaccactcgtcacgtcgtagtaccaaaatcttctgggtcgatcatatgaaaccgcttcaaaaagatttcgaaaaccgctaacttcggggaagctatatcactgactacacccaatttgatgtagtctaggatcaatctttctatgtaccttgaataaaaacagaatgacgaagatattacttcttgagcaattagggaaacaaaaagaatttggaagacatacagaaaaatcgaaggaaagatattggaatagagatattggaagttgaagttttgatttttaggtttttttctttgatcgtttttatgctaattttgtgtttgttaaagctgaaacttcaatgagatggctttgatttatgatttttatttgggaattttagtttgtagatttatgttttgtatgatcattgaatctttgaataacccatgcactagtaagatgttatattataatatatggatactagacttgaattgttctaattagtaggaagagaactattgttgataaaataacatgtacaactagtgtacctgttagactatctacattagttacatggttacaatgtccacttttctcttttcaacactccacattataattcaatacctacataatttttacttactacaatagttttgtttaataaaattacaacacattaccctaccattattttatattttttattttaattatgtttatgttttttgtgattaattaattacaattaatatcaaataaaattaaaataagtaaaaattaaatattttaaaatatgaaggatagtttggaacagttgacgatataaagaaatttggtggataaccataatttgttatattatgttgatggttaggagattgatgttgggtagttaaaaaggtaattagaaaaattttgggagttaaaatgatattattatgatctatttcactaaaaagacggataaaaaataaacaagagtttatgaaggatgatagcaaaagtttaatttaaaaagatggggtttttgtgtccaaattaattaaaacaagtctttatttttgctataagccttcataaattggggattgttaggagattgattttgaaactgataattgttcagattttggtagttaaaaaagtagttagaagaagtttgacattccttaaatgtagtgatattgaaattttttgacattcctttaatggatcaatgcattctgttcctatcctttcttatatggattgagactaaaaattctttgaactaccaccgctcaactttatcatgataattataagtcaactcaagtatttatagattatcaaagtcttaatccgaactcgataggaccaaactgaaaccaaaccagttattttatttttactatatatatatatcatagcttattaaattttttacaatattataaggatattataattaataattataaagataaaagaatgaaagcgtttggcaagagcaatggtagaattagaaaggaaaaaataaaaatggttgagagtaaataaggattcgccacaaaaagcactaaaaattgtattttaatatatggacaaatatataaattttataagttatatatattggaaaactattttgtaaatgtagagcgagtcttatgcttttattatcttagataatcaacgagtaatttaaggagttagatagcttaaaatatacatgttctaatgtggggtacatctatatatgtaggtgaactttttctttccttttcatttctaaactcacaatcattttttgaaaaaacaatcaattgatttctatcatcgaaatgaaaaaaacattctcatttacagttctaattctttttgtcattcctctgctaggtttgtattttcatttataatcatttttatatgtaatttttatttattttaagttaattattttgaataaattctttaaaaaatctgttcagcaatatttatataatatgtgtcataattaattttcaattaaaaatttcatcatattgaatttaggacttttatggaaatttcatactagaactagaaaattaatacgtaactatttagtgctagacctagaaaattgatagccaaacagttttttttaacaatattttcacctatttttcaatttaattaggtaattttatggtgataatatattaagaagaagtattgtgatataatctgattgaacatatacgttaatattgttttattgccttttcatcatccattcattttcttttctttccacatagataaatgtgccatgataattgttttcataaacattaaatacatatatcttatatttataagtaaatttttatgacatttgaactacctcaatgttaaacttacaatttttgctattataaattttttggaaacgtctatatttataagaccaaaaaaaaaactaatatttcatctttaatatataacagtaacaggattgatggatagtatgccacaaagacacccggtagaaggttggtgcaaaaggcctctacctaaccaaaaaccaggaccatgtaataacgaccgttgttcggctaggtgtaaggagcagaagcaatttgagtttaaagggggcaaggcaatgggtatttgctctagtgaaaatagatgtctttgcacttttcgttgccgataattttgatgcatttatttattttaaaataataatcatttgtttttctccttttctgacatccaaaaatcatttcatattccgtattatataatatgtcttattaaaatcaaacaaatatttgtcatttctattagtgttattaccaaattcttgtatggattagtgtgttgtagatgataaattttattattgttataaaaaaatagattacctagagttgccaaaagaaaaaatattacttaggatactgaagaaataaaagaaagttaaaagaaaatttcattctcaaaacctttacgttttaaattgaggataaaagttactcaaataaatttttatgaaaaatataattaattttatgaacgattacttttatcttacattcaattttttttttacttataatgtacaatatatgaatagcagccaatgattttaaatattaatgaaatgtcttcaacatgagacataatccgcatcaaaaatacaaaatcatttttttgccaactacaaaatcataaagcacaataatgggtgtaattgttttgttacgataaattaaaaacaatgtatataaatatatatatatttgtacatttttgtgcaaggtttgtatttgtacttatgatcattttaatgttacatatagttctgaggaatgattcgcatatgacttgatccaacataattccatcgtgattttttcatcatgcattcattttttttttcatgctacgtagagaaatgtgccaagcatggagtatttggtataattttaacaggagcatggagcatggagtatttggtataatgtagaattaggtattcaactgacttgcttttattgatttactaattatggtatttatacacaatgatctctatcaagagataaacataaattcctaaaatataggttagaaactctatcaccaaagatattgtactaatcctaatcggattacacatattcccaatactccccgcacgacaaacgtgatacgcaaaacgcaaactttgcaatcacaaagcggaacacgtatgtcgtggacaatatgtcgaggacggacaaatcatgtcaataaacatcttagggtataaactttattcttggggtggaacttcatcttgtcttcgatcttggtaaaagggaatacatcccgtgtgcgcaaattatgctgctccacaaacaatcgtccttatcttggacggtccataactcggattacacatgacctaaaaaacatgagtgttccataaactctactaatggctaaactataaccaaactcccccataatggtaaaactattaccaaactctcccacaagaaatgtaacaacataaacaaaaaagaaactctgaaatttctcttaactttaaaataattctagaaacataaaaagaaaaaccaaaaccaatcctattaaaaacataggaaaccaacgatcacgtaacctccatcccttaacatgcctacgttttcgtcggcgtcaccgtcttctccttcagtgatcactatcttcatgattttttttcttgatcacaagaactttaatgcggaagctttaattcttatccacaaggatcgactgctctgataccatgtagaattagatattcaactgacttgcttttattgattcactaactatggtatttatacacaattatctctatcaagagataaacataaatccctaaaatataggttagaaactctatcaccaaagataagtactaatcctaatcggattacacatatccccaatatataattttttcattataagttttattatatgttataatttttgaaaaaaaaaagaatgtttgttataattctcttcctccaaatactttggtgaggtttacgataagattgttacgttcaatccttgctctgaataagttttggttcgtgttgtttaaattattcagtacttaactactaaactaaaatcatgtatatgtggatgcgaaatattgttttcgtatttttttttctacggtgatttcaatattggtagctatataatctttgtgtttaatgaacttaaagtaccaaaaaattacaagtgagttttcggtaaggaactcagattatttacatctcattaatctatttacattaattcgtgatcttctgtttactacggagtttggagtatttcaaaatgttttctctagctgtatcttcacaagatgggcttcccgatatgggcctctcaaaatatattttgtttttgtttaaacaacccaaatgtagcttttttcttgtttaaacccaaattgtatttgtttttattttctaacaaaagagaagtatttcgggtgataccaaataactttcgaaggaaaaagacaaaacataaaatgagatttggtattttggtggttgctaggaaactagaagatgtctagtaccatgattcgatttccggaaaataatacaagacaagagtttggtagctattgcgtcgataacataaacaattaggcagcattttaaactaaaagaataatctaaaaccactattttcagctttgattccaaaaacacaataattcttttaagaagatgtacaaaaattcgaaaaaactaggtagatttgctaaatttatccccaataattacaaaaccagataccaaatcaaaacacatgtatattatttccgaactggttcggattaattgattttcaactcatagaaacagcataaaacataggggtaattagaagaagaaaaattatggtaatgtaaatttaaaataatgtagacaaaatcaattaagatgttgtatttgtttaattcttgaccgccactatatgtaaagcctattcttgttcgacgagcagtttgctatttttgaaggctttaaagatttgtttgtcggtcttcaaaaattatatatgattcttttttgtgttttgttctcattcaaacactaccgaaaatcactttccggtagatcatctatcatgaaattgctccagcacaaacatgcttaactgtaaagttttttcgatatgtttaatcgaaaagataagtgcatttcgtggatatagatgatctaattaatttttaaaactcttttcattcactactatatatcctgaaatcgggatgttacaatttatttctgaatttttttaagtgtctcctacataactagatatgttacaaccactatggatcttatttctaaaaagtattgaatacatcatgtctaaattgattaattctcaaatatactacattttatgctattttctgtaacttccatcagaatccaaaatttttttttaacataccataaattttaattttatgatttatgaaatatttatagattttattattttaatatttttaaaaaaatccaaaataatagtatctttttagctaaaatttcttttactgtattttaggatatttctctatctaattgtacaccatacatataaccataatttggtgtaattcagatttaaattaggatgacatcaaaattagtcaaaatcaaaatagcatctctattttattcttatacttccaaggaaaaaaaataaaagagctttaaacgtgtcgttatagctgtaaagctggtgatggaactggtaagttggtaactgcttcgaccaccgtacgaatatggtggttactggttaggctacacggtaatttcttttatttacctgcagtgagaaaggtaaataataatgagtgagagagtaatggataattctgaatttgtaatgtcattgtcattgttttgtcagtaagtgatgctttagttaactcatgtttatccatatgggccattctatgtttcatatatatatatatatatatatatatatatatataatatgttattttactttttataattttgattcttagtctttatcagaaaagaaaaagaattgattcttagttcttggatttatgaaaagtaaataattatgtgcaaagagattctttgataatttttcaatataataaaatattaagaatattatttaaaaaaaaaaaattgagggaagagattcatttgattttacgaaaacgctaaaacgagatggattaaatgttagcctttttcatgacaaatatgttgtaaagcataatcatgtacaaggtaaaataattttgggtttttagtgtttatgtcgtaattctataatttttctcaactacttttttctttgtataatttagcatttttaatatcaaacacttttgattccaaatacagtttatttttattttcttaagactacttaccaaacacacataaacggtttttaatatctaaagttaccaaatgtatgtatttcaaaaaacaatcatcagcaaatttagatgttttgaatttttattagaagaaatgcattgcatggttataattagaaaattaaaataaaatataaatcaggattatatgaccaaaaattgttttaacttttacttagcatttacacataaattaacagaaatataatattttttaaaaaataattttcttataataaaaattgttatattgaaattcgaatattaagatttggcaagtcgccaaaatataatcacactcaacaaatttatattgtctcactaattatctgttcataatacatatatcaaatgtataaatcttaatataataaattttaaactaatttcaactgtcatactaaacaagagtttatacaagtctttacctagtgttatactccctctggaaatgttaaagcttattgtttaagaaaacatattatacacctaaagaaaactatgcattcgttttgtgccatgtgttgttttactagtcgtgactcgtgattctccatatcattacgttaatcccaactctcaactattattatgttattttttactatagaatggaaacttgtagattacttatatgaaggttgattaaaatgtaattaaaatctgtatcttttttataaaaaaagtctcttcatatatgttttagttgatgagtgatggacaagtaaaaataaataaaataagtacatacgttttgttttagtgatataaatatatgatgccaaaaatgtacatatattttctggataaatattagagttgtagatccaggtttgctatgatctagctctgtccgaaaattgcagagcgtgatcttttctctgtagtacgaccgatttgttttactttatccaatcgttttaactttttcaccacggttaaaaaagttaaaatcagatctctaaccattttctcaacgaacctcgctaatatttctcatttaatcaaaatttaatcaccattaatcctttggttgattactcttttgtcctcttcttcttctctcttctctttcttggtggctctcttcttatagccactgttccctttttcattgtattcctcaaatctctttacttgatcgttggttctctcaaaaatcagatttttatttctgggttttgttcgattttgtgatcatggcggtcattgagagcgtcggagctaatactactgtggaagctggtggtttgatctcgccgtcgccgccgtcttccgtcaccagtcaagaatcaggagcttcttctaacaacgatcacggtggaaatggaatccatgatgagatcggagtccacgtggcgagatccgacggtggtgagagttttaagcgtgatatgagagagcttcacgagctcttgtctaagcttaatcctatggctaaagagtttattcctccttcacttactaagccagttgttaatggttttaacggcggtttcttcgccgttaataatggctttgttgctgccggaaatttccccgtcaacgaagacggtagctttcgtcgggtaagaacatctctcttctctcttctctgtgattttggggttttgaatcaaattgttctttagggtttttgatgattcttcattttggtttctctgtttcttcttgtgtgtgtttgtgagttttaaaaatctcacctttatgtgtcaaaatgatttgatttgaaacagaagaagtcgttcggacaacaagggaaacggagaatgaatcctaggacaagtttggctcagcgtgaagagatcataagaagaactgtctatgtgtctgatattgaccaacaggttttaaaaagtttccacctttcttcaattgttcattctcagcctttagtgtataatcacttattagtaatcttattcttgggtttaaggtcactgaggagcagcttgctggtttgtttatcggctttggacaggtttaagcaacttcttaaagttcatctttgtttgtgttgtgttatggtgttgactgtatttggttgtttaggttgttgactgtcgtatatgtggtgatcccaactcagtacttaggtttgctttcatcgagttcactgatgaaggtatcattagtttctctatgtaatctgtttattggataatgcctgtaagtgcttggtttatggtttgtcattttgggacttgtagtgggtgcaaggactgctctgaatttgtctgggacgatgcttggattctatcctgtgaaggttatgccgtctaagacagctattgcaccggttaacccaaccttcttgccaagggtaaggttttttcttgtgtttcatcacattctgactgcaaagttatggttttttagactcaagaggtttgattttagtcctgtctttgttcttagactgaagatgagcgtgagatgtgtgcaagaactatctactgcactaacattgacaagaaggtgactctcactcgaataaattggtttcctttgccaaactattctgaaacttaatgttgctaactttgcttagtttcacttttcaacagctcactcaaaccgacattaaactcttctttgagtctgtgtgtggcgaggtgtaccgtctgaggctactgggcgattatcatcatccaactcgcatcggcttcgtggagtttgtcatggtaagcaaatacttctgttatctctctttcttccaaccttccatttgtcaactataacgcttatgcattttcattagttaagtatgatcttttcactcttccgcaggctgaaagcgcgatagcggctctcaactgcagtggtgtccttcttggttctttaccgataaggtccaagaacaaaccaacacttactctttaacattctctctaaattgatcatcaatctgaacattgatcgtactttggtggttggattttgcagggtgagtccatcaaagacaccggttcgttcccgtgctatcccgcgacatcaaatgcattaaccgtagctacaagttttatatatatttctgctcctcacagacatgtaaagaatgtttgtctgaaacttctggttcttctgttttcccgtatgtaatgctagaagcttgatgatgcttctgttgccttttgcttttgggtaaatctcttagggagagttttttcgatttgggttcctacgtttagtagtttacacagagcagaagagtaaaacactgagagaggcttttgaagattgtctctgttttttagttatttatactcttacccctgaagttattagaaacttgctttggtgcttaaaagtttcttctacattttagagttatgcatttacattattgtccttctttgttttttttaattgttttcgtcttcgagaaaagtgttaggtacatgaaagtctgtgttcttagttgaacaagtcaatttctattttcattttaaatttcggaaacgtgaatcatgtttatcagaagaatatcaagattataaaactatactagtcacaaacatatttaaattttaacaacaaatgaagaattttgagaattttaattatattttctttgagatattaaatttataaatttatgttcaaagtttttatgttttcatgttaacgtcgggaatcaaaagtcgtcctagaaataaattatataattaccataaacaattttgaatttaattataaaaaaagagaatgaggaatctagaaatttattgttttaccttaaatttttggatatttcccatgtttagtctatgttcgtagtcaactcaaaacaaaatcaaatttctgttttcgataggatttaaataagaattatcaaaaaacaaaatctgaataaaataaagaaaggaatcttggaaatttttaaattttaccctgaatatttgtatttttttcttaagttttaacttttcttttggttctcctttcatcagcaaacacattaatatcagtcagacagtcaaattcttgaattggtcaatgttaaatttttaattatcatgacaagtaaacttgctcagttgtatttttaatcgaatggtaaataaactttaaaggatgaaattgtaatttgcaagtatcacacgtcaagcgtatgtggtggctagttggacttacaccagttgagttgatccatctttgcgcatttcgagagcgtctctgtcatctctaagtaaagctttgacatcttttgtactttccaaaacatacaaaaaaaacaaaaagtcaaaattgttgtaattatattacaataaagcaaaagtggcttggtctgttgtctgcttgccaaaatccgaaggggggctaggccttcgaagattcacagagtggaatgttacacttagtctaaagctcatctggctcttattctctaatagtaactctctttgggtcgcttggcatagacattactggttcataaagaaaagattgcaggatacttggaattggaagtgcctcatacgcctaagaccactcgcagaacgttttattaagtgttatcttggtaatgggttgaatgcaagtttctggagggacaattggtctccttttgggccactgattaagtttctaggtgaagagggtccaaggagattgcggatccctgtggtgtcctctgtttctaaagctattgtggaaaatagttggattttgccatcaccacgttctgatgttgagcttcaattacacacttacttatcaactattgcccttccattgcaaacggactcggcagattcctatggttgggttgttcaaaatgtggattgtaatggtttttcttcctctaaaacatgggaggtcctgaggagaagagaagacaaaaaggattgggctcctcttatctggtttaaaggtgcaacgcctagaaactcatttcatatgtggatttcaaatctcgataggctgcctactcgtgcgaggttggtttcttggggtctgcagatctcacctctctgttgtttatgctctcagtctgttgagacccgggaccatcttattctcacttgtggattcagttcttcaatctggaacatggtgcaggctaggcttaggttgcagcctgttcagttcagagtttgggaaagcttactatcttggatcaagttaagtacggcctcctctccttccatcattaggaagcttgttgctcaagccactgtttgtgctatttggaagcagagaaacaaccttttgcataacttacaagacattctaccgtctatcatcttcaagaatatagaccgtgagatcatcaattccatcaacgcaaggtgtcatcggagaaagtttagatcgcttatgagattgtggatcagatagttctgtcttttggttattataattgtttgcttccttgttttttctttctttttgccaaggaaccaaagctttaggtaatcaaaaatataaatccaactctatttcattttatatgatatttactcacttagcaaaaaaaaaaaaaaaaaagttatattacaatttgctggtactaattaatgacttttatttgtatgtttaactagagcccaacccaaatttatcaaacgcacatttttttttgacaacttcttttgaattttctatttaattatatggctttaaacaaaagaaattatgatattgtgaaattgttttaataggtcaaatatattcaaatcaagatatttaacggtttgagtaaaaataagcttatagcaaaacttctgaaaatatatatggtcacgtacatattttgcagctaggaagtggacttatattactagctaaccaaaaacttataggtgcaattacagttttagggagatttttttagttctttttatttttatattagataccgttatgtttcttttcccgcaaaatctaggtacttttgatccgaggaatgatttttccattattagttaaatagcgatactattaaataaaagaataacttctactatctatgttcattttaattgattttctagaaaactacatatattaaaaaatatatattaaaactgattagaaatgtattaatttttttaaattatattttttttataattttaaaccagtgatatttaattatttgttttaaagtttaaaattcatcaataataactaataaatagtgaataaaaaatctaaaaaattaacttttttgaaacaattgtttttcctaaaagatcaagtaataagtaacagaaatagtaataaactattttcttatctcaatcattgtaaatagttttaaaatgaaagtggaatacaagtttcagttataaattataattcacactcaataacatattttgaagcaaggaagtgtacctatattaaatttcaatttcatggagcttgaacatattttgcatcaaatgagatcatgcagttttggatgttattcaactcattcaacatcgattgctataattcatgattctccatcttttcaacctgcttttcaaagatggctactaccgaatatgttgcctcatacttcattagattctacatttttttatataataaccaggatgacctttgtatatttttggccaagacatatctttataacttattaaaatgtccataaaaagcctttgaaaaatctcatgagaaagtcacaagcccatgtaaacagtgagtaaggtagtagctacacatatagtataagccagagtcgtagatcaggatcaagtgtgccatgagaaaactttggcttgtatgcactaaataacaaagtgaactagcatgttagagaaaagaagattacggtggcaaaaatattgtacttagagcatggtgcggtgcgagaaagttttgacaaacttttcttagagagagttttacatcaagatcaaaattacgtcaataactaaaagattatggcaaatgagcaccgcaaaaaataaatctcagtataaacctcaccattatcggaacactcgccggaaatctaagaaatgaggactctatcaagttagcctctatcaagcttctccgatctttagtcgatctatggatcttgcagatttaagagttttaatatcagcagtttttcgtaatcggtctccagcttcatattgcaattctattaaagaaaagttcaaatttggggttcataagagttatagtccgaatgtacgttttacaaagatttctcaagacgttgaaaaaaaattgccaatagagaaatcaacctcaacacagctcaaatctaaacaatgccagctcaaatcgaccgactataacaacaagattgttttgatggttcatcaactactcatatgtgtcatgacataccatttttcggaaaaaaatgagagcaaaaaatgacaaaaagaaaatgtggttgtgaaacacatctcatgtctcgttggtgcataactcataaggggaaatcctagactcgaaattaaacttgcatatcaccatagcacattatgattagtggagtaattgccaccagcaaaatataaatagttgtatgttttatatgaagacatagtatgtaaggtggtagaatggtaaagaatgcccccattaaaaacaagaggtagtagctttgaacccttttagcaatattttgcctccattaaatgttttggttggatctgcccttgacaatagctaaggtaatgtctatgtgttctccttctaacacagataaagaagtaacatgaagaatgacttagatagataggcttgagatcgtactgtttgtggtttgtttagtgattcggtagatggtggaagatttaattgaactctatccaattttcacgacattatagattgtagaaaatttgcattaacagattttaaattgattttttttttcactaaacatataattgaagaaatttattacaagtcatctttacttgaaagattttattactaaaaatcccgtttagtttatagttttaagatttcccaaatttaatattttccccaacaatttgtttaatactcctaatttagatttgttaatgcaaccaaacaatatgagtacttatttacaaaacctaaatactacaggtaccttttcgcaatttcccaaaactaaacacactcttcttcttcctcccatagaaacacaaaagccctaaatctcattttcttattacccgtcggagtgaaatgctttcgaaagcagcaagagagctttcatcatcaaagcttaaacctttattcgctcttcatctctcttccttcaaatcttccatacccactaaaccaaacccttctcctccttcatatctcaatccccaccacttcaacaatatctcaaaaccgccatttttgcgtttctactcttcttcttcgtcctctaatctccttccgctaaacagagatgggaattacaacgatacaacttcaatcacaatctccgtttgcccaggttgtggagttcatatgcaaaactcaaacccaaaacatccaggtttcttcatcaaaccatcaacagagaaacagaggaacgatttgaatcttcgtgatctcacacccatctctcaagagcctgaatttatagattcaatcaaacgagggtttatcattgaaccaatcagtagttctgacttaaaccctagagatgatgaaccatcagattcaagaccattggtttgtgctaggtgtcattcacttagacattacgggagagtgaaagatccaacggttgagaatcttcttcctgattttgattttgatcatactgttggtaggagactaggttcagcttctggtgctagaactgttgtgttgatggttgttgatgcttcagatttcgatggttcttttcctaagagggtagctaagcttgtgtcgagaactattgatgagaataatatggcttggaaagaagggaagtctggtaatgtacctagagttgttgttgttgtgactaagattgatttgttaccgagttcgttgtctcctaataggtttgagcaatgggttagattaagagctcgtgaaggtggtttaagtaagattactaagttgcattttgttagtcctgttaagaattgggggattaaggatttggttgaagatgtggctgctatggctgggaagagaggtcatgtttgggctgttggatcgcagaatgccggaaaaagtacgttgattaatgctgttgggaaggttgttggtgggaaagtttggcatttgacggaagctcctgtgccgggaactacgttggggataattaggattgaaggtgttttgccttttgaggctaagttgtttgatactccggggctgttgaatccgcatcagatcactacgaggcttacgagagaggagcagagacttgttcatattagcaaggagcttaaaccaaggacttataggatcaaggtttggttcaatataatagaatgtgttggctttttggatacaattgtgggattgttaattggattgtgttgttgttgcaggaaggttatacggttcacattggtgggctaatgagacttgacattgatgaagcatctgttgattctctatatgtgacagtttgggcgtctccttatgttccacttcacatggggaagaaggagaatgcttacaaaacactcgaggaccatttcggttgtcgattgcaggtaaagctctggccttttcagttgtgtaagacagaatatgatcaatttatgtattgaacattatttagattacaaagttttgatgtaaaaagaaaatattacttgaggaccatttcgattgtagataaatatcatattgtaacgaacttgaagtatttaggatcaaagcttgatttgaacactgcccttgatactagtcctaaccttttgtacattttggtttttgatgaagccgccgattggagagaagcgggttgaagagttggggaaatgggttagaaaggaattccgagtgagtggaaccagttgggacacaagttcagtagatatagctgtttcaggtctcggttggtttgcgttaggactaaaaggagacgcgattttaggtgtatggactcacgaggggattgatgtcttctgccgtgactcattgctcccgcaacgagcacacacttttgaagactctggattcactgtctccaagatcgttgccaaagctgatagaaattttaaccaaattcacaaggaggaaacacagaagaaacgaaaacccaacaagtctttttcagattctgtatctgacagagacaatagccgcgaggtgtcacagccttcagatatcttaccaacaatgtgactcttataagttagttaccttttccttggtttgttgaaattacattgaaagcttattttcttcaaagcttatttcattcattgaaaggttcattacatagaccataacaagttggtaacatagatgatttgtattgaattatacatcaaacaaacacagagttgctctgtttcaccacaatagcttcatagagtgaaatcagtgagacttctaaactctctatcaactgcaaataggacatggaacaagaccattctcattacactcattacatctcacaaccaccgaagcactaccccatcctttcaccatcttacagcttccattacaccgaaaacacggcaagaaaaacaaaccgccgcaaccatcacacgcgccgctctcgcatcctcccgctttctttctcggaatcccgctgatcagctctccgaaagaaccttcctcaactagtctcaacacttcctctcctccaccaatgtaccttcccttcacaaaaacccgaggcggcaatgcagccactccctcatccccaactctcttcgccattagactcacaagctcttctctaaaccttctatccatcgacacatctctctcgcaaaccacaacaccaaaactctccaccgccgctctcacagcgttacacgcctcaaacgtttgacgaacacctcgcaacgacgtcgtgtacatcaccacacgattctctcctcctggtggacaaatcctctcaaatttctcatccaatttcaaatctaacggtttaaacgattttctagggcttctcgaattagaatccgaatcctctctgttcagatctagcggtttcaaaacctcgtcgttcaagttttttctagggtttctccgactaggatctgaattctctttgttctctccaccaaacactttatacttcaccggagtcttaggaagtggcgtgaatcggaaactctctccgtcgagaccagacattaactcccaagagttaataatctccggttccgactttatcacccttggctcagaccatattgacttagattttgtatcgactgtgaatttctccggcggcgtcataggaggagaaggaggaggaggaggatcgagtgtgagaagaccataagtggtggaggttagtttgacgatgtggtgaccgaaggcggagcttccaccgccgatttgagagaagtcttcgtcgtggtttaggaggttagatgagacgcaacccattatcaccggagatttgatttttttatcgatttgaacgccggaaaattcctttttttgagagattcgaaaaaattgagtttttgaaaattttgagaggaacggtcgagtgagagaggttaagacaaaactatgaaaagtaggaaaaatgtgactttggcctttgtctttggtactctttaaactataatataagtttatgttcttgtaataaagtaaagttaaagatggtgattgattgaagaagatgtgaaggtttaactttaaaaaacaagttcaaattttggtttcttttaaaaaatttgatatgtagatttattattgagttgtgtgctacaatgaaagcatatttctgtggtataaacgaaagtgatgatttttttttttttttcaattgaaattattggtaacattcttttgtaggtattaaaattcataacgaaaataaataaagaatcggtaggccatttttcaaacctggatatggacctacacattcacgttttaggcgctaaactataaaaatgaagaaaaagatttttttttattaaaagttgttacaacaaaaaaaaaacttgcacaattagcaaaaacatagaatgttagtgttacaaataattacactaaccacaaaaaagaagactaattagtagtgaaaagaagaaagatccatagagccatcttcaacaaaggctaaggatatctcatagccagacaggttttataaccattctaaggcattcgaaacaacataagattgcccccaatacatccgacgatgcactttgagcaatgagaaaagttctcatggttgatgcattatttatatatgtgatcaaatctacagtaacacgattatgcattttaataacgttcttgaggagtatttacattgtgaactttcttttgaggtgaaacagttctctttcgttgggctagttttttattttgattaccgatttgcttgatgcgtctcatatggatataaaaacgaccaagcaaaaatagtgggaaagcaaatcctaacccaattacaccatttgtagcccattagtggtggtataaaagccattaattaaagtaatgcacagtagtgttaaattagaaagtagactattttggaaaagaatagttatggagaaaccaacaacaattattgataggcacagagtgtaggacaatgccctattggctgagagcctcaggccttattcaggtcccattatgtggtcaatgttaatgacttcatttccctgagattttaggtgtaccctcataatcgtactaattaaacaaatttcagtagtaataattgaacaacttactatcaacatagccaaaaataatgagaaactcaattattttatatttattgtccactttatgaaattatagtccactaactcacatgggcatggtctcatcatgcacttctagtctctctattctctaatttagattactaactctaaatccaacctaccaattcctcctaataatagtgacaaaaaatgttcctctttaagagaataaactttaaactgattgatattagagatcccttgatattatccatattaattgtcttaaattcgatgttcatcttgattaattctatgtatgaactactcatatatataccaaatgttaactgcatgatttataccattgttaactttttctatcttataactgaaattaaatatttgatattaaagaataaagaaatggggttcatgcattacaaaagaattagaatcttatcggtaaattaaatatagaattcttaggagctttatcaaaaactaccaaataaaatgtgcctaaacattcactgccaataactttttgacatggagattttgactagtccaagcaaaactcattcatatatgagaccttttctcgatgctacataagttaataaatattaaaagaatctcagtttcaaagttgtatttttggctaaaaccattattttgtagtcttcgaggtcttgtcgtccttcatttgcacgcctcgtttttattatcgttcgtatttcgtatctatcatgtatgcattaggatcttatgtttgtatgagtattaaattctgaaataagtttttgattgtgtccgtgacatttcaattaagcataaacccttattactagccaaattggaagttggttggaaattagaaaattaattttctgataagagtaatgtaaactgaaaaatacttttgagcattttcctcctactttttatgaaaaatgtataaaagtattccgtgtattatcattttttctctaaagaactcccaaatattggttaatgtatagtgtgatcattagagtttgaacaccttgttggagagtgatctaaactgatctaccaagatcgaacaaaacaaccttagatcatattaaactgattgagactaaccaaaattacaaacttatactgcaaagccatagtaaaaaatcttagataattgtgaatatatattatttatattattatagtttaggaatttagctttatagtatgtatattatttattctgtagtgatcttgaacttcaatttattttcatctttgtataataacagttaatactaattattttgtaacatacacaccttttttgttttgtttttattctcatcaaatttattgtttttttttttttttacagcaaatttatttgttttgttcaacatagcaggatagagaaacactgacccactaaaatacatcacctatgatttctgattactactataattctgatccaagaaaaaagcaattactctaaattcatatatatatatatatatatatatatatatatatatatttttttatcaatagagttgaaaacttttaaaaatagcttctgctagttttagcaaaaaggtgaaaaccagagtaaaagcattcttccaaataaaatagggtaaaagtattactctaaattacactttttctaatcacaaatatattaaaaattgaattttgtagattattattataaaaataattaataattattctcacacatttttattaaactctcatcatattaattaatttggtttaacatatcataaaaagagacaaactacgatttctaaccactataagattacttatccccaacataacagttcttgaagactacattctctagccacccaacttctatagattatcacaattttaactattacaggctctcttttcattttgcaatttcctaagaaacgttctatattgtgtaaacacgtgacaacaccaatgagctaaatcacaatttacaaaagaactaattcttttttcaaagaaaacaataaaaatcatgttgggaactttggattcttggtacaacgaggcattaaagtctgtggctctctccttcttgaaaatatttacaatgtcatcttggaccgtcaaaatcttcatttactatattacattaatggtggtatatatttaataatcccatgtaacatctgtgcaagtgcacttgcttattaatatagaacataaccagaaagctgcaacaattctgatgcacccttgtttgttatataatcatcatcacaaatatttttagtctattcttagttcagttatttttgttttatcataagcatcattttcatcaacagctgttatattttctactctgttcagtggagatagtgaaactgttgcttttttttggacgtttgcgaaactgttttaaatgtaaaataatcaagcacgagagagattatccctccttaattttcttgattaaacttaagctaatcgacaaagaaaaataaaataaacctttaagacgatattccttattttagcacataatttatctaagttataatttcaaaacaaaattcaaattacagtatttagtctctacgaaaattaaaactaggaaaattaagaaagttacaataagtttttttccaagtataaatatattttatgagagatgaggtttattcttttatcaaaaaaaaaatgagaggatgagaattatttatgtaatttatagttttttttttgttatacgagcttaccgtatatgtatttacaaaaggattgtaaaacacaatcgttttttaatttactaatatcagctagttaacatattgttaattactattatttgtttgtttaagttatataaatttttatttaccaaattaactcatttatttatgatgtttgtcgtgtatactatatatatacacattcatgctatcttccttcgtctcgtggtatagttacttacatgagcatcaacttcacttatagctaacttttttcttctctttctttctctctggctcgtcgcttttagaaaacgttaattcaatatggctaaaaagaacggaacgtcttggttcaccgccgtgaaaaagattctctggtcaccgtcaaaagactccgacaagaagactcaccaccacaaagaaaccgatattaaggtcttattttaattctctactatgaattactacttaacctcgtctctaaatagacttttaacccgtaagtttcgatcttttgtggctaactgcagagaaaagaaaagaaaggatggatttttcgaaagaccaaactcgaaaccacaaactctgtcttacaacatactgtccgtacggtggaggcagaggagaaagaaaaaccgccggtgattgtctcctccgtagaggaaggtgtcaccgagatcgttaagctaacggcaactccgggttttattagacgtcattgggctgccattattattcagacagctttccgaggttacctcgtaagtaaaaaacaaacaaacaaaaatcttttttttttggtatgtgtaacgtaaaaacgtagtttgaggaaacttttagtttccatattttagttgatttgaaactttgttttgaaaatattttgtttcacaagaattttgtcagtgtcatttttttaatgagttctaaatttgtctagaatttgtgttatctttagtgaaatttcggattttattgttgttgttgttgtcataattttgtgttatttttctttaagcgttcttaatttttcaatttgaacttttttgtttgtcacaaatttgtcactaatatttttcgtttatatgaaaaaagtctaggagagcattacgggcgttgaaaggaatagtgaagctacaagcattagtgagaggtaacaatgtaagaaaccaagcaaaactcactttaagatgcatcaaggctttggttcgagttcaagatcaagtgcttaatcatcatcaacaacaacgctcaagagtcttattatcaccaccatcgagaaactacaatatagaagcaagacgtaactcaatgttcgctgaatctaacggtttttgggacaccaaaacatatcttcaagacatccgtagccgtagatctttggttagtgactgaaaatttattagaccacaactttatttgtttttgtgttgatgacaataaatttgtcttcgttttttttttttgcagtcgagggacatgaataggtgcaataatgaattttactcagaggaaacagaattgattttgcagaagaaattagagattgctattaaacgagagaaagctcaagcacttgctctctctaatcaggtttttattcatttatgttattttttacttcttttattttggacattaacagtatttaaaatccatattgtgaattttcttttgggggataattgggaaaacagtcttttaaaaaacaattaaatatatcaacattaaggaaatatgtaattttgttttcgttttagggattaggattattacggttagttttaagacttataattgcttgggaatttaaatttataatctagaattaattttttaatcaatttttttttttaatcttgatagaaatttaactaattttatataaaaaaatattgaatgtggataaattgggaaaacatttttaaactttaggatatttaggtttaagacatatgtacgatttatttcttatatgtttaggaactaaacaccaatatttagtttagattttacactattatgttaaaataaaatttcgactattatcatagtttctatttttggaacaatctagtttagagataaaggatactaatttactctgtttatgtgaaagattcggagccggtcttcccggaatcaatcagccggcgatgatagggagcttctagagagaacacaatggcttgaccgatggatggctacaaagcaatgggacgacacaatcaccaattccacaaacgttagagatcctatcaagactcttgaggctgtaacaactcatcatcatcagagatcatatccagcgactccaccgtcttgcagagcttcaagatccgttatggtgagatcagctagtccaagaataccatgttcgccttcctcgatgcagccaaattacatgtcggcgacagagtcggctaaggctaaggcaaggactcagagcacgccacggaggagaccaatgacagcgaagaagcggctttgttatgcggaggaagagagtttgaggagtccaagctttaagagttgtctctggggagatcatgaatccgattattcttgttgttacggtgatgggttcgccgggaaaatctcaccttgttctaccactgagctccggtggttaaagtgagactttcttgtttttcgtaatatttacgatcatgggatttgtttagggtctattttttccttgtgccaaaaggttacttagataacaaagctataattctcctttaaacaacttgacatcgattctttaagccgtagatcatcacaatcacataatcttttaaaggtatgtgtaagatttggctagagcagagacatgttctaaagtgtaatgtccaagtctaccagttctatagagattcaatatcttagaagcaactcttagatcagcaaactcacttgcttcttctggaaccctaagaaccgatcttaacgcagcgaattgcgtctctataagatttcccatgctgatttcgtcttctaagtttccgtcaaatgctgaaattgtctcgtacagaactcttcgaacgtcgtacactataaaatcctacaaataaagaaaagaaaggaatttgatacaactaacgaaagactactgattagcagataatgaatcctattgtcttgttctggtacctgtgtatgatctgttgcgtattgcctcttatgtttggcatcagacttggagctctcatcggataaactttctgttaaatcctgagatttgcacagtttagcccatttcttgtattcatggctcgaatttagtatcgtcagaaataaccgtgctagtttgagttccccaactatatcatccgggatagctcctgcattaggtaacccacccaataagctctctgcgctatccgggaatgagaatagagaaataaaaccttaacgggtatataatcattctgtttgtgtttagtgctgatcaaacctgttaacgctaactttgcgcagatctcagcgtcatacagattaggaggaaaaattccaggcgtgtccagtacatagacattgggatggctaccgatctgaaaacaaatgaattctcttaaccttactaatactaatagcagcataagtgaacacatgcaagtatcatgaccgcaataataagcatacagaggaactgaatatccttggagcgcgtgagaaatctactaacagcgacataatctcaagtattctggtaaacgaaaggaacaaaccttcaagctcataatgtctttagtatctccaggctgggagctaactgttgtatgctttagcttacctttctctgttaaaatcgatcatgaaaaactgaaaatcccgcaaaagcaacaatacttgatgaaataggagttacctgcagcactaatccttccgatatgatgaagagaatttgaaagagcggactttcctacattaggaatcccaagaagcatcatagtagtagtatgaccagaatgaccagccttatgcaattccctaacttgactctgcaaaaagttcagtaactgaacaaagaaaaagtcttcttaagtttctttcgccataaagaagaaagaaccgaaagatgaaaatcgagacgactatcggataaaatgttacttgcttgacacaatctttgttatgtgaattcactgcatacgaaagatagtttctctcttcaaagtaatctatacacttcttcaactccaaaggatccgcgagttccattttgttcaacacaatgattcgttttgacggtaaaggcgaaaactttctcaacaactcatactcagaagacaacggaatctacacagaaaagagaaaaaaaaaaaacttagcttcgttctctgaggcaattaatcgaacacttggaggacaaagaaaacgaacacgagcgtctcgaatctcaagtacgaaatcgaccaaaggaatacgttcggagattgctctaactgctgcggccatgtgaggtccgtaccatctccggttagggtttctcgacgccttgatcacggcgtctccgatttccctcgcaatcttccaggttttagccgttgccatttttcaacataaacatccgcgcgttgaagcctaaataaagcccatttagctccattgggccctttaatgctttaaacataaagcctcatcccatcgaaaatacgaggagagaatcttaagatttttttttttttttgtataaaataaaatagaattgtcactaagctagtattaaaaagtaaaaagtaaaattggtaaaacgtatcgtattttaacatggtgaaaaagtagatgaaatagttttattttaagaaattttttatgaacacaatattatattttttaaaaattatatacataatatttatatgttttgatctatatatgtggataaacatgaagccatttaaggaagatttatatttctttaatctagaaaatttcaaaatcatatttagaaccgtgtaaatcattttaagatttgtctacacgtcttaaggtataccacgcctcatttgattaggcggaacaaaatcaaatcacaacggctatattatgatgattttgaacgccttttaaagacgctccttcccaaaactataaagatacaagaagttttgagattttccttattcggtcaaatttatcattttcggtcaaatttatcatttagttagccaacggctcttttaatttaatgactgtgatttctttacttctttagagcatatgaccgtttgtatgagcctctatataagctcatcttagtttgtatctttattcgagtcattcaagttaagtaatagaaagtgtgtttttcttttaaagatgtgtaatctcttgaagtctattagttcaatctattggtatgactctaatagtcttgtttgattgcgtttctatatattttgtgagattcaaacattttggtttgatcagtattgttgtggattcaacgacaaaactccatcattcatcgttactatcgttctatcataccattcaagctgtagactttgaaatagagaagcgtaaaccgaaggcggatactgaggttagtattactaactataatcatcataaaaataaattgattattagatcgaaaaatacatttttgttatttatctaaatttttttaatcacctcaacattaaccaatagttcattgcaaatttgtcccaatatgtcactcaatgtttgttccaacaatattatcactttaacttaacacattattaattatcaaataaataacagcttgtctagttgtaaatgtaaatagccttcatacattttatatctatgaatttatttataaaaccttttgactaaaactctatattataatgagattcaaagatataaatttaacaaaatactttgagaaacttttgacacatatcattttcaatctaagaatattgagagagatagaaaagggaaaactcacaagataaactttcctcttcgatcagtgattttgatttagagaagataaaaagacagaaataaaattgttatgtcacgattcaattgataagtacctatgtatatataatagaaccaaacattattacttaattgttattagataactcaacgttaaaattattaattatgaccagagtctgaaacatagtccaacccaacacttttttttttgtttttttttggactgggctaggcttcggactttagctcttattgacactatacaacaaattaaaaagtggtgtttggttattttatatagagatatcaatggtgagaacatttttatttttgtctttttacttttttgaaattggaatgactgattgaagaggaaagcttgtcatgtgagttatcccctttctatatctctctctcataattgtcttagatcaaaaatgatatatcaaagtttcaaaaatattatattagatttaggactggcccaaacaattttcatgtctatagcaaaaaagaataataagtcaactaacaaacaaaacttaaatgaaaaatccaagtaggagaggccaagtggctaacccaaaaaaaaacggacgagcaagcgtgtgggatggagaaaatgaccacgaatcgtatcacctaacacttgtaggcttcctccacgagatcccttctaaaaagaattgtcataagaaaacaaaaacttctttctctgatgatatgtgggatgtacagagtcgagtggttgtccctcctattctgaggacacctacaaagattaggttgaatctgaatgtgttttcaaattttagtttcacaaatttggattctagggaaatcaaaagattaagggattctaagaacaatcaacgattgtttttctttttgttttcataatcgtttctttggctttttttttaatcaaatgtgaggagttaattagatttttctatttctcttttatgtttgaattggttgttacaaatatgcgtcagtagaatatttaaattttacttgttatacatttacttgtaatgcgtcagtgaaaattacttgtaattcatcgtggtgttagccttagttatacatttacctttatggtttacttcaatagttttagttcagtgtattgatatctcctaaatcttaatataaatttttcttcttaattttgtctgatatagttgagtagaatatgggatgtaatgatttgattgttggcgatgtgtgcgttcattgtcgagaaaatgcctcagatattatccagttacaagaaaggctgttagtcagaagaatcattgtctttgcatcggcccttgtccggatgataggcctcataaacgattcgaaatgttaaactcttcaaaaaatgtaaaagaacaaatcctaagttgaatgtatttctaaaaacttcaaaaatcataatatttctaaaaaactattttgctttgattataataaaatttctagaacacaaattttccagaaatatttttgttgttgatgtggtgacccataatttctggttttcttttttcctctataaacctttttctttttctagttttggtatgtgtggaactttacctttttgtgtatatttaaggattgattagttcttctgctatcatctgcaaatgatatggttgcgggcaatcgcaattgttaacgtttaaaataatcgtaaaaaacattttaaacccttcgggaccactctaaaacttttgaaatcgtgtttgcagttgcaggtggtagcggttgaaataaaataaaattatccaaaccgtttattcattaatataaaatacacaaacaacctatattttaaaaaaacagtatcaaaccctatataatattaacattaattctcaaaatcctaatatttttctctatcaaaatcatatagtcaactcataagaatgacaaaatactaactaagtattgtaataataatattaatccgaaagttttaagtgattcaaaacatatttttttgttgtaattttgtcatattacttgatgatggttttttatgaaccaaatgtatgaagtaataaacatttagcttaacaatttatttattttgaataattgtgtaaacttttatatatggtttttattataaattatattatattattttatatttgatcatataatataatttataataaaaaccatatatatatatatattaaaaattacaatacaaaatcgtaagccaaatcgtttgattggtcttcaacaatttgtttatgctatcatattttaggacaaattggctataatttcatattttttaatgttttatgttataaataactaaatcgcctaaaccgcttaaattgcttaaacttcgaataagctttcttgatactaggcactggatcaccgcctgcataacgctttgctctttctttcttcaacattgtctataactaaaagatttacattgtgtcgttgttcaacataaatcttttggtcctatgagttttttataccttttatctaactatgaatctcacactatgaaacatggaactggacatagtagagaaggagaaggataaattcatcagtgacttcttaaacgaaaattagcaaaagtaaaagtcaaagctacttaggagctcaagtggtgagaagaagtggggtttgttcatcgccgagaaactgttatggcatttttataatggaaccatttgaaaataaattagggtatgtatatatatatcattaattgtgacatttgtaacccgattgatcgagtttgacataaaacagctcgaacttttcattattgaacaaaaaaacagtgacccaaactgattgtggtaatccacttggccatagcggagacttgtcttgtttttgacctaaatactatctcctgtttttttaaaaaaggaaattagaaaagcaacaaagaagtgattgtggaatcatttaaacttagagagagttggttttcgagaaggacaagaccttgatttgaagtttgagggtatcattgacaaggaaacctttgaaaccccatccagtttttgttacatttggccatccccgcactataagaacaaaacaaaagttaagtttaacaatttgtatgtttcaaataagcctaaataatttagtagtagacgatgaaaaggagatatcaaaccaagacaccaaccttgtttctccacaaaggtagatcggctcttgtcaatcactcgtaacttggctttcacgtaacccttttcatttgactcactcaacaaaagagtgacaacgaatcaccgattcctgatctaactccatttggatacactttcgataccctacacaagtagtacacacccttcacattaaacccaatgtgagccctcatggtgaagtagagggtctaacattaaacctatttttttaaaactcgaaaataaaaatttattttgaaaagacaattttacaattcacataattaagggtataataggttttcaattaatataaatcatagatggaaaattctaataaacatatatatatatatatatatggacaaatcataaacaaaatatattttattttcaattttctcaaaaaatatacacaaaagaaggaatacatagaccaaatataaaaaagaggaaaactacagactaaatacaaaaaaaagatatatacagaccaattgccaaaaaagaagaagaaaaaagaagaccaaatacatatccattgcttgactagaggacagatattagctttctcattcacattcatactttagattcgtgctaattactatataaaattcggtgaattgcatttttctccacaactagaaaacaattaggggtatcaaaatgggtcgagattcatgggtcaactcaactcaactcaacccatgaaccttaatgaattgaaaattttgactcaaatgaattgatagatcaaatgagttattgggtcaattggtttgatgaatatatttacattttggatagtatttgttgggggtttacaaaaaaaagaaaaaaggatagtatttgttgggtaatttcgggtatggtattaaacccaaactgaatcaaacccgatctaaaccgaaccagaatgggtccatctctatttggttctagtatatagagccatagaggtgtcgattgtgtgacaacattttcacttctgcccttaaatcaaaatgacaacttcgagaggaaagcttatcttgtgagtaatcacatctccatctctctcttaatctctctcaaagtatttcttatattgtaatctttgaatcacataatatctatatgatttgaaggatctagggatttcagaagatccagaatacttaagttttttttttctttcgtaatcgtttctttggattttcaaaatttagttccacaattttggaatctagagaaatcagaagatctacggactctaagaccaatcaacgattgtgtagggttttgtttttctttttgttttcttaatcgtttctttggttttgtctgaattggctatcacaattttgcgtaaggagaaaatatagggaactcagaaaatttagggattggtttttttttgtttaaccacaataatattttgttttctgataagtattatcatattaaatgtagaacctagcataatttattgatctgatgcatcttagtggagttcgtggccaatgactaccttaaatatttataacttcaactatgaaataataattagggtttcaaagactaatgttttctgagctttcttgagacaatttttaatctcatgggtcatggttttgtatatatttcatgtcttacggctccaaaaacaaacccatatataagttaattttatgttcgaaatctatatttatgtaggtcaaacgaagatgtcagtaacaatgggatggagaagaaggctctcactactgctgaatcagttcgggttgtggaaaagcatccatgggttatcacctttccgaaccatgaagacttgacttttctcttcgatccattggaacggaagaggtacacactgaatttacccgagttagttggaaccgatgtttgttactcgaaagacggatggttgcttatgcgaagatccagtttagtggacatgttcttcttcaacccgtatactagggagcttataaacttgccaaagtgtgagttggcctttcaagcgattgctttctcttcggcccctacatcaggtacttgtgtggtgttagcgttaagaccttttacaagatatatcatccgtataagcatttgctatcctggagcaactgagtggattactcaagaattttcatgctctcttagatttgacccatacatgcatagcaaccttgtctatgccaacgatcacttctattgttttagctcaggaggtgttttagttgactttgatgtagcttcccgcacaatgagtgaacaagcatggaatgaacatagatgcgcttatatgcgtaatgataatgcagaatggtttaatcttccgaagagaatttacttggctgagcagaaaggagagctctttctcatgtatacatgtagcagcgagataccgatggtgtataaacttgtctcctcaaattgggaggagataaatagtactactcttgacggcgtgacaatctttgcaagtatgtattcctcggagacgagattggatgttcttgggatgaggaacagtgtgtacttcccaaagtatggtttagattgcaagggatgtgtatcctactcgtttgatgaagccaggtactatccgcgtaagcagcttccaaaaccaacaatatggcaaatgcagaaagaactttgccctcttaggagtctggatcgagccaccgtctaaggacatcttagatgtgatgaaatgataagcaaatggatgatggtaaaggtaagtgaagctagctttgagttttcctattttatttgatatatgtatttgatcatagcatgtgtgaaacttatggcgactttaagattcagtactgttaagctttatgttttagctttcaaagtctttgtatgtgaatgatttgaggctatgtaaacagttttattgtttaacttccatagtcttttgcatgtgattgaattttcatatcattcaaaccgtaattctagccaaaacctttaacatgaagatataccctttttgtgacatactaatgctaattttattaatcctattgagaatttaattttcataagaataaaataaaattaaagatcatacccaaaaaaaaaaagtaatcacaacaacaaaatttctcttttaattttctctgattcaaaaccctagccgtcgtctgagcatggacaagtttgtactatcatgttcctcctttcttcatcgaccatcaataatatgaactgcagattagggaaggaggtcgcagatggaaacgaaagaaggatatgaagaaagaaaaacgatcgagagctacatatgttcttgaagaggttatgatttacagtttctaaaccctagatctcctcatgatttattagtatgacatatatatatatatatataacttaatacttcttctgttttatattagttgtagtttaagatatttacacacatattaagaaatcataaaaatctcatttaatctacttttttatataaaaaatatcattaattataaccaattcaaccaataaaaaatatatgattaaatacaattggttaaaaagtattaaatatatttattatttgtatataaagttgaaaacaatttgaaaaagaaataaaaacccttaaactacatttatatagaaacagattttaatgataaaaaagatttcttcctttttattatttccttttctctttatgtttgtgtttacgttttcttataaatagagattgttttcttcttagaagaggcatccgaaataacttgttctcgttgaagtttactttcttacgtttttttttcttctgttctctttcagttctataaagaggcttattacttgaagtttgattcttggtctgtggttgtattcgatcagcttgctggtgacatgtagctctacaagaatattaacgacataccccaacctagggatttgatgatcacggttgatcacaagagcgacactgtattgttaccaatatacggcaggatggttccattcaacgtgactacaataagaacagtcttaggcaatcaaaacaccatccgtgtaatattcaatgtcccgggtacacccttaaaccctaatgactctttgaaaaacaaggacgctatctacctcaaggaggtttcattccggaccaaggattcaaggcatagcagcgatgtagttcaacaggttaagagcctcagacggaaagtcatggcacgggagtcagagagagctgagagaacttcactggtgaaccaagaaaaacttcagattgtaaggaacaactcaaaacccttaagtttgtccaatctgtggatccgtccgccttttagtggacgcaagaagaatcgtgggacacttgaagctcatgtcaatggttttaggtattcaacgaccaacgagcgcgttgatgtcctgtttgcaaacataaagcatgcgttttttcagccggcggagaaggagatgaccaccctcttacattttcatctccacaaccacatcatggtaggaaccaagaaaacaaaagacgtacagttttatgtggaggtaatggatgttgtgcagtctttaggaggtaggaggagatcatcagcttatgatgcagatgagattgttgaagaacagagagagcgcgataggaaaaataagatcaacatggatttcaatcactttgcaaatcaggtcaacgatatgtggcaactaccccagtttgcaagtttgagcttagagtttgatcaacctctgagagagtttggtttcaatggtgtcccccacaagacatctaccttcataataccgacctcaagctgcttagttgagctgacagaatccccgttcttggtggtctgtctaagtgagattgagattgtgaatcttgagagagttgggtttggtcaaaagagctttgacatggctatcatcttcaaggacttgaagaaagatgttcttagggttgactcagttccaacaagttagttagaggggataaaggaatggcttgacactacagatataaagtactacgagagcaaactgaatctgaactggagacagatcctgaagacgatcacggatgatccgcagagctttacagatgctggaggatgggagtttttgaatcaggacggaagcgattcagagtctggcggctctgaggactcagacaaagggtatgaaccatcagatgtggaggttgagtctgagtcagaggacgagacatcagagagtgagtcagacgatgaagaagaagaagaggactcagagcaagagtcagaggaagagaaaggtaagacttgggctgagctggagagagaagctactaatgcagacagagagcatggagttgagtctgatagtgaggaagagaggaagagaaggaagatgaaagcgtttgggaaatcgcgtcctggaagtagcggtgcaggcggtagtagcagcatgaagaacatgccaccatctaaacgcagcaggcaccggtgaaaacaaaataatcaagagtttgagttctgcttgcttatcattttagccttttgttctgcttatcttttgtatcatataaaaaaactgctttagattattatctatctattctatgcccttgggaaaataatgaagtcttaggtttcttgtcgttcttaataaaatttgtttcgacttaaattggcagaaaataccattgtggcatcctctaacggttggtcttgtaaataattaaagggtatgccataaaccaaaaggtaaaaatgaatacttaagttattaaagaaatcttggattcaccattattattatgagatacgaagatgttcccactattagtggtggtgagtttcctgtgggacaagcaatagaaaggtttccaatcgacgatgtctaagagacaaaacacatcaaagctcacaagctcattcacccatctccctgctgatgctgatcttgtcttcatcacccatgcatcaacttcaacttaattagcttatatacacaactctctctggtatatataagaagagtaatatattttggcagttgtttctcttgcatgtggttctttggagagttcctttagagtcattgaacgtatgagtacaaaggatgttgtgacatggacatggatgatttatgcatatggaatgtatagcgaaggtgagaaagctgttgaaaacttttgttgatatcgaaaaatcaggtcttgttcccgatggtgttgtcttcattttcatcatcaatgcttgcagccactctggcttgccttgcttcattgaacacatcaagaaagaatcctggatgtagctggaggattgaaatcggtaaaaaacaatctccttctagtctctcgtcattctcatactctgttttatgtgtatgcatgcccaaatcctttgtattggcttaagatgaaaatggagtcttgatgtgtatttcatcggagatgcttaaggaaatcagggagataagctttagtatatagttttcactgtataaatatctgtttaacatgttttcttcccgttacatataaaacattccttaaaaaaaaaaaaaaaaattgggaatcgcataacaaactggaaaaaaagaaataataaaaaggaaacaaaataataaaaagtaaatccttttagaaaaacaaattcctttatttcaacatctataaatactactagcaaaacaattaaaccaacaaaaaaagaaaagcaaaacaattagtccatacgaagaagaaagaaaccctaagaatgaaagaagacggaatttgcttggagtgcaagaggccaacagaaaccgtggttaactacaagaacggagatacaatctgcattgagtgtggccatgtcatagagaataacatcatcgatgacctagacggtgcttcgaccaaccctaatctcaaatccggccatctccccactatcatcttcaaacttagcggaaaatcttcctcccttgcctcaaaattgcgccgaacacagaatgaaatgatcaaaaacaagcaggaagaagatgtaatcaagatagcctatgcggaaatcgagaggatgaccgaagcgctagggttaactttcggtatcagtaatacggcgtgcaagattctttcgaaactggataaaaagaacttacgcggagggaagagtttgagagggctttgcgcggcctctgtatcaagggcatgtcgccaagtgaatataccaaaaacattgaaagagatctcggcagtagccaacgtggatatgaaggagataaacaaagcggtgaagcttcttggagattctttcggtactatttgaatgatatggaaattcaatcacatgtaaaagactacggaaattaatcaataaaactatatatatattttttttgcataacctcgaatcagtcacatacaaagacttttaaagttgaaacataaatctgaaatgtaagttttcataacagtactgaatcatttttttttttggacatgaatgtaaacagtactaaatcttaaagtcaacataagtttcacatattcaatgatcaaataaaaaggaaaacggaaagatagctcatcttacctttaccatcatccatatttgcttatcatttcatcgaatctaagatgtcttaagacggtggttcaatccaaagactcataagagggcaaaggtctttctgcttttcaaatcttgatggttttggaagcggcttacgcggatagtacctgcctttatcaaacgagtaggatacacatgatctcttgcaacgtaaaccataaaactttgggaagtacacactgttccacatgccacaaacattcaatctcgtctctgaggagtacttacttgcaaagattgtcaggccgtcaagagtagcaccactcatctcctcccaatccgaggagacaagtttatacagcaacggtatctcgctgctacatgtaaacatgagaaagagctctcctttctatcaaacaacaagagactccttctcctacagagacttcaatccatcgcaacaacattgtttctgtttcagtttcagttaaaggagattcaggcccaaaagaaaaagagaagcccacgaagcccatcctttactcatcgaaactctgcaacaatcaaagcagaggaacatcacgcgagacaccgccgtcgacaaacataaacgtgcacaatcattttgatgttcttggaagcagcagcatttcatgcaactaggacacctgtcattagctattatgtaatcctcctctttatatagttctctgcttgtaatcgaattcactaaggaagaaatacacaattattttctctctgaagcttttgcttctactttcatggtatcagagcttaggactttgttcctaagccatggaagaatctatttttgtttcctctcttaacatctctcaagttgttactctcaaactcactcccacaaactaccttttgtggaaaacccaatttgagtcttacctttcatctcatcttcttctaggatttgttaccggcgccactcctcggcctgcctccaccatcattgtcacaaaggatgatattcagtctgaagaagcaaatcaagaatttctgaaatggactcgaatcgatcagttggtcaaagcttggatttttggatctctctctgaagaagctctcaaagttgttattggcttaaactctgctcaagaggtatggcttggtttagcaagacgttttaatcgtttttccaccactaggaaatatgatctgcagaaacgactaggcacttgttcaaaagctggaaaaacgatggatgcttatctaagtgaggttaaaaacatatgtgaccagcttgattcaattggctttccggttacagaacaagagaagatttttggtgttctgaatgggctaggaaaggagtatgagtccatagcaactgtaatagaacactctcttgatgtgtatccaggtccgtgttttgacgatgtcgtgtacaagctcactacgtttgatgataaactctccacttatactgcaaattccgaagtcactccacatctggccttttacacggacaaaagctattcttcacggggtaataacaatagccgtggtggaagatatggtaattttcgcggtcgtggttcctattcttcgcgtggtcgtggttttcatcaacagtttggttctggttcaaacaatggctctggaaatggttcaaaacccacatgtcaaatttgcaggaaatatggtcactcagcctttaagtgttacacacggtttgaagaaaactatcttcctgaagatcttcctaatgcatttgctgctatgcgggtttccgatcaaaatcaagcttcaagtcacgaatggcttcccgactcggctgctactgcgcatatcacgaacacaaccgatggccttcaaaactctcagacatactcaggtgatgattctgtgatagtagggaatggagattttctgcccatcactcatattggtactatccctctgaacatttctcaaggtacattgcctttagaggatgtcttagtatgtcctggaataactaaatcgcttttatctgtttccaagcttactgatgattatccctgctcttttacgtttgactctgattctgttgttataaaggacaaacgaacacaacaactcctcacacaaggaaacaagcataaaggtctctacgtgttgaaggatgtcccgtttcaaacttattactctaccaggcaacaatctagtgatgatgaagtgtggcatcagagattgggtcaccctaataaagaagttctacaacaccttatcaaaactaaagctattgtagtcaataaaacaagctccaatatgtgtgaggcttgtcaaatggggaaagtatgtcgtcttccttttgttgcttctgaatttgtatcttctcggcccctagaacgtattcattgtgatctatggggccctgcccctgttacttctgctcaaggttttcaatattatgtcatctttatcgacaattattctcgattcacatggttctatccattgaagttgaagtctgattttttctcggtctttgttttgtttcaacaacttgtcgagaatcagtaccaacataagattgctatgtttcagtgtgatggtgggggtgagttcgtctcatataaatttgttgctcatcttgcttcatgtggtattaaacaattgatttcatgtccacatactccgcagcagaacgggattgctgaaagacgacatcggtacttgactgaacttggcctttctttgatgtttcatagcaaggttcctcataagctatgggttgaagcattctttacttcaaactttttgagcaatcttctgccttcttctactttgtctgataataagagtccctatgagatgttgcatggaacaccacctgtttacacagccctgcgtgtttttgggagtgcttgctacccctaccttcgtccctatgcgaaaaacaagtttgatccaaagtctctcctctgtgtgtttttgggatataacaacaaatacaagggatatcggtgtctccatccacctacgggcaaagtctacatctgtcgacatgttttgtttgatgaaagaaaatttccctactccgacatttattcacagtttcaaacgatttcgggttctcctctgttcactgcttggcaaaaagggttttcctctaccgctttatcacgtgaaactccatctacaaacgtggaagacatcatctttccttctgcgaccgtctctagctccgtaccaaccggttgtgctcccaatatagccgaaacagctacagctcctgatgttgatgtggctgctgctcatgatatggttgttcctcctagcccgatcacatccacatcgcttcccactcagcctgaggagtccacttctgatcaaaatcactactctacagattctgaaactgctattagctcagccatgactcctcaaagcattaacgtctctttgtttgaggactctgactttcctcctctgcaatcggtgatctcgtcgactactgctgctcccgaaacttcccatcctatgataactcgagctaaatcaggtatcacgaagcccaatcctaaatatgctctgttctctgtcaagtctaattatcctgagccaaaatctgtcaaagaagctctcaaagatgaaggctggacaaacgcaatgggagaagaaatgggaactatgcacgaaactgatacatgggacttagttcccccagaaatggttgatcgtcttcttggatgcaagtgggtgtttaaaacgaaactaaattctgatggtagtttggatcgtttgaaagctcgtcttgttgcaagagggtacgagcaagaggaaggtgtggattacgttgagacatacagcccggttgtcagatctgccaccgttcgatccattcttcatgtcgctacaattaacaaatggtctttgaagcaacttgatgtgaaaaatgctttccttcatgatgagctaaaagaaactgtgtttatgacccaaccccctggttttgaagatccttctcgaccggattatgtatgtaagctcaagaaagcaatttacgacttaaaacaggctcctagagcttggttcgataaattcagctcgtatcttctgaagtatggatttatctgcagtttttctgatccatctctctttgtttatctaaaaggcagagacgttatgttcttgttactatacgtcgatgatatgattttgaccggtaataacgatgttctccttcaacaacttctgaatattctcagtaccgaatttcgaatgaaggacatgggagcattacattattttttggggattcaagctcattatcacaacgatggtctcttccttagtcaggaaaagtatacctctgatttattggttaatgcaggcatgtctgactgctcatccatgccgacacctcttcagcttgatctattacaaggtaacaacaaaccttttcctgaacccacttattttaggcgcttggcgggaaagctacaatatcttaccctcactagacccgacatccagtttgccgttaacttcgtttgtcaaaagatgcacgctcctacaatgtctgatttccatttactcaagaggatcttgcactatcttaaaggtacaatgacaatgggaattaacttatcttccaacacagattctgttcttcgttgttatagtgatagcgattgggctggctgcaaagacacaagacgatctaccggaggtttctgcacattccttggctataacataatctcgtggtctgctaaacgtcatcccactgtctccaagtcctccactgaggctgaataccgaacattgtctttcgctgcctctgaagtgtcatggattggtttcttgcttcaagaaattggacttccacaacaacaaatcccggagatgtattgtgacaacctttcagccgtatatctatctgctaatccagctcttcactctcggtccaaacattttcaggtggactattattatgttcgagaaagggtggctttaggcgctctcaccgtcaaacacattccagcttctcaacaacttgctgacatcttcactaagtctcttcctcaggcaccgttctgtgatcttcggttcaaacttggtgtcgtcttgccgcctgacacaagtttgagggggtgtatcaaacaacaagagactccttctcctacagagactttaatccatcgcaacaacattgtttctgtttcagtttcagttaaaggagattcaggcccaaaagaaaaagagaatcccacgaagcccatctgttactcatcgaaactctgcaacaatcaaagcagaggaacatcacgcgagacaccgccgtcgacaaacataaacgtgcacaatcattttgatgttcttggaagcagcagcatttcatgcaactaggacacctgtcattagctattatgtaatcctcctctttatatagttctctgcttgtaatcgaattcactaaggaagaaatacacaattattttctctctgaagctt

SEQ ID NO: 565 - DNA, 69658 bp, Arabidopsis thaliana
accgtacctcttcgtcttcagataacataaactccacttgttcttgagctgatgttttcagctcatcaacaagctcaggagagttctttagtgtatcaatggacatggcgaaatgaagagctgacaagaagacattctttgtattgagggatacatcaatgacatcgtcctgcatttttcgatgttttaactgcgaattcatcaaatcaagaaacatattttaagtagattatcaataaatcctaaatccaatcaaaagacttaaaacttttctataatcaacaactctaactacataaacaacaaaccaataagaacacaattaccaaatttgtaactgaaatttccttacgttcatcgatttcaagaaccctaattagcatttcatagctctgttttcgtcaatctaatcacattttacagagtaattaacaaaacaaacaaaacagagaaaaatacttactttttccccaaaattttcttcctttaagttaaacaacaatggaggatgataataaacaacattgctttgaatgaagagtgaagaagaaagattgaaactttagcaatccaatggggatcttcacacgctgatttggtttaactaaaccgaatcgaatttggttgataataaaacgacgtcgtataactgaaggatattacggtaatttaagtcaaggccatcgtcattgtcattgaatagatcaaaccattttactaaagaacacagttttctagattctctagagagataagagtgagagaagagaagagaagatccaaaagcgtgggaaaatcgaattagggttttctgaaaatggttgatactgttgacaaattaggttacttccaagcgattacaggtctcgaagatgctgatttgtgtactgagatccttcaagctcatggttgggacctagaactagcaatctcttcattcacatcttctgatcaagacgcttcgtcttccgccgtcgatggtggtggtaacaatcgcgatcacgatcacaataacgccaccgtgactcctgattatccacctcgcgggatcgttgacgatacagagcttgttatgcgtgatgatggaggaggaaatcgaggtccaggagttgcgtggaggattattactttaccgatttcgattgtttctggtagcttagggttagtttctggagcgatcgggttaggtatttgggccgctggtggtgttttatcgtattctcttggtatgttagggtttagatcagggagaggtggtggttcggaatcggctcggcttgtttcggtttcttctgctgttggtgaagcgatggagtttgttgctttgtttgatagagattatgggagtaataatgcttttaagattgattttgttgtggaaggatttatggatgcgcttcagcgatctaggagttcgtttaagctcttgtttgtttacttgcattctccggatcatcctgatacacctgtgttttgtggtggaacgctttgtaatgaagccgttgtagcgtttgttaatgagaattttgtttcttggggaggtagtattcgatctagtgaagggtttaagatgagtaatagcttgaaggcatcgaggttcccgttttgcgctgtggttatgcctgctgctaaccagagaattgctcttcttcagcaggtaaagatacagtcttagattcgagaggcaatttatcaactttaggtagacttggttatgaatccggtaattaaattgttagtcctcttagggaactgcattggaactgaatccattctactaccttgttgttgaagtggttagtagtaaagggggaaaggatagttgtttgattctgctttcatctgtgagccgtcatttcatacatttggtgtaaagttctgatccagcttttgtgagtttagtagtgtgttgtgtggcaggagacgtagttcttaagtttatcgttctttgttctgtttgtttgtgacaggtcgagggaccaaaatctccggaagagatgcttgccatactccagagaattgtagaagatagctcacctactttggtaactgctagggttgaggcggaggaaagaagaaccaatctgcgtctgagagaggaacaagatgctgcttaccgtgctgctcttgaagccgatcaagtatgttttctgttctttgtaggcctgttcagaattgacaagactttatgattagtctactgtctaaatttgtggcgtcatttgttctgctgattaggcaagggagcaacagagacaggaggagaaagagcgtttagagagagaagctgctgaggcagagaggaaactcaaagaagaagaagaggctcgggagagagcagcgcgtgaagctgaagagagacaagctgctagagtgcgaatgagacaagagaaagctcttgctcttggagaagaacctgagaaaggccctgatgttacacaagtaagttcgccttcttccttagccatttattacttatcttttctcacacagtttcgtagcctatgcaattgcaaagaacattaattatctttattgatattcatttatgagagatactaaacttggtgcctcttgaaagtttaggttctataattgatactctttgatcaaacgtctgaaaatttacctttcgacttgggacggtctgttttatggtagtccgtatccgtgaaccgtttatctaccctcaaacgtagatttaagtacgggttcccaaatcttagggcctctttgatgatttgattctatggttgattctcattgatcaaacgtcggaaaatttgcgttattttgacttgggtttatgagaatgtttgttaatggtctgatttattctatttctgaaccgtttggtttggcctgcaatgtaggtgttagttcggttcccgaatggagaaagaaaagggaggatgtttaagagcgaaaccaagatccagacattgtatgactacgtggattcacttggactcttagatacagaagagtacagcttaatcacaaacttcccaaggacagtgtatgggagagacaaagagtcaatgtcactgaaagacgcaggtttgcatcctcaggcaagtctcttcatcgagatcaactaaaattgctgattcttctgtttctttctcctttagcccctcgttaattttcagttttttctctatttgaaatatatagtttgttgcttcaatgatacattggacgagatattacatatataatatacgtacacatatattcagaagttgcgtcacatgtttatatgtttatttctttaaaaacatgaggtttccaatggtacttcctcacattcatacatactagatgtgtgtatttgttaaagattacaaaagcacatattaggaagaacaaacccttttcacaaactacaacaaactctgcaaaagcaagaaagagtaataagaccttagtttgtattggaattccgaaacgttttagaataagggtgaattttgaatgtagtcagttgaaaagagcttgctaataatttcaattataagagaaacctacaacccaaaatctgcacaatctctccggcgatggtcttccaatgcgacaccagtgctctgacgtattccagctcgccctttcttcgtttccggcatcgctgcttcagtctcaaagtaagaagatagataagcctgattgtttgttaggtttttattgtagaaatttaacttcgattagtcagcatataatcgtaaaccgctgaagcaatgtgtccttataccaagctctccaactgtgggagagtctgttaaatgggttaaaaggtttcatctaaacccaagatacgtgtaagcgtgagagtgaagacaaggaagctaaatcgattaaagtcttatgtgcggaaagttggaaagagacttcatcttcatgcgtagtatatatgagggacaagggtcgtcaatccacttatcgaattggttttgagttagaaccttatgaaatttaacatcttctccttctttactcaattcaatttggggagagatcacattgtagataaagaaaggaactcaagattgagttcatatctagtgtattttgggaagaccagcgagcggtaggattccaaagaactcgttaagtctactaatcgctttcttttgcatgtctgaacacaaacagtgattgagagcgaaagtgagagtcaggtttaacacactcaaacaacgtaaatgatttactgcatctattctacgccataaacaaagtcaaacatttttttttttttgaaagtcaaaacagttgtttttatttctacttttgtaacctattataatttaacccgtggtacaccacgggcaaatattttatttatatatatatatatatatatatattaatattaaattttacggttttagtttagtattaaagttatataatttatattaatgttgtaaaaaaaaattagtgatgataaaatgatcaaataaatattcaatttgtgttatatcaatccaaacccgtcctgctatatttcatatcaatccaaatccgtcccgctacatttttcgtctcatgatattttaattttttaaaaagtttaaatattagttgtggaattagttgtgattgtgattttatgccgaaaaagttatggacttttaattccgtggaatattcaaaccaagataaggaatgtgtttagatgcacatataattgggtttgctcattttacgggatcgtaaatgtattttggtttgtttcacagtgtttgttttaatttattgccgaaatttatacaaataattgaaatagttcaaattttggttgtttaagatttagtgaatattgtaggtgaaataaagagaagataatttattgtgttttacgtgacatatgtgattgccatatatttcgaatctttttggtttgttacacaattaattaccgtaaaaagattcaaaccattaattaaaaaaaaattcaaataattaaaatttagtggcaaccattgtaaataagtccaaattcaagatttatttcacaaaatggctgcaaaaatgtatatgtagatttaaattctcatcaatgactgacaacaggtgcaagtttatggataaaaattaattaatcgatctgattgttgcaaagaacgaaaatgacatagtcattataatcatgtctacaactaatgctaattataaaatggttttcttctttagttgtctctactttgagtttgatcctttaattgaattaaaaagtccatataagttgatctttgttactaatgtatagaattacaaatgatttaatgttgaataatatgtattcggtggaaacatattttaaaaacgtgaacaataacagtataggtcgatctcttttagagggaagatgctcggtctgtaatcataatacggattaggttagtcatatctagggccgtgccatcgtcaaagaatttgaaacattggcatccattttttttttaaaacttaagggcataatattttataactttgaatgttttatggtagtagaggtaagtaagcatggtcttctaaatatatttaagcaattatatatacagtaattattaattaggctaaaaagaaaggtttgtttggttaatctctggttacattatgatggttcaagttgattttagtgacaaaacttttctctctatagtttttctatcaatttttttctgcttagataaaattacttaagtttccctaatatatatatatatatactttgtttgttttttaaaaaaattacactcaactttttaattaattagagcactatttttttcgcttcctctatccgctaatgttagcacgggtctggactcatatctcctctttaaaatcaatcaggttctaatttttagaaaatataaacttacttacatgtgaactttacagatttgaaattatcattactctcatgcacgtgtagagaatagatcagatcaagtcagctgctccatagcaaaagattgaaggagctctacgggctcttaacgatggatgttattgtcgtcgctctcatttgcgaatgaaaatgacaaagtcattgaagaccaatgaaaataacatagccacgcatcacttacatctttcataatctttaatatttttaggaatctcagtatataaaaacaataagacggctgtcgatcgtggctgatttaaattaatactgtgacaacttggactcatttaaaaaatatataagttgaggaattagtagttatttttctttaattgtatcatctcttaagatcttatttccaaatttgtagaaaatctcattaagcttcctaggttagtttttttgtttggggttatatttccttgattcgttggttggttgaattgtgaatctctctttctctgtcaaatgcaagatgggtagttgtatctctctccaaatatcatgtgatcaagtgctcactcgtgcatatagttgtttttttagcctaggcaattatattcacaaactcaaggataatatagtggctcttgagaaagccattgaagatctcacagccacacgagatgatgtgttgagaagggtgcaaatggaagaaggaaaaggtctagagaggctccaacaagtccaggtatggctcaagagagtcgagattattcgaaaccaattctatgacttgttaagtgctcgtaatattgaaattcaaagattgtgtttttatagtaattgttcaacgaatttaagctcgagttatacgtacggtcaacgtgtgtttttgatgataaaggaagttgaaaatctcaattctaatggattttttgagatagtagctgctccagctccaaaacttgagatgaggcctattcaaccaaccattatgggtcgggaaacaatttttcaaagggcttggaatcgtcttatggatgatggagtcggaactatgggtctatatggtatggggggagtaggcaaaaccacccttctcacgcagattcacaatacgttacatgatacaaagaatggggttgacattgtgatttgggttgtggtgtctagtgatctacaaatccacaagattcaagaagatattggcgaaaaattaggatttataggtaaagaatggaacaagaaacaagaaagccagaaggccgttgatatactcaattgcctaagcaagaagagatttgtgttgcttttggatgacatatggaagaaagtggatttaacaaagattggaattccgagtcagacaagagaaaacaaatgcaaagtagtattcaccactcgttctctagatgtatgtgcacgcatgggggttcacgatccaatggaagttcaatgtttgtcaacaaatgacgcatgggagttgttccaagaaaaagttggacaaatatctttaggaagccatccagatattcttgaacttgccaaaaaggttgctggaaaatgtcgtggcttaccattggcactcaacgtcattggcgaaaccatggcaggcaagagggcggtgcaagaatggcatcatgcagttgatgttttaacttcatatgctgcagagttttctggcatggacgaccatatccttctgattttgaagtatagctatgacaatctaaatgacaagcatgttaggtcttgtttccaatattgcgctttatatcctgaagattattcaataaagaagtatagattgatagattattggatatgcgagggattcattgatggtaatataggcaaggaaagagctgtaaatcaaggttatgagatacttggtactcttgtccgtgcatgtttattgtccgaggaaggaaagaacaaattagaagtgaaaatgcacgatgtggttcgtgaaatggctctttggacattatctgatcttgggaagaataaagagagatgtattgttcaagctggatccgggttacgtaaagtaccaaaggttgaggattggggagctgtgagaaggttgtcactgatgaataatgggattgaagagatatctggcagtcctgagtgtcctgaactcacaactctcttcctccaggaaaataaatcactggtacatatctcgggtgaattcttccggcatatgcgaaagctagttgttttagatctatcagaaaaccaccagctcgatggattgccagagcaaatatcggagttggtcgccttgagatatctcgatttgtcacatacaaacatagaggggctgcctgcttgtctccaagatttgaaaacattaatacatttgaatttggagtgtatgaggagacttgggagtatagctggtatatcgaagttgtcgagtttaagaacactaggactaagaaattctaatattatgctagatgttatgtcagtgaaggagctgcatttattggaacatctagagattttaaccatagatattgtgtcaactatggttttggagcaaatgattgacgctggcactttgatgaattgtatgcaagaggtatctattcgttgtctcatttatgaccaagaacaagacacaaagttacgtctgccaactatggatagccttcgtagtctgaccatgtggaactgtgaaatttcagagatagagatagagaggttaacatggaacacaaatccaacaagtccatgtttcttcaacctctcccaagtcattattcatgtttgttctagtctcaaggatttgacttggctattgtttgctccgaacattacttatctcatgattgagcagttggagcagctacaagaattaattagtcacgcaaaagccaccggtgttactgaggaggagcagcaacaactgcataagattattcctttccagaaattacaaattctacacttgtctagtttacctgagctaaagagcatctattggatttctctgtcttttccatgcctaagtggaatctacgtggaaagatgtccaaagctgagaaaacttccattggattctaaaactggtaccgttggaaagaagtttgtcctacaatacaaagaaacagaatggatcgagagtgttgaatggaaggatgaagccactaaactccatttcttaccatcaaccaaactggtgtatatcctctcctagctccattctctctctgtttgatcaaaacaaataatataaataatgtattagcactaacgaaatcttttctttgtcagttgatttagctctttggttactcctaagacagcctgtaggccgtaggacaagccggtttttcaagaaccatatcagacgacacaaactgtcttacactatgaacatcaagcaaatgtaaccaactttctgttttctttcctaccactggattgtattttatatttcctctcccaccgtctcttttgttctgcaacttttctttatctttcctatttttttcaaacaagatcttccctatttattacagtcaaatctttaagtgatccaacatcaattttcttccaaaaatttaaaaatctatcccggcctgcaatttctttcactatgttaagtcttatgacaagtatctataaaacaccacgtttaaaactactgtttaagaaaatatacaaatcaagtcaactattaagacatgtaaacataattgaaagtttaaaactatcaaatcacatgtgatcccagattcttcacatggtagctaggcctaggctcaccttctaatagaagtagcaaatggaatttatcaattatgtgatctcagatcccatacatattattattataggatctcgaagataaagtaaacagagagaggtaacaaacataagaaaaaatctattagatttagttggtgaccaaatgatgttagtcaacaagtggttatcaatttgcttaacacatttttttcttgtaaactgcaaaatttgcacaaactaatttcttgaccactccggtttaagaagattggtttgagtctttgtctctctgagaaataaacaagaaaaggacatgaaaggtattcgatctgccaacgtgacattgtgagaatgggtaatataaattccaaataagattctctcttaatttggattatcctcctccatatgtaatataatttggaatctcgtgattgcttttttttttctatttgtaaggtttcatttagaaacagaaataatttgcatcccaacttagatactactaaccttatatgggcttatttggtagataggcaaaacttttacaaaaagttgtaaataaattatttgtcttacatgctttaaataaatattaaattgtatgttatcgaatagatgataaatttgttaaaaacttaaaatcgtcacaaagcccattgttataaaatttaaaatatatatttcttccaacttagggggtgttattggttccaaattataaggaattttgatgatttcaatcaaatcctagaaagtaaagaaatgaaagattttaaacgattgttagagagtattttataatcttgttgattagtttttcataatcttgtaaagtttctctaacaatctctttattttgataatacttttcatgactttccatgactttattttgtgaagaaaaatgtagaaagtcatgaaccaataacataataatttaaatcattaacaatcattaacaatcaaagattcttttgttttaattgaataacacaaaacttttaatgactttataagagtatgaatctaataaccaaaatttatgaagattttagattactttttacaaatcttaaatgaataacacaaaaatttaacatacttttaaaaaatcttgattgaataacaatagattttacataacagtttaaatcactaaaacttttttaaaatcataaacgaataacacccccttagtaaacatatatacatatgaggaaagaaagatatattaaattaagactctgcatgggtagctttaatatttgtttcaacaacgaatacaaaccaaccataagattagagatgatagaccaataacccttaaaaatatgaaatatcgttttgtccttttacccttttagttataatagaaaagacatgaaatagtgtatagctaaatttttgtaagactttgatgttaaaagaaattttatgtagacaagaaaattatcttagcaaaacgaaagtaataagtttgaaggaggatacaaatgtttataattgaatgaaaatctattgaaaacaaaactactttaatgtcaaaaattaaataagaagtaaatatacaatagacagttgttggatattattatttcaaatgggccaactcttcaagacgtgaagaagactagaagatagctttgtcagattcacatctccccaaaaaaaaaacagagcaagaagaagaagaagaagacaaccatggaagaatcagaacaagttcttcctctatgtaacaacaattctcaaacttataatattttttcttataatttcaattgtactaacaaacatttttcgaaacagtaacaaacccaaaagatctgacaaacccatcatatgcgtcatcatcttcatcttcatctgaaccaagagatgaaacagaggatcttcttttaccaatctccgacgagaatgaggaggaagaagaagagaactcaccaatccgacaagtagcactcactgttccgacaacagatgatccttcattacctgtcttaacatttcgcatgtgggtcttaggaactctctcttgcatcctcttgtcgtttctcaatcagttcttctggtatagaacagaacctctcactatctctgccatctccgctcaaatcgccgtcgtaccacttggtcgtctcatggctgctaaaatcaccgatagagtcttcttccaaggatcaaagtggcagtttacgttgaatccaggtaatccaaaataattgactttttgtttttgtttctttcaaccattaaaccgttgaaaaaatcgattttgaaccattctttattttgtataaattacgaaaaattagttttaaatattttgtttgattggtttcaggtccgtttaatgtgaaagagcatgtgttgatcactattttcgctaacgcgggagctggatctgtttacgcaatacacgttgttaccgtggtcaaagcgttttacatgaagaacataacgttctttgtgtctttcatcgttatcgttaccacccaagttggtattcttaacccttttgattttgatcgagtttatggtttctgattagtttaagtgtgaatgatgtttaggtgttaggttttggatgggctggaatatttaggaaataccttgttgaaccggcggcgatgtggtggccggcgaatcttgttcaagtctcactatttaggtaaataatacagtcaataatcactagagtgtgtttcacgttttagctcaagttttcgatattttctatatacaatacaaacaaaagtaaagggggaaataattgtgttttagccaaatgtcataaaaattgaagatgccatacaataataaatattagataaaatattccattcccaccaattttttttatttttttttatttttataaataaaataaaataatctttgaatataatatggagaccaatatttttcattgtaatatggtgggcatatactgtttttgtaaattgtaaagtaagagaaacatgaaatttttctttttcaatttgtattagctttagaatgtgatgtgtttttttttgttgaacatgtaaaataaaaaaaaatgtcatgggaccaagttttatcatatgtcttcgaaaataaacatcatgatatgtttttctgataaagacattttcgtacgtaactactagaaatatattcatttttcttatttatgtggtgtaggttatacaaatggattatattttcgtataactggcttgttgaatctaaccaaattgaacataaccacatttagaagcaagagacataaatatgtctctattctttaacaaacaaaaatcgacatataattctatctaacatattgatgttgtcgttggctaaattgtcagagctttgcacgagaaagaagaacggaccaaaggagggctgacacgtacacaattcttcgtgatagcattcgtttgcagtttcgcttattatgtctttccgggctacttatttcagatcatgacgtcgttgtcgtgggtttgttggttctttccatcatcagttatggcccaacagatcgggtctggtcttcacgggttaggtgttggggccataggacttgactggtcaaccatttcctcttacttgggtagtccactcgctagtccatggtcagtccaaactcatcccggtttactcatttcactaagttattaagtcataagagtatgaagatgggttggagatggtctaataagtcataaaagtatgggtcaagataaaccgaaattggtttataatcatacattatccggtttatgagccgaaaaaacaaaccgaataaccaaataaccgggaacggttttgggtttggttaggttcaatttagtttggtaattggtattgcaataataaaaatgctttctatgtttttttaacaggtttgctacggctaatgtgggtgtgggatttgtgctggtgatatatgtcttggtaccaatatgctattggctcgatgtgtacaaggccaagaccttccccatattttcgagctcacttttttcgagccagggttcaaagtacaacatcacatccattatagactctaatttccaccttgacctcccagcctacgagcgtcaaggccctttgtatctttgcactttcttcgccattagttacggtgttggttttgccgctttaagcgctaccatcatgcatgttgctctcttccacggaaggtataataaagctcatacataacaatgtatatcaaaataagctcttatgaactatatgtatatatgtaaggatttggatcatcaatggttttttttagctcgcttctgtaatgtcttttaatggatatgtttttagggagatatgggagcagagtaaggagagttttaaagaaaagaaattggatgtacacgcgaggctaatgcaaaggtacaaacaagttccagagtggtggttttggtgcatactcgttaccaacgttggagccacaatctttgcttgtgagtattacaatgaccaacttcaattaccatggtggggtgttctattggcatgtaccgtcgccattatctttacacttcctatcggtatcatcaccgccatcaccaatcaggtaaaaaaccatatctaaattgaatacctatataatttgtctcaaattatttggagatttagtgcaaattcatattaaaagtatgtttaatgtttttgtaggcgccaggattgaacattattacagaatatatcataggatatatctatccaggatatccagttgcaaatatgtgctttaaagtatatggatacataagcatgcaacaagccatcacgtttcttcaagactttaagcttggtcactacatgaagataccacctagaaccatgttcatggcacaggttatacaatctctattttaatgtcaactagtttatacgactctcttaatgttattattgttagttataatttgttcatgatttattggtttcagattgttggaacactcatctcatgttttgtttacctcacaacggcttggtggctaatggagaccatccccaacatatgtgattcggttactaactcggtttggacatgtccatcggataaagtcttttatgatgcatcggtgatatggggacttattggacctcgtagaatctttggagatcttggtttatacaaatccgttaattggttcttccttgtgggcgctatagcccctattcttgtatggttagcttcaaggatgtttcctagacaagagtggatcaagcttataaacatgccggttcttataagcgcgacaagctcgatgccgcccgcaacagccgtgaactacacaacatgggttcttgctggattcttatccggatttgttgtgtttaggtacaggccaaatctatggcagaggtataattatgttttgtcaggagcattggatgctggattagcatttatgggtgtgttgctttatatgtgtttgggacttgagaatgtgagtttggattggtggggaaatgagcttgatggttgtcctttggcctcttgtccaaccgcgcctggtattattgttgaaggatgcccgctttatacgtaaaacgcgtttgcgcggcgaaggcatttccaatgctaaagtttggtggttggatttggtacctatgtttgtaaagatcattttttacattcattctcatattcagtgtgtgagattgctgtgtatagtaaggatgattcattagtagggtggggtatttattcaattattcggattgattatttcagtttcttttaagtcggtcttgagtttttgaaaattcataatcaattgaaacgttttttattgcctagttcggttcaattttggttagatttcagttaggtttcaatatagtaattagtaactcgtaatgagtttatgcgtacccaatttggataactgtatatccacaacagattaactgaaagaaaaatttggttttgacttttgattggtaactttgtaccacaaccgtaaaaaatatatttacatgccaaagcgtgataaaaacacaatggtatttaagatctttcaaaagaatactacaactattaccattattagtataaacgatatatctcaacacccatatatcttataaattgtctcttcttagtaattttttttttattagtacgaagtatttataccattttcaaaattggtacaacggttacataggaaacaaagaaggttaagagaccaaaatctacaactaaaagaactactaaaacaatagaaaatacgaggaaagcacgcataaaaacaaccgccaatagtgtaaggaagaaacatcgattatgaaccgtgaagctagaacatttgcatggacaacaccaaagaaactcgagtcctcatcaaatataaacgaatataaattttaagatggttcaaaacaatactaccactttattcgtataaacgattatatatatttcaacaccaaatatatcttataacttgttgtttcttcttaattattggtaaatatgttttggttttcggtagtaataaatttttttttggtatgaatgttaagttttatactattttccatctgagaggtttttacaaagataaataagtagcagatataagacaaaaaaactacaaacgaaattaaaaaacaacaaaagacacaaaaaaaaaacaaaaaacataagcaaaaacaaacactaaagactcaaagaaaaaacaccattttcgaaccgtgaagttcatcaatttgcggggcaaggacggccttctcttctatcacattggcaccaatatagtccttgtttccttgcctatcgtcatcgcaccggcaactagaaatagtgttgagcacttgtttggaaaatgataacttactttcaatttcactaaaacaaaacttagctctgtcggtcccacattttccgtatgtatgcagtccaatcggacatcgtttttttttcgcctgacctattttcgaattaataaaaaataataattgtatataaaattttagttaaacaattgacaatatacgattaaatcaaaggccttaatatttttctaacaccatcttttcgacagaaataaatatgttttcatctcttgaataaagtattaaacctacctttaacatgattcataacgagaaatatgagaaaacagaaaactataggtgaagtagcatgtctcatgattcaattttcttaaattttttttttaataaaagggtttttatcttgcttgtgagaaaggcagttgttttttaataaatatacttaacacatactaaaaatagtttttgttaaattagaaaaagaaagagaaaacttgaaatggaaaagaattgtggcatggaaaagtcaacgagatagaaaaggtgtgtggtttttggataaattcttcttgaaaaagtttacttgtaaatttattcttagttttggtgtgtgttgtatgagtttatactttttaaaatttttggttgaatatgttaacccatataaatacaaaaatttattgcagcaaaaatatgtggttggtatgaaaacctaattgaaataaaattaaagttgagatttttttttatttgttgatttgatagatgaatctattgaatagacataaatattagtaaaatacacaatacgaacaattatgataaaaaaaacaagaacaaaatattttgaaattctggcaacatatgcgaacctaaaaaaaaggtacagaaaaattataatgagtagattttacatttacaaaaaaagtttataaatacaaaaaattatggttataaaacacaatttttggagaagtgcttttatagtccaaagaaaatttaggaaaatcccaatttttaagtttttgtttgaaaaataatttacccatttttctcttttaaaatatattttttaaaatataaaaagaatataaaattacaaaaatatctttactaaaatttactaacaatttaaaaacatttctatttaaaacaaaaattagcttctttttttgttgtcgatatcaaaaaaattggttcacggtttttttttctttttcacgaattatattgatactagataaggcccgcctaaataggcgggtgtatgatataaatttatttaaatattaacagtaatatttaaactttatatagtaaatagtaatcaacacactttttctaatatttaatgtagtaatttttgtattacataaaattttaatcatacacattcaattttacttatattttaactatctatttcatcataataaactattttgttatttataatataaaaactacattcggacactctgtgaaaacgacatcccgtttgtatcctctaacaatgtcggacttacaactgttggacaaacatcaaataaatataaaccgagcagtaattaaaacgcatagtttgctaatccatttactatgcgattagctttactatacacatgagtaactcggactatgcagtccctatacactccatcttattaatgatatttgaattttaaatagtaacgtaactctcatactttttcagtatgtaattttgtatttttttaaaccaaatttcaatcttacaaattcgattttgcaatacaatttaaatacctattttatcataataaaatatataatttaatgatatacactccatcttattgttagtttttttatataatttaattatatacactccatcttattgttagttttacattttagataagaaaattgtaagttaaatatttagatataaatatattaattagtatatataaatatcttttttttttagtttcctattttcttttaggaaaaagtaaaaaaaaatcaaaaacatgtcaaaatctaagatcgttcaaataaccacgtgtcatgatctcgtgagttagtaactttcaaaactgtactttatataataagatttgaatttcaaatagtaacgtaactctcatactttttcagtatgtaatttagtatttctttaaaccaaatttcaatcttacaaattcgattttgcaatacaatttaaatacctattttaccataataaaatatataatttaatgatatacactccatcttgttgttagttttttatataatttaattatatacactccatcttattgttagttttacattttagttaagaaaattgtaagttaaatatttagatataaacatattaattagtatatataaatatctttgttttttagtttcctattttcttttaggaaaaagtaaaaaaaaaatcaaacatatgtcaaaatctaagatcgtttaaataaccacgtgtcatgatctcgtgagttagtaactttcaaaactgtactttatataataagattagattggaaacgttacaatacacatgagaaaataaaagtttaaacttcaagaagacaccatgctcgacccataacctacgacaagataaggaaggaattttccgataatacattgtaaaaaccaaacaaatcttgtctcgagactaaacgaagctctcgaagctcaccataaagacttcccgcacaacaaattatgaagaggggcttcttcataacttatggcaataacaagatagtggaacttggccttctcaataaatgcttctttttcaatgagtgcctttgtcaagggtcttccggatgaaccgtaagataatcgagaaccacttagacgttttaacgccacaacgatcaataaattaagcaaaccatcatctgctacacgatgagagaaaactcaaatataatcaaagtgctcaaccccaaactaacaaagattaacttagtcgggaagagaagattagcccaaacaagggagacggaagtccaaacgagggagacaattaaacctaatcctctgatgttaccatatctcacagagacgaactgatcagagcaacaagtcgacacaaaagaggaatacatgagagacattggagataccgagatatcgaggaggcgatccaatgttgcacagatgcagctttgggagaaaagaaacgagccgtcaagagagaagcaaaagcctccaaagtccgtcaagactcagcgaagagaaccacccgacaaagacgacgttgtgactccactctgtgaccaccgaacaagaacgatgacccaagaacacccttgaccaacagatcctatagatctgagtaccaagacccaacctcattaaatctgccccacaacacccactattccaaaatgtagagcctcgatgcttccacaaacaaagaatacaaagacaagaaatgaaaaactatgcagagaaacaaagaaggtgactgacgctggtgctatttgagcctccacgcgctggtcactttgtgttaaagcaggaagacgagagaaaaaaatattattttaggtcaaccttgtcgatttttgcgatacttagagcttcgatttttagggttaacggttcacctctgctatattttttttatcagaattcaactccaacaaactaaatcactttccgtgataaagaaaagaaaagtgcaaaaatttggattttgttgatccaaaataaaatacaaagaactgaaatcttaaaatcatatactaaactagttgttatttgtaaatttcttataaccctttcttacatttttaaattaccctacatataactttttcttacatttttaaaatatcctacaattatctaactaaacacccaaaaatatttttaccgttttatgttatcaacttatcatcgtgtccgacaaaaaaaaaaaaacttatcatcgtgctcctttacatttttcgtgacctaaaactgctacgacatcgttttagtgacttacttgctaaaaccctttttaactttctttcaagctaaagacctgcacaaactctctctcgaattcttttgtttcgaagccatggaaactgaatctgatgacgccaccattaccgtcgtcaaagacatgagagttcgattagagaatcgaattcgaacccaacacgacgctcacttagatctcctttcctcactccaatccattgttcccgatatagtcccatctctcgatctctcactcaaactcatctcttctttcacgaatcgacctttcgtagctacaccaccattaccagaacccaaagttgagaagaagcatcatccgattgttaaattaggaacccaactgcaacaattacatgggcatgattcaaaatcgatgcttgttgattcgaatcagagagatgctgaagctgatgggtctagtgggagtcctatggcgcttgttagagctatggttgctgagtgtttgcttcaacgtgtaccgttttctcctacggattcttctactgtgcttaggaagcttgagaatgaccagaatgctagaccggcggagaaggcggcgttacgagatttaggcggtgaatgtggaccgattcttgcggtggagaccgcacttaaatcgatggcggaagagaatggttctgtggaattggaagagtttgaggttagtgggaagcctaggatcatggttttagctatagatagaactagattgcttaaagagttaccagagagtttccaagggaataacgaatcgaatcgggttgtcgaaacgcctaattcaattgagaatgctactgtttctggtggcgggtttggtgtttccgggtcgggtaatttcccgagacctgagatgtggggaggtgatcctaatatggggtttaggccaatgatgaatgcaccaagaggaatgcaaatgatgggaatgcatcatccaatggggataatgggtagaccaccaccatttcctttgcctttgccgttgcctgtaccgtcgaatcagaagcttagaagtgaggaagaggatttgaaagatgttgaggctcttttgagtaagaagtcttttaaggagaagcaacagtctaggacaggtgaggagttgcttgatctgattcaccgtccaaccgctaaagaagccgctactgctgctaaggtgaactcagttaactatagtctttagttaaatacatgcttttttaatacaaaactatatgtgaatgtaaatgtgagtatataagctttcaaaaggaattgaggaggaaaacacatagtgtagttcacagcagactagataagttgttgatccaaagctgtgttaatttggcgtagatagcggattagatagtgtatgattcgtgaacaagttctggagaaagctattagccatcttagtagttagtatccatagtagtttgttatcaagattataggggagcagatactatgccattttgtgaaaagcagtagggtgaaaagcaaagagctatataacttagatgtgtgtttcttcggtttggatgctgatagtgatgctcctatgtggccatatgttctgaaagcaaggagccttctattgaaaataatcaccttacggatctagatgcttaatgtttataagcgtgtttaactagttatcacaacacttgtgtgttttgtctctcagtgtggggtggggttgaaagtttttgatacatagtttctactttctagtttcaatatcgatgtagcgaaagcaaagatctctttccacaaaacttgtgtgtttgttgtgactttctctcttggtatcttgtgagacctgtcactgtttctagcctcaactcttctaggtgttatgttttgttagttttcatttcatcttctaataaacagcttggatcttgtgattgactgttatatttttatgttccttacagtttaaaagcaaaggaggatcacaggttaagtattactgtaggtatttaactaaagaggattgccgtcttcagtctggttctcacatagcctgcaacaaggtttgaaccaactcaaatttacaatgtacatcttatttgataggaaattcagaatgttatattgttaagaattccatagcgaacaaattaggattggtttgcatgtcaagttttttgtttgttattttgtgaggtttatattgatctcctgctatggtgtctatgttgctttgctgaaatctacttagtttttatgaattctgtatactttcagagacatttccgtcgactaatcgcttcacatactgacgttagcctaggagattgttcctttctcgatacttgtcgtcacatgaaggtaacttttttttggtcacaattgtgtgatagtacttcggttaagtgtagatatatggtaacagagcaaccattattttgaatttggacagacttgcaaatacgtgcattacgagctcgacatggctgacgctatgatggctggtccagataaggcattgaagcctctacgtgctgattactgttctgaagctgaacttggtgaggcacaatggattaactgtgacatccgttcttttcgaatggacattttgggaacctttggagttgttatggcggatccaccatgggacattcacatggaacttccatatggaacaatggctgatgacgaaatgcgaactcttaatgttccctcgttacagactgacggtttgattttcctctgggtcactggtcgtgctatggaactaggccgtgaatggtacttagaaaaatctcaacaaattttgtgttcatgtgcttttccactctaatggagttttttttttttttttaagtttggagctttggggatacaagcgagtggaagagatcatatgggtaaagacaaatcaacttcaacgtattattcgaacaggaagaacaggtcactggctcaaccatagcaaagagcattgtctggttggaatcaaaggaaatccagaagtgaacagaaacatcgacacagatgtgattgtcgcagaggttagagaaacaagccggaagccagacgaggtttgtccataattacccacatttttccaaatcgtttcgaattagtatgattctggactcttgtgtgatgagaatgcttgtcaaccaccagatgtatgcaatgttagagaggatcatgccaagagcaagaaagctcgagttattcgcccgtatgcacaatgctcatgccgggtaaagtttttgaccttttaactgtcatatgatattgttgtcatgaatcttatgagtctactgttggttatagatggctatcacttgggaaccagcttaacggtgtccgattaataaacgaaggtcttcgagctcggtttaaagcatcataccctgaaatagatgtccagccaccatcaccaccaagagcctctgcaatggaaacagacaacgaaccaatggctattgactcaatcacagcttagttcaattccaaaaaaaacaaagccaaatgtctcagctttgttggattcatgttgctttcgtttttgaaacatttgtggcatcatgattttgtaaatctttatggaaagttaaaaggaaacaacattaacgaaatttgaaattttgcttattcgctccagtacttctcatcatcaacatctttatcatgttccgacgaatcctcactgtccgattcattgaccaaacccatcttgaatctcctcacatcttcaacagcagcattcctaaacaatccaacatcaacagctccggcgaccatatggtaaccacgtccccgaatctcaccagctccgtcgtgcggcatcgcgaaacccgacaagtaagccccgcctttcgccggatcagtggtcagcacagatttctcagccttcttcatcatctctctcactttcttatgtccaggatcccacaaataccctaaactcgcactaagatccaacggtcccatttgcacacagtcaacaccatcaacggctgcgatttcatcagctttcttcactccttcacctgattccacctggcacataatcagaatctcctctgcgtaattacttaaatacccttcatcgattccgtagttagaagctctcaccaccgtgtgcgccgatccacggataccgtcgggaggaaaccggcaatacgacaccgctttggtagcgtctttacgagattcgatcattgggaacatgattccttgtggacctagatctagagcttttttagcccaggttggtgagttttccggtaatcggagaatggctgatgttccggcggcgttaagagctcgaatacaatccaaagcttccggtatacctccgggaccatgttccatatcaacgacgacgtaatcgtaaccggcgtgagcagcgatctcggctaatgtcggcgagaaggagagtaaaaagagaccgtagagagtttctcctccacggagacgagatttcaaggaggttttggatcgattcgtgatcgcttccacggcggtggcgggtgagtgatcggcgggagatgaagagtatcgaattggagttagggttttgcgggaaaatgaaacggaggatttgattgagctgaactttgaaggagataatgattttccgattatcagagaagatggattaagaagagatgtcacatctctggtgacggtcacggcggcggggaagattgaagcggtggccattgcggtgaacttgggaagtatcgaagaagtggtaaaagacaaagtgtttttgctttcgtatgaccaaaacgaaattagtactcacttattagcgttttcgggatagaaacgtagactgcatgctgttttttcttaggaaacgagaaaatatcatttagggcttttacaaaaagcccgactagattctgaagccttttaattagcccaacttaatttagggtttctacttttctttcttgttctacaacctttatgagtcgcaaaaggtttctgaacatcccttgtatcaaaaacacaatgaggacgacaatgtcaaatcttccaaaggaactagtagaggacattgtctctagggttcctttacattgtttgagagcaatgcgattaacttgcaaaaactggaatgctttgttagaaagccagagctttaagaagatgcacatacggaaagaagaagaagcagcaagggaattaggagagaatcgaatgattgtgatgatggattacaacgtttatttaatgggcatcatcgtcaacgaaaacctatccataaagtctctaggtaaacttacttgcctacatggttctaaacaagtcaagatatctcaagtctttcattgtgagggtttattattatgcatcttaaaagacgatgatactaagattgtggttttgaatccgtatttggggcaaacaaggtggatccaaaccagaaagtatcaccgtacaagtgaatgggaaggacgagatgtttataactatgctctccgatacgaaactaacagtggaaaccgtagccccaaaatcttgaggtttatagatgatttccatcaccaccccgaaaaccccgctttacgatatgaaacctacgattttgatactgatttatggactactcttgatgtctctccacactggcggataatatctcgctgtggtggtgtttctcttaatggaaacacttattggggcgctgtagaacgaaacgcatctgcatatattggtcatatgatctgctttgattttacaagaggaggatttggaccgcttatacctctgccgtttaaggctaggggtttagtttttgcgccactatcttcggatagagcagagaagatcgcggctttatttcggacaagcaaaaaggttgtgatatggattacgactaagattgatgccacaaatgtaacttggagcaatttcttcacaatatatatatcgaaccttgagcgaaatctttcatgtaagagtttcttcacaatatatatatcgaaccttgagcgaaatctttcatgtaagagtttcttcattgacatggagaagaaagttgctatggtttttgataaagaaaaaggaaaaaaagtcgctcacaacattattaatatcattggagaggctggatgcgtgaggaaattggttcttaaagaatctggagacaaaagctgttggccacttgtgtgctcttatgttccaagtacagtgcaaatcaagcaacataatagaggcaaaaggcaaaaaaaagtgattaggaaaggcatcgacattgatatgagacatgataaacgtatcaaggttgattagtctcaatttacaaagtctatatagtttatatgtttttcacttacccgtttaacttttttcttcccatctattgttctatatggacaaaattttcatgttttaattttttaagttttacaaaaccgctgtgtgatctattaaatgactagttttgtcgtctgaaatatcacatccgtctccggcggtgtggttgatgcaagttgcaagtatagaagaatatgtgtacttgtctcttactctgcacttgatgagattgtgttgcggcttctgactacatgtatgtggtttattccttacattgtttcatgatttgaaagtaggttatggatgtgttatggtttgtacggctacactttcagacatacacaaaatattacgaattgatctcatggcacatcactccgtcttcgagtcacctctatgtgtatctagtagctttctcgttatgattgtttttcttcttggatcagttttggttgctcaatttaaccttttttctagagaacattcaactaggaatctcactatcataaaatcattaaaggttttgttagttgtagtatgttatggatattcacttgcctgtagagaacaaacattcaagttgcaaattgtgtatatgctttacttttgaaacttgcatgaaacttttgtcatggcgtgtcagtacatagagttgagtaatcatggctttgctatatttgccctgatctacgttgaagtttccatatagtatctttttttcctagtcaaaagttggtttttcactaataaaaatttatgcagatagagagaaaccaaactgcactaaacgagcttaaccatgcattagaagatagagatatatactcgatttggtatgttaaggaagcaaccaactttgaacccatatccatttttctaataaactacgtacatgagaatcctcgtagcaacatttatagaagagatacccaaaccatgtgtaacataattaattaaagtctaaagacagcattggaagagattacacacatgagtatccaaaacgaacaagctgtcactatccaaaacaaacttcaagtgagaaaagtaataaaacatgaactaaaagatagtttaagagattgttaaagcattttcttgcagagttaggttttctcctgatcccacattgtaattaatgatgttgtacatgtcctctaaaaatctgtttgctggcattcgaatctttgcagctatcttttcctacaaacaattgcctagttttctgataatgacggcagtgtgatcttaatgacacaatggacgccgtcacatttctagagtgctattagctagggaatggttattaactttctcaaactttgatcaaggaactatgttttgccttttcttttgatgtaagttgaaatgatacatattttctcacatatgggctaccaaatcttttcttatagttgtcgaacgtaactaaacatatgctgacacagttgtataaataattttacgattcacgtttctgaaaatgttagttagtattagcctatgataattaactatacttcgctttatgtaaatcaaaggccaacttttttgaatatctatatgtaagaataaattacagctattaataaatacgagatgtaacttaattcagaaatgttcacacacatatggaacaagaagatttatccctgaaatagtattcacagtttggatcttatacctttttatgtaaaagaaaagattcaaacaaaaatctttcttatacaaataagattcaatcaaacatatattcctggaagttttgaacataaaaaaatgatttacaaaaaaattctcctaatttattaaaactgaatatttaataacataaaatctcttataatttatgtatatacaaaacaaattccatgatattcatagaatctcataaggttagattcttattataaaaagtagacaatctctaataatttatgtgtcgtgatattaattagaaatctctaataactcaaataggatattaatctaaattcgttgacaaaaatagatagagaatcattgttattcaacgcccaaaaccaaagtcattagtcaatgtcactcgtgaaactatccaaagataagagtttatgggattcgctaatctattacattaaagccacgtgtcttaatcttagatgttcaatagacttgccacgtcacacattgtctctctcgtttctcaaatcgcgtttcttctggtggaggtcaaactttttgattagcaaataaaagtcacacaagccgaatccaaaaatgtaacaagaaaaacaaatcttcacaaggcaaaaaatccaaaattgagttttttttttcttcattttttacaatggtgtctcggtttcgtcttgctctagagtacttctaagtctctctgttcttacttcgatttcgatttttattctcttttttttttttttttgaagacggatttggttggtggtttttagggctgttttgggttcgagacgacgtaagaagatggcgagtactagtagtggtggtggtggtggtggtgataagaagaagaagaaaggtttctctgtaaaccctaaagattataaacttatggaagaagttggatatggtgctagtgctgttgttcatcgtgctatttatcttcctactaatgaagttgttgctatcaagtctttggatctcgatcgctgcaatagtaatctggtttgttctaaatttgatctcttttagcttcagcatcgaatttgagtatgtgtattttgagttggggatttttgattttgggatacaaaattgagatcatgtgtagcttcactaaaaatcgaaactttgcttcgttgttgcaataaagctatcatcttttttgatgggcgatgaccaaattgtgttatcatcttctcattttgcgtttgcgtttctgttagcttcactaaaaatcgaaactttgcttcgttgtagcattaaagctatcatcttttttgatgggcttatgaccaaaattgtgttattatcttcccatttgcgtttgcgtttgtgttagcttcactaaaaatcgaaactttgcttcgttgtagcaataaagctgttatcttttttgatgggttatgaccaaattgtgttatcatcttcccattttgcgttagtgtttgtgttaacttcactaaagaatcgaaagtttgcttcgttgtagcaataaagctattatcttttttgatgggttgtgaccaaattgtgttatcatcttcccattttgcgtttgcggttgtgtttgtgttagcttcactaaagatcgaaactttgcttcgttgtagcaaaaaagctgttatcttttttgatgggttgtgaccaaattgttaccaccttcacattttgtgtttaggtttggttggtttaatcatttaagatcaaatgggattatgggagagttattagatctctctcttctttccctttttgtatttgtttcttgttcttgtgttttcgtttctgcgaatttaatgcattgttttggttattttaggatgatataaggagggaggctcagactatgactttgatagaccatccgaatgttataaagtcgttttgttcgtttgctgttgatcatcatctatgggtcgttatgccatttatggctcagggttcgtgtttgcatctaatgaaagcagcgtatccagatggatttgaagaggcggctatatgttctatgctgaaagaaacacttaaagctcttgattatcttcatagacaagggcatatccatcgagatgttaaggtcagcttcacactgtactttgatagatcatccatgatccatgactatattcaaaacttttttgtgtgtcttatatattaggctggaaacatacttcttgatgacactggcgagattaagttaggtgattttggtgtctctgcatgtttgtttgacaatggcgataggcaacgtgcaagaaatacatttgttggtactccatgctggttggttactgtagttttctcgtttcggtcttcttaagcttcacagtttctctctactcgatggttgacatgtcatatcttgtttctttttgtaggatggcaccggaagtcttgcagccagggagtggatacaattcaaagtgagtttatgctttaatatcaagtgccaactaatatactcaacttctctgcatggtccttgttaaatatagcggtttgttcaatttggtatatgtcatccaacttctcaaaatcgaaagccgttgattttagttgatctagatagtgtgtgattgtttcagccccgcagctgtttaaaagttactatcatttgagtatttttatgtcaaatgaaatgaaaaatctttagaaactgtttgcatcaaagaaatgcaataacagttattggttggtttgttcttctgtaccttccttacagggctgatatatggtcttttggaataacggcgctggagttggctcacggtcatgcacctttctcaaaatatccccctatgaaggtattcattattttccttatatgtattaagaacagatcttattccttttttcctggtaacaggtactcttaatgactatccaaaatgcaccacctggccttgattatgaccgtgataagaagttttcaaaggtacgcgtgttcttcctaggtatattcttattttatttgaatactttccatttcgaggattgttctaactagaagatgtccagctgcgctcagtcctttaaagaattggtagcattgtgtctggtgaaagatcaaacaaaaaggccaactgctgaaaaattgttgaaacactcatttttcaagaatgtgaagcctccagagatctgtgtaaaaaaattatttgtcgatttaccacctctttggactcgcgtaaaagctcttcaggtttgccatgcttatatcttcgtcgagcttgcagtacttgtcctgttctactctaattgatagagtcgttgtataacaggccaaggatgctgcacagcttgctttgaaaggaatggcctctgctgaccaggatgctatatcacaggtgacgaacgcacaagtttgagtatattacttaagactcaaattgcagaatgcttatataaaaagttgtttttcatgtcagagtgaataccaaagaggagtaagtgcttggaacttcaatatcgaagatttgaaagaacaagcatctttggtaagctatgctttgatagtatctcttaaatgatgccatttaagaaaccattggttttcgtcaaatattcttatagtttctttttttgtgtgcaatagctagatgatgatgacattctaacagagagtagggaagaagaagaatcttttggcgaacagttgcataataaggctagtaattcgcaaagaaatattcagcgaaatcatcttatatctcttcactctcttggtatctggttgtttgaacttattgggaaacacattgcaggtgaatgacagagggcaagtatctggtagtcaattgctatctgaaaacatgaatggaaaggaaaaagcttcagatactgaggtggtagaacctatctgtgaagagaaatccactctcaattcaaccacttcttctgtggaacaaccggcatcaagttcagaacaagacgttccacaggccaagggtaagccagtgagactccagactcatagtggaccactttcatccggtgtcgtgttaatcaattcagactcagagaaggttcatggttatgaaaggttaggtcctggctattattagttaattgttgtttgagagatcatttgattacagtattctgcttctcctttctttcgcaactttcaaatgctccaacatgaaatttgatatctgctaggtctgagagtgaacggcaactgaaatcatcagtccggagggcacccagctttagtggtcctttgaatcttccaaatcgtgcttcagcaaacagtctttcagctcctatcaaatcttctggaggtgaggaaatacattatcgatcttcatgcagcttagtaatttcagttgcttctagtgcggttgacttagcgtggttgtctatcttgtacaggatttcgtgattctatagatgacaagtcgaaggctaatgtggttcaaatcaaaggaagattttcagtaacatcagaaaacttggatcttgcaagggtatgtatatctttttctgctattcacattcgtctttatatggaagttaataactagaccaacctaacctaggatattctacttagtcctttgtcgatcttcgcgagtttgttttagtctttctgttctagtgtagtgatgatttttgtctcctgggttttacctgattaattcatactctttaaactacaggcatcccctttgagaaaatctgccagtgttgggaattggatacttgattctaaaatggtaagtttgctactacaaagacttccaggaatttatgttttcttaccataacaatcttattttcccgcaacagccaacgggccaggccatcaaggagtcaagtagtcatctctcattcattatacctcagcttcaaaatctgttccagcaaaattcaatgcagcaggtgagaaaagaagtataagaacattatcacactgagacttgagtttaactcgattgtattcattcctcaagttttgtattgtcttaacggaactctccaacttcaggatcttattatgaatctagtgaataccttacaacaagctgctgaaacaacagatggtaagatagacacttctatccactttgtctgttatagcgataaaatattggcgacagttgatcaattttctgatccttgttataggttctcaaaatggaaagttgccgcctttgcctcgaggatctgacagcaatggaaccgtaagtagatttatttaacctactattcattctcaaaataatgtcactcacatttttggtctttgtcttgggattacaggttgtagaacttacagcagctgagcgagagaggttactacttaccaagataaccgagcttcgagctaggttgttcctcttcttcaatcaatcacacctttcttataggagatcaatgtggtatagtctatctaattgcttctgaaattcaatttctttaggatgaaagagttgacggaagaacttgaagtagaaaaatcaaaacagacccaagtaagtgaattcacttgatctcatgaacaactcatgaaacaaatttgctagttgttgaaactgaactcacattgagtaaaatctgatttctgaaccataatcatccatctcttgtgtttatctacagctgcagcagaaattgaaatcagtcaccggtcgcgagcaattgtaatcagagaccgggaacactgaccttactacagagaagctttttaggaggagagaaaagtatgttttgtacactaagaaaaccagagagctctctgatcatgaaagcaaaaaggacaggtttggttctgttctgtataagtgcagaagcagagtcaccatcggccatttgtttctgacagaagaagccggaaacaaaaacagatagagagagataaatagagaagaaagctctttggccatggaaaattgtatttgtttatttaatctaaacactacaaaactttacattttttattattgttagcaacaaatatagactcttccttttttgtgtggattgtaaatgaaacattatttgatgtatttgtttgcctctttgttataaaggttagatttcttcagaaacttattacatggaaacaatcttattttcacttatgatcctttagctaaatccagagttgtcaagccttcaagaatcaactcactactagttccaggtaccttcttcttagaccgcttccaccgcaagaaaaacacaaccatgtaagcgaaaacaacgattataaccgagcctgcattagtagagacgtaccacactgtatctggagatataaccgacatcgaaaccaagtaagaaacatacaatggcactgctatccaaagaaaccaccatacatagccttcaccagctggtaacaaacaaaacgccatgaaaatcgctccaacgaaagccatagtattcacacctcgaagaacaaagaaatatttatgactcatcacaacagtaccaacactctttttactttcttctgctgcattttcttgatatacacctcctggtggctgcaaagctgtttgataagtagctgtgattatcagcgcggctatcactagaagcgcgctgcgtgttccttcagaagtctggttcctataccgggctgtttgcgtgaacaaatgctcggtgaaactaatcggagatctcaagatttccgacactttcttggattttggtagagagtttccactcttacctccccattttcggattatgttttcgatattactgtttgcgtgatgatctctctggttatgtaagatatctagggcggttaaacctgtccggttatgaatgttccggtttactgcagaacattttaccaatatctttactgctttgaatctgttctgatatgctgctatgtgtaaggctgtgttaccgtcttgatcacgtttgttcaaaaactgcatctctaacgattcagcgtctgtttgacgaagtctttgtacccatcccaagagtacttcaagctcttcgtatctatcgtttgaaaccgcgatgtgtagagcggtttcaccgttcacgtttgcatctttaatgcaaccaggacaagctaagaggaactctgtcataagatcagtttctcctcttcttactacttgatgaaacggcgtcataccttgtattcgaaatcaaactatttcaaccatttatagtaataacaaaagatcaaacaatttcaagaaaacaatacacaacttggttggtctaataaactagctatatgatgtcatagtagtagaaaatgaaaaatatattaccttctcttcctcgaaggcgaacaaggtcagaatcaaccttgagtaaacttagaaccaaccgtgtttgaccttcctctatagcaagatgcaatggacttaacccgtatgtgttaagttttctcgcgaaagacggcttaagattcatcagctccatggcaaaagaaaggttaccagaagcagaagctatatggagaggagtgttgatgaaaggtattgcatcaatgatttcaagaatgtatggattctcatggatatgagcatacaattcatcgatgcttccgatttgagtagctacgatcaatcttggatccattatatcaagaacaagaagaaacaagtctttgtttttcttcaagaaataaaaactttacatttacttatagaatataatgtcatcgtttgaacaagtatttgatgttgacttgaccaatcatttgtttaagccaatagaagacaaacactagatgaactcagagaaagagactacaaaaaaaaagtcttctctagggatactacaaatttaagtagaacttgatacattaatttaagagaatataaatcctaccaacccaacacattgtgaaaatcagaattcacaacatgagagtaatcatatcactaaaacgtcgtcgtttgatcatatcaaaataatcagcaaagatataaatgataagaaagtcgagaattcgacatgttccaatacgacacaagcaaagtcattggcatgctggagccattggagtagtcgccggtataatgacaacaagagaaaatgatgaaagctcccataatttctgatgctttgccaaagagaacaaggtaaataaagattccaaaaaccatgtacgtagctagctttgagagcttattgtttctctactaacgtgtaacattctttgaacattgtagagcattggagatctaagtttgagcaagatattggctggaaagacaaggaaattagctgctcgaatgttttcgacattggtaattgttcctcaatagggattgttcctttatttttctatctctgcattgcctcttagctgaaatgtgttgttttttgaattacaggtattgaaacaggatcaaccatatggcgatatcgctctgaaacagtgttaggcattaagcgtacattgatctagcttcaaacaattctaaaccgcatataagataaatcattatatactaattttttttttggtaagagtatatacttagatatatagtataaaacaaacataaaatgtaatgattcatcatttatttaataacatagcattttttctttttttgagaaatcacttcccaattaagtgattttgcaaataaaaaaagtgataatcatttacttcattaactttataatatggttatgtacctcatcattatatactgtaaactacatttacaaagataattttgtagttatagccaaaggtcaaaagttgaaaactctctctctcaaatcttaaaactaaagcacaaatttgagatcacatatccatgcatgtataatgtattgtcacactaaaaatcggtttaatttctcttgagttttaaaccaatcgagttgtaaacaagtttcggtctaatttcgagataaacttggtttggtcttctggttcaattagctcggttgctgtttattttttatcattcatatataacaaaatcgacaacgatatagtaaatgggccaccggcaaaacaaaaatatagtacatgggcctttattagtcactatgttaagcccaatacaaatcggtgtttaacagtaagcgaagcccaccatcatcagaataaaagtatgttccactctcaggaaatgccttggtagaaaaaccattctttggtaactttcgcttactctctccccattctctctcgaagagagcctcgccggagtttgtttttcttcttgtttcgcggccaaaaccgcctttgtgtaaagctaccttgttattttcctccgttaaccatctgggtaaactcttcgcttgatttttctgttcttccccctttttcgatttctcactgtttttaatctacgattcaacttgtttaaatctcgttttcgtgttcttcgatttgattcttcgtttaaaatcatgttcttaactcgatccattttgatttcgctgcgttagacaagtaattgatttttgttttttcttgttcttccatttctagggtttcgccgtgcgaagcttccgttcgcgtctttgctttaattttgagattttattgattctatttcgaagtggttttttttttccttaccctaatttttctttctgggtctgaaatttggtgtaatttactgcaaattttgacctattttgaaggctatgaaaccctagatttcaatttggattcgttaagtttatatctctcgacattgtttcacgtttttgatatatatagagtctaatgttttgcgatattagttctcattttcacgtttttgttgccaatacctatatgtatatgattatgtcctgcgcatttggagattgacgttgtttaaaaactgttgaactttatttggcattcacgagataaggttttgttggtcttttcaatttttgataaaaagattagtcttttgtttttttcctgattagtgaaagctttaggcttgtgaatctctctctgtctcgtttatgtaaaactttcttgtttctgagtattattttactttttcttcgcagtataggttgctgctggactctttagatggcagactctcggaatggtaatgcccgagcccctcctagtggagtgcctccaaaagctgggaatacttattccatagatgttaaaaactttatctcacgtgcaagagcattgtatgaacactggaagaagcacagtgcagacttatggggatctgccgacgctcttgccattgctacccctcctgcttctgatgatctgcgttacctgaaatcttcagcgttgaatatttggcttcttgggtatgagtttccagatacaattatggtttttaccaagaagcagatccatttcctgtgtagtaggaacaaggcttctctacttgaagttgtgaaaaaacctgcacatgatgagttgaagcttgatgttatcatgcatgttaagcctaagggtgatgatggaacagggctgatggatgccatatttcgtgccatccgtgatctatcccggggtgatggaaatgattcacaagttgttggacacattgctcgtgaagcccctgaaggtaagcttctggagacatggactgagaggctaaagaatgcaaacttccagttcgtagatataactggggggctgtctgatctatttgctgttaaagacgatactgaggtcatgagtgtgaagaaagctgcgtatctagcctacagtgtgatgaaaaatgttgttgttccaaatcttgagagtgccattgatgaggagaaagacgtcacccactctgccctgatggatctcactgagaaagcgatacttgagccaactaaggccagtgtgaaactgaagccagagaatgttgacatatgctaccctccgatatttcaaagcggaggcaagtttgatctcaaaccaagtgctgcaagcaatgatgaactgctcacttatgatccagcgagtatcataatatgtgctgttggtgctaggtataatagttattgctcaaatgttgccaggacctacctaatagatgcaacttctctccagagcaaggcatatgaggttcttctcaaggcacatgaggctgctattgatgctttgaggtcaggaagaaagataaacactgtctatcaagctgccctttctgttgttgaaaagaatgcccctgagttcgttgacaagctaactaaatctgctgggactggtatcggtctggaattccgagagtcaggattaaatataaatgcaaagaatgataaagtattgagaccgaagatggcatttaatgtgtctcttggtttccagaacttggaatgtgagtcagaaagccgcagcaagaacaagaaattctcacttttgctagctgacacagttctcgtcacagatcagaaaccggagcttttaaccaagtgctctaaatctgttaaggatgtggcttactcctttaaagaggatgaagaagaagagaaaccgcgcaagaaagctaggaccagtggttctgagaactacattaccaagacagctcttagatcagatgatcatgtggtgtctaaagaagagctacggaagcagcaccaggcagagctggcacgccagaaaaatgaagaaactgccagaaggcttgctggtgacagttctggggcgggagacagccggtctactgcaaagacttcagctgatgtggttgcctacaagaatgttaacgacatgccccataaggaattgatgatccaggttgatacgagaaacgaggctgtattgttacccatctatgggagcttggttccattccatgtggctacaataagaacagtgtcaggcaatcaagataccaaccgaaactgctacatccgtatcattttcaatgtcccgggtacacccttcaaccctcatgactcaaactctttgaaaaaccagggtgctatctacctcaaggaggtttcattccggaccaaggattcaaggcatagcagcgaagtaactcaacagattaagacccttagacggcaagtcatggccagggagtcagagagagctgaaagggcgacattggtgacccaagagaaacttcagcttgcagggaacaagttcaaacccctcaggttgtccgagctgtggatccgtccgccttttagtgggcgcaagaagattcctgggacactcgaagctcatgcaaatggtttcaggtattcaactaccaggcctgacgagcgcgtggatgtcctgtttgcaaacataaagcatgcgtttttccagcctgctgagaaggagatgatcaccctccttcattttcatttgcacaaccacatcatggtaggaactaagaagacaaaggacgttcaattctatgtggaggtaatggatgttgtgcagtctttaggtggtgggaggagatcagcctatgatccagatgagattgacgaagaacagagggagcgcgataggaagaacaagatcaacatggatttcaatcattttgcaaaccgggtgaatgatatgtggcaactaccacagtttgcaagtctggaccttgagtttgatcaacctctgagagagcttggtttccatggtgttccgcacaagacatctgcattcataataccgacctccagctgcttagttgagctgatagaatacccgttcctcgtggtgagtctgagtgagattgagattgtgaatcttgagagagttgggtttgggcagaagaactttgacatggccatcatcttcaaggacttcaaaaaagatgttctcagggttgactcagttcccacaagctccctagaggggataaaggagtggctagacaccacagatataaagtactacgagagcaaactgaatctgaactggagacagatcctaaagacgatcacagatgatccgcagagctttatagatgatggaggatgggagtttctgaacctggacggaagcgattcagaatctggcgggtctgaggagtcagacaaaggatatgaaccatcagatgtagaggttgagtctgagtcagaggacgaggcttcagagagtgagtcactggtggagtcagacgatgatgaagaagaggactcagagcaagagtcagaggaagagaaaggtaagacttgggatgaactggagagagaagctactaatgcagacagagagcatggagttgagtctgatagcgaggaagagaggaagagaagaaagatgaaagcgtttgggaaatcgcgacctggaactagcggtggaggtggtagtagcagcatgaagaacatgccaccatctaaacgcaagcacaggtgaagaaactcaaaaagttcgaattctgcttatcattgttctcattagagatgaaacgaaagtcagacatttactttcgcaggtttaaaattagtttttttcccttggtttgttggcaaacaaaaactagcgttttgttatcggtttttttatcagtcctttgtatcatatgaaaactacttaagataattttatcaattatatgccctaggaaaataatgtcccattgtggtgttaggttggttctcattagtcttaaagaaaaatcacacaacttgtcgttttgacttggataaaaaaaaaattggcagaaaataccatattaatcttaaaatctttcaaatttttgtaattataacaatcactctttttacatcaactggtagtaatttagctacatacttgatttagcaagaagaactcttccagagctcttgtagctctctagcaaactcctctgatcttcggaccactaaagtaaattaagtaatgtgatctttgttctgaacaaccttaactcggtcgtgccccaggaatccgacgttgaacgtggtagctgcactaaacaggaacgacctcatcgtcatcttttctctcatggaagatgaccacaatagttacacttgagtttatatcttgtatatgtccatatatgagatacccaatacattgctcccttggcttagccgtccatgcacactgtcaaaatttagcaaatcttagatagaaatgtcactaaaagtgtacaattcaattgtttattaatcggtcatgctcatgtctcatgcaacacgtcttctttctttggtctcttactaatcaaacttatttaattgaatagaatgtgatgaaatattgccaataccacatcatggtgtgtatcatggttatgatcgggctggacaggatttcgaactttggtccctaaatgacgtctttaacagttttatcaacaaaaaaattaggtcatgatttttgcttctattagaatattatttcaaaaaatataactcttttacagtctttcttttgttttccgtataaagcgaaatgaatgatcggataacaaaacttatcttgagagttaattatcttttctttctctctagctctcaatagtcaataccctcatactaactagtaataacgatatataaaatcgagaaattatattttagatattcatctcaattttttgaaccacctcaacgttaaccaattcatttcaagtttgttccggcataccactcattgtttaacttgttccaattcgttgaactattatgttcagcttaacacgttaatatcaaataattaacagtttatgtagttgtaaatgtaaattaagattttatacattttatatatctgacattgtttaagcaaacatttttaccaaaagtgtatagcatatattggatgttgtcaagtttttttagcctagttcgaaccatctaatttttaccatcgaatttatatatctaaagccgaatccagtgtttctcatggtcgggtagaactgaaatttcgactttaactgacatctctaatgtcggccttatctacaaaaaaaaaagtattgatgtttggttctactatatatataagtatcaattgtggcataacatttttactattatctttttattttttttaaatcataataacggatcagagaggaaatcttcttgtgggttgtcctttttctctctctcaatagtgtcatagttgggctaattgacatttcttacattggctttatctacaacgaattaagtagtgatatgtttgattccacgggtggaaaaaaaaaaacagacctgaaattcgaccataaatccgacctgaagtactccataaatccgatcgagtacgagtcttttcctttgtcaatatgtttgatctagagagtcttggtacaaaaagcaagaaaaacaagtgaagatggtgataaaaacaaggtcgactgaagccaaatcgatgttagcgttatagtgtcgtagggttaggaattaggattttggccttaatttaaaagtaaatagaaaagaaaacaggggaaaaatgtatcttcctagtattgaacttggcaacttacggtattaataattaataagactgtaacattagagccaatgtttaactttgccaacttatttgtacaatagtatttttatatacattttggatagttttgttgggtaattttgggtattgggtaaaacctgaaccaaacccgaaccgaactccaagatgatgctatagaatatctaggggtcatgtattcctaaacccgaaacccaaaataccagaaccgaaccaacaaatacccgaatgcctagtctatttggttctattatatagaggtgtttattgtgtgacataacattttcacttcttccctttcatcttctcaagttcgaaatgacaacttcgagaggaaagcttctcttgtgagtaatatcatctctatttctctctcaaagtattttatagtctttttgagtcacatagtttgtacatgatttgaaggatcttgggaaaatcagaagatttagggattctaagacctatccacgattgtttaggtttttctctttcttttcgtaattttttctttgggttttcgtaatgatatatttcagtagttcactggattgatgtgtttatcttttgttaaattggatcggttgaatatgaatgagttattaaatttagtttcacaattttgggtgatgagagaatctaggtcactcgctcagaaaatttagggattttattacctatgcacgatgttttagttattcttgttttttttctctctctctttagtcgcaataacttctttggttttatgaacatgatgtcatattaaatgtagaatctataacatgatttattgatctgatgcatcttagtggagttcgtggccaatgacaacagtaaaacctctataaattattaatattgggagtaagaaaattgattaatttaaagaggtattaatttatcgataaattaataaaattgtacaacttttgtaaactcttacaaaactttgatataaaatgtagttttttttgtaatttcaagtagaaaacaattcttaagtttaaaaaacaatacaaatttttttttaattttgtaaaatactagaattgtacactaagttaataaaaattgaagaaaaaaattactacagtcatattttacatatgatatttataatatttattagtacaattattaatttatactattgatgggaccatatatttaaataagattttcaaaaaaaattattattattttattaatttattgatttgtatttataactttcactatgaaataataattagggtttcaaagactaatgttttttgagctttcttgaagcatcttgcaacaaatttaggactttcaagttgagacaatttttagtctcatgggtcatggctttgtatatatttcatgtcttacgctccaaaaacaaacccaaatataagttaatttgatgatcgaaatctatatatatgtaggtcaaacgaagatgtcagtaacaatgggatggagaagaaggctctcactactgctgaatcagttcgggttgtggaaaagcatccatgggttatcacctttccgaaccatgaagacatgacttttctcttcgatccattggaacggaagaggtacacactgaatttacccgaggtagttggaaccgatgtttgttactcgaaagacggatggttgcttatgcgaagatccagtttagtggacatgttcttcttcaacccgtatactagggagcttataaacttgccaaagtgtgagttgtcctttcaagcgattgctttcttttagctcgggaggtgttttagttgaccttgatctagcttcccgcacaatgagtgagcaagcatggaatgaacatagatgcgcttatatgcgcaatgataatgctgaatggtttaatcttccgaagagaatttacttggctgagcagaaaggagagctctttctcatgtatacatgtagcagcgagataccgatggtgtataaacttgtctcctcaaatttggaggagatgaatagtactactcttgacggcgtgacaatctttgcaagtatgtattcctcggagacgagattggatgttcttgggatgaggaacagtgtgtacttcccaaagtatggtttagattgcaagggatgtgtatcctactcgtttgatgaagccaggtactatccgcgtaagcagttccctaaaccaacaatgtggcaaatgcagaaagaactttgccctcttaggagtctttggatcgagccaccgtctaaggacatcttagatgtgataaaatgataagcaaatggatgatggtaaaggtaagtggagctagctttgagttttcctattttatttgatatatgtatttgatcatagcatgtgtgaaacttatggcgactttaagattcagtactgttaagctttatgttttagctttcaaagtctttgtatgtgaatgatttgaggctatgtaaacagttttattgtttaacttccatagtcttttgcatgtgattgaattttcatattattcaaaccgtaattctagccaaaacctttaacatgaagatataccctttttgtgacatactaatgctaattttattaatgtaagttgagctttgagctttattgtcttattttaaatatgtattgatcattgcttgtgtgaaacttatggggactttacttcagtacggttatgaaaaccagttgttttcaggtttatgttttaacttccaaagtctttgtatgtgactgattcgaggttatgcaaaaaaattagttttatcttttcaacttcatagtcctttgcatgtgatttaattttcgttatcattcaaacaagtcgagcctaaaacttttaacatggagttaatccatttttcttcatacgaatgctaattttattaatcaaattataaagaagacaaaaagggtcttcccttatttccaggttaagaaaaaacaatgaaaataaggtaatttcatgatctatgaacacatcaagggactgtagaaaacatttattttattaagttagtttttcttaacctattcacaccgtaccttatcatctttagaaatccttaaaaatctctgtcgtaaattttctcttcatgcccaagcatatgtggtttagtagtaggggaaggttcggtgaatagtgaaacgtaaagacccgagttcgatcctcctgaaaacaaaaaacacatttgttaggaaattttgtctattgaaaaccttgtcccaattggtttacatagtagtcagaaatacagacagtcggcttaccccttgacattagtcgaaaaacattataaactcaagacggacagtgtggtgacccttcgggaagaagtaagtgtttctaccggagctgaccagatcctttaattgggttttaaaaaaaaaaaaaaaaatctcaccatttacattcattttggttttgttaagttgttgtcgtaaattttctcactatttacattcactatgcaatattatttaagtcgataatgatgtttacaaaaaaatatacctcattacacaaacaacaattggaaagaatactaggtatattgaaggaaggatggattgatatctttaaaagttaaatgtctaattatgttgtagctagcaagacttaatgaccggagaaatggttgtaaagtttcttaaaaaggagtgaaagaggtaggattaagtcagttgtcactggccattgctttaaactatcccagttgttaactagtgcaataatataattttgatgtaagattaaatagcggtctctcgtagattgtgtggaaaaaatgtgtacccggaaaactaaggatgaaattggattgatgtcttgagaaattttagatttagctgccggctagatatcaattaattatcaagtttattggaggcaaaaattcataaaagcagatattctattttaggaatgtacacttttaaaaagggagtttgcgtttgaaagagtataaagtttcacgaggctaaaattgcaaactttgagaaggtgtttgtttcttttgcttccgtcatgcgcaatctataaagttaatgatcgattagtctgattgagacatgaattttgttagtcatgtcctcaactaaatgggctatttttccatacaggacgataaagtttctagctaattgaagggtttatgtgtcacactcataatttcaaaatggtattttctgccaatattaagtcagcaatgtgtttttcaggaacgactagatcctaatcctcaatgggacattattttcctagggcatataattgatgataatctaaagcagtttttaatataatactccatatgttttaatttatagttgtagtttaagattttacaaaaaattaaaaaatcacaaaaatctcatttaactcacctctttttatataaagattttattaattataaccaattcaaccaataaaaaaatatacggtaaacataattggtcaagaaatattaactatttttctttttttaactaaagttgaaaacaacacttattttgtaacaaaaaaaatcctttaatacatataaataaacaaagtattatgtaactcggcctttgagattagcctatattgtaccacggcagggtgggattggacatcgctttatgtccataaaatagaaagcctaacgggcaagcccaaatagattgtgggttttagcggatttgtccatagattggcggagcggccgcaggatacaaatgtttaacaaaaataaatatataatatagataaataaatatcttttacttaattatgaaacaataatatgtgataatataaagcaatttaatttatagaatgatatttttttttaaaagtaaatcttaaagattatattaaatctaaaattattaatttaaaatttttaaatttattttattattttgtttatttttaaaatataaaagttaagcccatgagatgggccttgacatagatttttttgttagtagtccaacaaaaaaatacccattgcggaccggcccgttttacacctctacctggatctctaaaccaaatacccgaaaatctaaaatatcagaaccaaacccgaacaagtatccgaatgaccaaccgtatttggttttatttagaggtgtcaaattgttacataagatatctaattctcccctttcatcttctctaaatcgaaatggcaactcagagaggaaagctcatttggtgagttatcccatctctatctctctctcaatactctctatcccatctctatcaaaggtttttggttttatgaacaagatgccatattaaatgtagaatctatagcatgatttattgatctgatgcatcttcgtggagttcgtggccaattattcccgtaaataattataacttccactatgaaacaattagggtttctaagatgagtttgggacaacttttattgttttctcggctttcttgtagcatcttggtttgagacaattttcaatctcatggttttgtggtatttcatgtcttacggctccaaaagcaatatatatttatttcagttaatttaatgatcgaaatctttaattatgaaggtcaaacgaagatgttagtaacaatgggctgaagaagaagttcttactattgctgaccttacatcaagccttttggaaataataatgtcttatcttggtttaaaagataacattcgtgcatccgcggtctgccgagcatggcgtaaagccgctgaatcagttcgggttgtggagaagcatccatgggttatcagctttccgagacattacggcgtgactattctcttcgatccattgggaaggaagagttacacactgaatttacccgagttagttggaaccgatgtttgttactcgaaagacggatggttgcttatgcgaagatccagtttagtggacatgttcttcctcaacccgtatactagggagcttataaacttgccaaagtgtgagttgtcctttcaggctgttgctttctcttcggtacctacatcaggtacttgtgcggtaatagcgttaagaccttttacgagatttatcattcgtataagcatttgctttcctggagcaactgagtggattactcaagatttttcttgctctcatggatttgagccgtacatgcatagcaatcttgtctatgccaatggtcacttctattgcttcagctcgggaggtgttttagttgactttgatctagcttcccgcacaatgagtcatcaagcatggaatgaacatatatgcccttatattcatatgtacaatgaagaatggtttagtcttaggaagagaatttacttggctgagcagaaagtgaaagtagaagcaaaagcttcagagagaaaataattgtgtatttcttccttagtgaattcgattacaagcagagaactatataaagaggaggattacataatagctaatgacaggtgtcctagttgcatgaaatgctgctgcttccaagaacatcaaaatgattgtgcacgtttatgtttgtcgacggcggtgtctcgcgtgatgttcctctgctttgattgttgcagagtttcgatgagtaacagatgggcttcgtgggattctctttttcttttgggcctgaatctcctttaactgaaactgaaacagaaacaatgttgttgcgatggattaaagtctctgtaggagaaggagtctcttgttgtttgatacaccccctcaaacttgtgtcaggcggcaagacgacaccaagtttgaaccgaagatcacagaacggtgcctgaggaagagacttagtgaagatgtcagcaagttgttgagaagctggaatgtgtttgacggtgagagcgcctaaagccaccctttctcgaacataataatagtccacctgaaaatgtttggaccgagagtgaagagctggattagcagatagatatacggctgaaaggttgtcacaatacatctccgggatttgttgttgtggaagtccaatttcttgaagcaagaaaccaatccatgacacttcagaggcagcgaaagacaatgttcggtattcagcctcagtggaggacttggagacagtgggatgacgtttagcagaccacgagattatgttatagccaaggaatgtgcagaaacctccggtagatcgtcttgtgtctttgcagccagcccaatcgctatcactataacaacgaagaacagaatctgtgttggaagataagttaattcccattgtcattgtacctttaagatagtgcaagatcctcttgagtaaatggaaatcagacattgtaggagcgtgcatcttttgacaaacgaagttaacggcaaactggatgtcgggtctagtgagggtaagatattgtagctttcccgccaagcgcctaaaataagtgggttcaggaaaaggtttgttgttaccttgtaatagatcaagctgaagaggtgtcggcatggatgagcagtcagacatgcctgcattaaccaataaatcagaggtatacttttcctgactaaggaagagaccatcgttgtgataatgagcttgaatccccaaaaaataatgtaatgctcccatgtccttcattcgaaattcggtactgagaatattcagaagttgttgaaggagaacatcgttattaccggtcaaaatcatatcatcgacgtatagtaacaagaacataacgtctctgccttttagataaacaaagagagatggatcagaaaaactgcagataaatccatacttcagaagatacgagctgaatttatcgaaccaagctctaggagcctgttttaagtcgtaaattgctttcttgagcttacatacataatccggtcgagaaggatcttcaaaaccagggggttgggtcataaacacagtttcttttagctcatcatgaaggaaagcatttttcacatcaagttgcttcaaagaccatttgttaattgtagcgacatgaagaatggatcgaacggtggcagatctgacaaccgggctgtatgtctcaacgtaatccacaccttcctcttgctcgtaccctcttgcaacaagacgagctttcaaacgatccaaactaccatcagaatttagtttcgttttaaacacccacttgcatccaagaagacgatcaaccatttctgggggaactaagtcccatgtatcagtttcgtgcatagttcccatttcttctcccattgcgtttgtccagccttcatctttgagagcttctttgacagattttggctcaggataattagacttgacagagaacagagcatatttaggattgggcttcgtgatacctgatttagctcgagttatcataggatgggaagtttcgggagcagcagtagtcgacgagatcaccgattgcagaggaggaaagtcagagtcctcaaacaaagagacgttaatgctttgaggagtcatggctgagctaatagcagtttcagaatctgtagagtagtgattttgatcagaagtggactcctcaggctgagtgggaagcgatgtggatgtgatcgggctaggaggaacaaccatatcatgagcagcagccacatcaacatcaggagctgtagctgtttcggctatattgggagcacaaccggttggtacggagctagagacggtcgcagaaggaaagatgatgtcttccacgtttgtagatggagtttcacgtgataaagcggtagaggaaaaccctttttgccaagcagtgaacagaggagaacccgaaatcgtttgaaactgtgaataaatgtcggagtagggaaattttctttcatcaaacaaaacatgtcgacagatgtagactttgcccgtaggtggatggagacaccgatatcccttgtatttgttgttatatcccaaaaacacacagaggagagactttggatcaaacttgtttttcgcatagggacgaaggtaggggtagcaagcactcccaaaaacacgcagggctgtgtaaacaggtggtgttccatgcaacatctcatagggactcttattatcagacaaagtagaagaaggcagaagattgctcaaaaagtttgaagtaaagaatgcttcaacccatagcttatgaggaaccttgctatgaaacatcaaagaaaggccaagttcagtcaagtaccgatgtcgtctttcagcaatcccgttctgctgcggagtatgtggacatgaaatcaattgtttaataccacatgaagcaagatgagcaacaaatttatatgagacgaactcacccccaccatcacactgaaacatagcaatcttatgttggtactgattctcgacaagttgttgaaacaaaacaaagaccgagaaaaaatcagacttcaacttcaatggatagaaccatgtgaatcgagaataattgtcgataaagatgacataatattgaaaaccttgagcagaagtaacaggggcagggccccatagatcacaatgaatacgttctaggggccgagaagatacaaattcagaagcaacaaaaggaagacgacatactttccccatttgacaagcctcacacatattggagcttgttttattgactacaatagctttagttttgataaggtgttgtagaacttctttattagggtgacccaatctctgatgccacacttcatcatcactagattgttgcctggtagagtaataagtttgaaacgggacatccttcaacacgtagagacctttatgcttgtttccttgtgtgaggagttgttgtgttcgtttgtcctttataacaacagaatcagagtcaaacgtaaaagagcagggataatcatcagtaagcttggaaacagataaaagcgatttagttattccaggacatactaagacatcctctaaaggcaatgtaccttgagaaatgttcagagggatagtaccaatatgagtgatgggcagaaaatctccattccctactatcacagaatcatcacctgagtatgtctgagagttttgaaggccatcggttgtgttcgtgatatgcgcagtagcagccgagtcgggaagccattcgtgacttgaagcttgattttgatcggaaacccgcatagcagcaaatgcattaggaagatcttcaggaagatagttttcttcaaaccgtgtgtaacacttaaaggctgagtgaccatatttcctgcaaatttgacatgtgggttttgaaccatttccagagccattgtttgaaccagaaccaaactgttgatgaaaaccacgaccacgcgaagaataggaaccacgaccgcgaaaattaccatatcttccaccacggctattgttattaccccgtgaagaatagcttttgtccgtgtaaaaggccagatgtggagtgacttcggaatttgcagtataagtggagagtttatcatcaaacgtagtgagcttgtacacgacatcgtcaaaacacggacctggatacacatcaagagagtgttctattacagttgctatggactcatactcctttcctagcccattcagaacaccaaaaatcttctcttgttctgtaaccggaaagccaattgaatcaagctggtcacatatgtttttaacctcacttagataagcatccatcgtttttccagcttttgaacaagtgcctagtcgtttctgcagatcatatttcctagtggtggaaaaacgattaaaacgtcttgctaaaccaagccatacctcttgagcagagtttaagccaataacaactttgagagcttcttcagagagagatccaaaaatccaagctttgaccaactgatcgattcgagtccatttcagaaattcttgatttgcttcttcagactgaatatcatcctttgtgacaatgatggtggaggcaggccgaggagtggcgccggtaacaaatcctagaagaagatgagatgaaaggtaagactcaaattgggttttccacaaaaggtagtttgtgggagtgagtttgagagtaacaacttgagagatgttaagagaggaaacaaaaatagattcttccatggcttaggaacaaagtcctaagctctgataccatgaaagtagaagcaaaagcttcagagagaaaataattgtgtatttcttccttagtgaattcgattacaagcagagaactatataaagaggaggattacataatagctaatgacaggtgtcctagttgcatgaaatgctgctgcttccaagaacatcaaaatgattgtgcacgtttatgtttgtcgacggcggtgtctcgcgtgatgttcctctgctttgattgttgcagagtttcgatgagtaaaggatgggcttcgtgggcttctctttttcttttgggcctgaatctcctttaactgaaactgaaacagaaacaatgttgttgcgatggattgaagtctctgtaggagaaggagtctcttgttgtttgatagaaaggagagctctttctcatgtttacatgtagcagcgagataccgttgctgtataaacttgtctcctcggattgggaggagatgagtggtgctactcttgacggcctgacaatctttgcaagtaagtactcctcagagacgagattgaatgtttgtggcatgtggaacagtgtgtacttcccaaagttttatggtttacgttgcaagagatcatgtgtatcctactcgtttgataaaggcaggtactatccgcgtaagccgcttccaaaaccatcaagatttgaaaagcagaaagacctttgccctcttatgagtctttggattgaaccaccgtcttaagacatcttagattcgatgaaatgataagcaaatatggatgatggtaaaggtaagatgagctatctttccgttttcctttttatttgatcattgaatatgtgaaacttatgttgactttaagatttagtactgtttacattcatgtccaaaaaaaaaaatgattcagtactgttatgaaaacttacatttcagatttatgtttcaactttaaaagtctttgtatgtgactgattcgaggttatgcaaaaaaaatatatatatagttttattgattaatttccgtagtcttttacatgtgattgaatttccatatcattcaaatagtaccgaaagaatctccaagaagcttcaccgctttgtttatctccttcatatccacgttggctactgccgagatctctttcaatgtttttggtatattcacttggcgacatgcccttgatacagaggccgcgcaaagccctctcaaactcttccctccgcgtaagttctttttatccagtttcgaaagaatcttgcacgccgtattactgataccgaaagttaaccctagcgcttcggtcatcctctcgatttccgcataggctatcttgattacatcttcttcctgcttgtttttgatcatttcattctgtgttcggcgcaattttgaggcaagggaggaagattttccgctaagtttgaagatgatagtggggagatggccggatttgagattagggttggtcgaagcaccgtctaggtcatcgatgatgttattctctatgacatggccacactcaatgcagattgtatctccgttcttgtagttaaccacggtttctgttggcctcttgcactccaagcaaattccgtcttctttcattcttagggtttctttcttcttcgtatggactaattgttttgcttttctttttttgttggtttaattgttttgctagtagtatttatagatgttgaaataaaggaatttgtttttctaaaaggatttactttttattattttgtttcctttttattatttctttttttccagtttgttatgcgattcccaattttttttttttttttaaggaatgttttatatgtaacgggaagaaaacatgttaaacagatatttatacagtgaaaactatatactaaagcttatctccctgatttccttaagcatctccgatgaaatacacatcaagactccattttcatcttaagccaatacaaaggatttgggcatgcatacacataaaacagagtatgagaatgacgagagactagaaggagattgttttttaccgatttcaatcctccagctacatccaggattctttcttgatgtgttcaatgaagcaaggcaagccagagtggctgcaagcattgatgatgaaaatgaagacaacaccatcgggaacaagacctgatttttcgatatcaacaaaagttttcaacagctttctcaccttcgctatacattccatatgcataaatcatccatgtccatgtcacaacatcctttgtactcatacgttcaatgactctaaaggaactctccaaagaaccacatgcaagagaaacaactgccaaaatatattactcttcttatatataccagagagagttgtgtatataagctaattaagttgaagttgatgcatgggtgatgaagacaagatcagcatcagcagggagatgggtgaatgagcttgtgagctttgatgtgttttgtctcttagacatcgtcgattggaaacctttctattgcttgtcccacaggaaactcaccaccactaatagtgggaacatcttcgtatctcataataataatggtgaatccaagatttctttaataacttaagtattcatttttaccttttggtttatggcataccctttaattatttacaagaccaaccgttagaggatgccacaatggtattttctgccaatttaagtcgaaacaaattttattaagaacgacaagaaacctaagacttcattattttcccaagggcatagaatagatagataataatctaaagcagtttttttatatgatacaaaagataagcagaacaaaaggctaaaatgataagcaagcagaactcaaactcttgattattttgttttcaccggtgcctgctgcgtttagatggtggcatgttcttcatgctgctactaccgcctgcaccgctacttccaggacgcgatttcccaaacgctttcatcttccttctcttcctctcttcctcactatcagactcaactccatgctctctgtctgcattagtagcttctctctccagctcagcccaagtcttacctttctcttcctctgactcttgctctgagtcctcttcttcttcttcatcgtctgactcactctctgatgtctcgtcctctgactcagactcaacctccacatctgatggttcataccctttgtctgagtcctcagagccgccagactctgaatcgcttccgtcctgattcaaaaactcccatcctccagcatctgtaaagctctgcggatcatccgtgatcgtcttcaggatctgtctccagttcagattcagtttgctctcgtagtactttatatctgtagtgtcaagccattcctttatcccctctaactaacttgttggaactgagtcaaccctaagaacatctttcttcaagtccttgaagatgatagccatgtcaaagctcttttgaccaaacccaactctctcaagattcacaatctcaatctcacttagacagaccaccaagaacggggattctgtcagctcaactaagcagcttgaggtcggtattatgaaggtagatgtcttgtgggggacaccattgaaaccaaactctctcagaggttgatcaaactctaagctcaaacttgcaaactggggtagttgccacatatcgttgacctgatttgcaaagtgattgaaatccatgttgatcttatttttcctatcgcgctctctctgttcttcaacaatctcatctgcatcataagctgatgatctcctcctacctcctaaagactgcacaacatccattacctccacataaaactgtacgtcttttgttttcttggttcctaccatgatgtggttgtggagatgaaaatgtaagagggtggtcatctccttctccgccggctgaaaaaacgcatgctttatgtttgcaaacaggacatcaacgcgctcgttggtcgttgaatacctaaaaccattgacatgagcttcaagtgtcccacgattcttcttgcgtccactaaaaggcggacggatccacagattggacaaacttaagggttttgagttgttccttacaatctgaagtttttcttggttcaccagtgaagttctctcagctctctctgactcccgtgccatgactttccgtctgaggctcttaacctgttgaactacatcgctgctatgccttgaatccttggtccggaatgaaacctccttgaggtagatagcgtccttgtttttcaaagagtcattagggtttaagggtgtacccgggacattgaatattacacggatggtgttttgattgcctaagactgttcttattgtagtcacgttgaatggaaccatcctgccgtatattggtaacaatacagtgtcgctcttgtgatcaaccgtgatcatcaaatccctaggttggggtatgtcgttaatattcttgtagagctacatgtcaccagcaagctgatcgaatacaaccacagaccaagaatcaaacttcaagtaataagcctctttatagaactgaaagagaacagaagaaaaaaaaacgtaagaaagtaaacttcaacgagaacaagttatttcggatgcctcttctaagaagaaaacaatctctatttataagaaaacgtaaacacaaacataaagagaaaaggaaataataaaaaggaagaaatcttttttatcattaaaatctgtttctatataaatgtagtttaagggtttttatttctttttcaaattgttttcaactttatatacaaataataaatatatttaatactttttaaccaattgtatttaatcatatattttttattggttgaattggttataattaatgatattttttatataaaaaagtagattaaatgagatttttatgatttcttaatatgtgtgtaaatatcttaaactacaactaatataaaacagaagaagtattaagttatatatatatatatatatgtcatactaataaatcatgaggagatctagggtttagaaactgtaaatcataacctcttcaagaacatatgtagctctcgatcgtttttctttcttcatatccttctttcgtttccatctgcgacctccttccctaatctgcagttcatattattgatggtcgatgaagaaaggaggaacatgatagtacaaacttgtccatgctcagacgacggctagggttttgaatcagagaaaattaaaagagaaattttgttgttgtgattactttttttttttgggtatgatctttaattttattttattcttatgaaaattaaattctcaataggattaataaaattagcattagtatgtcacaaaaagggtatatcttcatgttaaaggttttggctagaattacggtttgaatgatatgaaaattcaatcacatgcaaaagactatggaagttaaacaataaaactgtttacatagcctcaaatcattcacatacaaagactttgaaagctaaaacataaagcttaacagtactgaatcttaaagtcgccataagtttcacacatgctatgatcaaatacatatatcaaataaaataggaaaactcaaagctagcttcacttacctttaccatcatccatttgcttatcatttcatcacatctaagatgtccttagacggtggctcgatccagactcctaagagggcaaagttctttctgcatttgccatattgttggttttggaagctgcttacgcggatagtacctggcttcatcaaacgagtaggatacacatcccttgcaatctaaaccatactttgggaagtacacactgttcctcatcccaagaacatccaatctcgtctccgaggaatacatacttgcaaagattgtcacgccgtcaagagtagtactatttatctcctcccaatttgaggagacaagtttatacaccatcggtatctcgctgctacatgtatacatgagaaagagctctcctttctgctcagccaagtaaattctcttcggaagattaaaccattctgcattatcattacgcatataagcgcatctatgttcattccatgcttgttcactcattgtgcgggaagctacatcaaagtcaactaaaacacctcctgagctaaaacaatagaagtgatcgttggcatagacaaggttgctatgcatgtatgggtcaaatctaagagagcatgaaaattcttgagtaatccactcagttgctccaggatagcaaatgcttatacggatgatatatcttgtaaaaggtcttaacgctaacaccacacaagtacctgatgtaggggccgaagagaaagcaatcgcttgaaaggccaactcacactttggcaagtttataagctccctagtatacgggttgaagaagaacatgtccactaaactggatcttcgcataagcaaccatccgtctttcgagtaacaaacatcggttccaactaactcgggtaaattcagtgtgtacctcttccgttccaatggatcgaagagaaaagtcaagtcttcatggttcggaaaggtgataacccatggatgcttttccacaacccgaactgattcagcagtagtgagagccttcttctccatcccattgttactgacatcttcgtttgacctacataaatatagatttcgaacataaaattaacttatatatgggtttgtttttggagccgtaagacatgaaatatatacaaaaccatgacccatgagattaaaaattgtctcaagaaagctcagaaaacattagtctttgaaaccctaattattatttcatagttgaagttataaatatttaaggtagtcattggccacgaactccactaagatgcatcagatcaataaattatgctaggttctacatttaatatgataatacttatcagaaaacaaaatattattgtggttaaacaaaaaaaaaccaatccctaaattttctgagttccctatattttctccttacgcaaaattgtgatagccaattcagacaaaaccaaagaaacgattaagaaaacaaaaagaaaaacaaaaccctacacaatcgttgattggtcttagagtccgtagatcttctgatttctctagattccaaaattgtggaactaaattttgaaaatccaaagaaacgattacgaaagaaaaaaaaaacttaagtattctggatcttctgaaatccctagatccttcaaatcatatagatattatgtgattcaaagattacaatataagaaatactttgagagagattaagagagagatggagatgtgattactcacaagataagctttcctctcgaagttgtcattttgatttaagggcagaagtgaaaatgttgtcacacaatcgacacctctatggctctatatactagaaccaaatagagatggacccattctggttcggtttagatcgggtttgattcagtttgggtttaataccatacccgaaattacccaacaaatactatccttttttcttttttttgtaaacccccaacaaatactatccaaaatgtaaatatattcatcaaaccaattgacccaataactcatttgatctatcaattcatttgagtcaaaattttcaattcattaaggttcatgggttgagttgagttgagttgacccatgaatctcgacccattttgatacccctaattgttttctagttgtggagaaaaatgcaattcaccgaattttatatagtaattagcacgaatctaaagtatgaatgtgaatgagaaagctaatatctgtcctctagtcaagcaatggatatgtatttggtcttcttttttcttcttcttttttggcaattggtctgtatatatcttttttttgtatttagtctgtagttttcctcttttttatatttggtctatgtattccttcttttgtgtatattttttgagaaaattgaaaataaaatatattttgtttatgatttgtccatatatatatatatatatatgtttattagaattttccatctatgatttatattaattgaaaacctattatacccttaattatgtgaattgtaaaattgtcttttcaaaataaatttttattttcgagttttaaaaaaataggtttaatgttagaccctctacttcaccatgagggctcacattgggtttaatgtgaagggtgtgtactacttgtgtagggtatcgaaagtgtatccaaatggagttagatcaggaatcggtgattcgttgtcactcttttgttgagtgagtcaaatgaaaagggttacgtgaaagccaagttacgagtgattgacaagagccgatctacctttgtggagaaacaaggttggtgtcttggtttgatatctccttttcatcgtctactactaaattatttaggcttatttgaaacatacaaattgttaaacttaacttttgttttgttcttatagtgcggggatggccaaatgtaacaaaaactggatggggtttcaaaggtttccttgtcaatgataccctcaaacttcaaatcaaggtcttgtccttctcgaaaaccaactctctctaagtttaaatgattccacaatcacttctttgttgcttttctaatttccttttttaaaaaaacaggagatagtatttaggtcaaaaacaagacaagtctccgctatggccaagtggattaccacaatcagtttgggtcactgtttttttgttcaataatgaaaagttcgagctgttttatgtcaaactcgatcaatcgggttacaaatgtcacaattaatgatatatatatacataccctaatttattttcaaatggttccattataaaaatgccataacagtttctcggcgatgaacaaaccccacttcttctcaccacttgagctcctaagtagctttgacttttacttttgctaattttcgtttaagaagtcactgatgaatttatccttctccttctctactatgtccagttccatgtttcatagtgtgagattcatagttagataaaaggtataaaaaactcataggaccaaaagatttatgttgaacaacgacacaatgtaaatcttttagttatagacaatgttgaagaaagaaagagcaaagcgttatgcaggcggtgatccagtgcctagtatcaagaaagcttattcgaagtttaagcaatttaagcggtttaggcgatttagttatttataacataaaacattaaaaaatatgaaattatagccaatttgtcctaaaatatgatagcataaacaaattgttgaagaccaatcaaacgatttggcttacgattttgtattgtaatttttaatatatatatatatatggtttttattataaattatattatatgatcaaatataaaataatataatataatttataataaaaaccatatataaaagtttacacaattattcaaaataaataaattgttaagctaaatgtttattacttcatacatttggttcataaaaaaccatcatcaagtaatatgacaaaattacaacaaaaaaatatgttttgaatcacttaaaactttcggattaatattattattacaatacttagttagtattttgtcattcttatgagttgactatatgattttgatagagaaaaatattaggattttgagaattaatgttaatattatatagggtttgatactgtttttttaaaatataggttgtttgtgtattttatattaatgaataaacggtttggataattttattttatttcaaccgctaccacctgcaactgcaaacacgatttcaaaagttttagagtggtcccgaagggtttaaaatgttttttacgattattttaaacgttaacaattgcgattgcccgcaaccatatcatttgcagatgatagcagaagaactaatcaatccttaaatatacacaaaaaggtaaagttccacacataccaaaactagaaaaagaaaaaggtttatagaggaaaaaagaaaaccagaaattatgggtcaccacatcaacaacaaaaatatttctggaaaatttgtgttctagaaattttattataatcaaagcaaaatagttttttagaaatattatgatttttgaagtttttagaaatacattcaacttaggatttgttcttttacattttttgaagagtttaacatttcgaatcgtttatgaggcctatcatccggacaagggccgatgcaaagacaatgattcttctgactaacagcctttcttgtaactggataatatctgaggcattttctcgacaatgaacgcacacatcgccaacaatcaaatcattacatcccatattctactcaactatatcagacaaaattaagaagaaaaatttatattaagatttaggagatatcaatacactgaactaaaactattgaagtaaaccataaaggtaaatgtataactaaggctaacaccacgatgaattacaagtaattttcactgacgcattacaagtaaatgtataacaagtaaaatttaaatattctactgacgcatatttgtaacaaccaattcaaacataaaagagaaatagaaaaatctaattaactcctcacatttgattaaaaaaaaagccaaagaaacgattatgaaaacaaaaagaaaaacaatcgttgattgttcttagaatcccttaatcttttgatttccctagaatccaaatttgtgaaactaaaatttgaaaacacattcagattcaacctaatctttgtaggtgtcctcagaataggagggacaaccactcgactctgtacatcccacatatcatcagagaaagaagtttttgttttcttatgacaattctttttagaagggatctcgtggaggaagcctacaagtgttaggtgatacgattcgtggtcattttctccatcccacacgcttgctcgtccgtttttttttgggttagccacttggcctctcctacttggatttttcatttaagttttgtttgttagttgacttattattcttttttgctatagacatgaaaattgtttgggccagtcctaaatctaatataatatttttgaaactttgatatatcatttttgatctaagacaattatgagagagagatatagaaaggggataactcacatgacaagctttcctcttcaatcagtcattccaatttcaaaaaagtaaaaagacaaaaataaaaatgttctcaccattgatatctctatataaaataaccaaacaccactttttaatttgttgtatagtgtcaataagagctaaagtccgaagcctagcccagtccaaaaaaaaacaaaaaaaaaagtgttgggttggactatgtttcagactctggtcataattaataattttaacgttgagttatctaataacaattaagtaataatgtttggttctattatatatacataggtacttatcaattgaatcgtgacataacaattttatttctgtctttttatcttctctaaatcaaaatcactgatcgaagaggaaagtttatcttgtgagttttcccttttctatctctctcaatattcttagattgaaaatgatatgtgtcaaaagtttctcaaagtattttgttaaatttatatctttgaatctcattataatatagagttttagtcaaaaggttttataaataaattcatagatataaaatgtatgaaggctatttacatttacaactagacaagctgttatttatttgataattaataatgtgttaagttaaagtgataatattgttggaacaaacattgagtgacatattgggacaaatttgcaatgaactattggttaatgttgaggtgattaaaaaaatttagataaataacaaaaatgtatttttcgatctaataatcaatttatttttatgatgattatagttagtaatactaacctcagtatccgccttcggtttacgcttctctatttcaaagtctacagcttgaatggtatgatagaacgatagtaacgatgaatgatggagttttgtcgttgaatccacaacaatactgatcaaaccaaaatgtttgaatctcacaaaatatatagaaacgcaatcaaacaagactattagagtcataccaatagattgaactaatagacttcaagagattacacatctttaaaagaaaaacacactttctattacttaacttgaatgactcgaataaagatacaaactaagatgagcttatatagaggctcatacaaacggtcatatgctctaaagaagtaaagaaatcacagtcattaaattaaaagagccgttggctaactaaatgataaatttgaccgaaaatgataaatttgaccgaataaggaaaatctcaaaacttcttgtatctttatagttttgggaaggagcgtctttaaaaggcgttcaaaatcatcataatatagccgttgtgatttgattttgttccgcctaatcaaatgaggcgtggtataccttaagacgtgtagacaaatcttaaaatgatttacacggttctaaatatgattttgaaattttctagattaaagaaatataaatcttccttaaatggcttcatgtttatccacatatatagatcaaaacatataaatattatgtatataatttttaaaaaatataatattgtgttcataaaaaatttcttaaaataaaactatttcatctactttttcaccatgttaaaatacgatacgttttaccaattttactttttactttttaatactagcttagtgacaattctattttattttatacaaaaaaaaaaaaaaatcttaagattctctcctcgtattttcgatgggatgaggctttatgtttaaagcattaaagggcccaatggagctaaatgggctttatttaggcttcaacgcgcggatgtttatgttgaaaaatggcaacggctaaaacctggaagattgcgagggaaatcggagacgccgtgatcaaggcgtcgagaaaccctaaccggagatggtacggacctcacatggccgcagcagttagagcaatctccgaacgtattcctttggtcgatttcgtacttgagattcgagacgctcgtgttcgttttctttgtcctccaagtgttcgattaattgcctcagagaacgaagctaagttttttttttttctcttttctgtgtagattccgttgtcttctgagtatgagttgttgagaaagttttcgcctttaccgtcaaaacgaatcattgtgttgaacaaaatggaactcgcggatcctttggagttgaagaagtgtatagattactttgaagagagaaactatctttcgtatgcagtgaattcacataacaaagattgtgtcaagcaagtaacattttatccgatagtcgtctcgattttcatctttcggttctttcttctttatggcgaaagaaacttaagaagactttttctttgttcagttactgaactttttgcagagtcaagttagggaattgcataaggctggtcattctggtcatactactactatgatgcttcttgggattcctaatgtaggaaagtccgctctttcaaattctcttcatcatatcggaaggattagtgctgcaggtaactcctatttcatcaagtattgttgcttttgcgggattttcagtttttcatgatcgattttaacagagaaaggtaagctaaagcatacaacagttagctcccagcctggagatactaaagacattatgagcttgaaggtttgttcctttcgtttaccagaatacttgagattatgtcgctgttagtagatttctcacgcgctccaaggatattcagttcctctgtatgcttattattgcggtcatgatacttgcatgtgttcacttatgctgctattagtattagtaaggttaagagaattcatttgttttcagatcggtagccatcccaatgtctatgtactggacacgcctggaatttttcctcctaatctgtatgacgctgagatctgcgcaaagttagcgttaacaggtttgatcagcactaaacacaaacagaatgattatatacccgttaaggttttatttctctattctcattcccggatagcgcagagagcttattgggtgggttacctaatgcaggagctatcccggatgatatagttggggaactcaaactagcacggttatttctgacgatactaaattcgagccatgaatacaagaaatgggctaaactgtgcaaatctcaggatttaacagaaagtttatccgatgagagctccaagtctgatgccaaacataagaggcaatacgcaacagatcatacacaggtaccagaacaagacaataggattcattatctgctaatcagtagtctttcgttagttgtatcaaattcctttcttttctttatttgtaggattttatagtgtacgacgttcgaagagttctgtacgagacaatttcagcatttgacggaaacttagaagacgaaatcagcatgggaaatcttatagagacgcaattcgctgcgttaagatcggttcttagggttccagaagaagcaagtgagtttgctgatctaagagttgcttctaagatattgaatctctatagaactggtagacttggacattacactttagaacatgtctctgctctagccaaatcttacacatacctttaaaagattatgtgattgtgatgatctacggcttaaagaatcgatgtcaagttgtttaaaggagaattatagctttgttatctaagtaaccttttggcacaaggaaaaaatagaccctaaacaaatcccatgatcgtaaatattacgaaaaacaagaaagtctcactttaaccaccggagctcagtggtagaacaaggtgagattttcccggcgaacccatcaccgtaacaacaagaataatcggattcatgatctccccagagacaactcttaaagctt

SEQ ID NO: 566 - DNA, 95799 bp, Arabidopsis thaliana
gaattcgcagttaaaacatcgaaaaatgcaggacgatgtcattgatgtatccctcaatacaaagaatgtcttcttgtcagctcttcatttcgccatgtccattgatacactaaagaactctcctgagcttgttgatgagctgaaaacatcagctcaagaacaagtggagtttatgttatctgaagacgaagaggtacggttactgatttccgaagaggaagtgaaatccgttgtgagattaggtatctcaaatgttatatcgatgttattggatagattatcatcattgcttgtgattcttcctgaatgtactgagtttagtgttcttaagacattatatgatattgagtggttgtgtaaagtattgccaaggatggagttgatgaaagatcttgtcgttaagtggaccgatgcatcgagtgagattcttgtgattgctcagaagtgtgagttggattctaggatattgggtgtgaaggttaagctagttgaggttacagggaagattttagaagcggtaggttatggaattgtgattgttccttctaaaagcaggacttgtcttttgaagatatggttgcctttcataaggagattaaagactttggttgatgcagagggatgtgagtatgagtatagaatggatgaagatctttgtgaatttatagaaggatctatggtgtctttggttttgacattgccttcaaatgaccaagcagaagtgtttggtgaatggatgagaggtattgggttggaaggtgtgaagtttccggatttaagtgaagcgtttgaggtttggtgttatagaagtaagtctgcaaagagaagattggtggaaagatgtgatagacttgcaattgtaaatcttgaccattgaatggtgtatatcagtttcgagattcggtaaactttaaatgaagatgtagctaagcaatttgaagttccaggcttttcttcttcctacaagctggtctgcttattttcgaaggtcgaatgaagatggataatagctttgttcaattcacagttcactcacaatgccttaagagtggaccccaagcgaggtaacccgataatttcaggcgtatttgctgcttcgttgtaatgctagattgtattaggagtgacataaagcttctgattcttgtaactttgatcctgattaaatgatataaatggtgcggtctatgtttaagctaataagtaaaaggaccaaacttttgttgatacgttgacaaccccattggttgtgaattgagaaagagaaatcagtttggcctaagaagattaagcaatgtacaactattcttcttgctttgatttgaaccgtaacaaaagtattataattttcatacaaaaagagaaaagtcattcaacaatgcatggacccaatcaagatttctttgcggcagaaaaacatggaagctgaatgaataatttgatacctcttttcaaaagcaaacacctccttgcacatgtactttgttgagtacccaaaaagagataaattataaaacgccatttatcaggttttatggaaaccatcatgccaagtttttggacacaaaaccacaaatttcaggaagaaagattgagaaaggtcattggtaaactaatatgacaaaatcaatacataaacacacaacagtttcagaaacttttgttttccccaacacctatagatgacatcatatcccaaaattgcagcttcactaaaacttggcacatatagagatggagaaaaggagagaaacaaaaacaagaagaaaaacctaatgtagtcctcagagtcattattgtgcttcaacatagcaacttcaaactgctttagcaattggaacgatgagtgtaaaatctcattgcaactcatcattggactactaaacaaaactctatctatatctgaaccaatctacctacaaagcaaacttgttatctttgtatccaaaatgaagccagatcatgtgttaaacatcagtacatcaccaacaaccacaagagaccaatgattatgaaagatacagaagcaaacttctctaaagatgaatcacacacaagatattcccagaatcacattcatcaacgcagttgaatctttcaacagactaactatgtaaaaatcaaaatcccaaaatcaagcatatatatataaataaacttcacaaatcacaaaccatatcgaatcaaacgcaggtaataatagtcaggtttacacataaacatttgaagaaacaccaaatctggcatgtacaatcaaaagttgatacaatttctagatcaccaaaaataaaaagaaggcgaaaccgaagaaggatttaccgaacgaagggaatctaaacgatgtcgtctgggtgaggagcggcggagagagcaaggggacggttgtgagattcttcgccttcatcgtcatcatcggaggtagataggttaacgcatgagcaacgctcgagggaggcgaagaaggcggaaataacggtggtgctgacccagctcgccgcttgatctagcttttccagagaagccgtgctcagatttgaggccgtggaagcggtggaattgatgctgctgctgttatccatggcttctcgatttcgattggaaatctcacaaggttgagatcgtgtttggggattttttgcggagagattttgaatcgaagagaaacgaatttggggattttttttagacgatgtggcgatgcagaagaaaatatgtaatgttttgattgaaatttgtggttaagataaatctagttatatggaatgtttaaacaaaaagcgcatctggtgtagtggtatcatagtaccctcccacggtactgaccagggttcgattccctggatgcgcaaaacttttgttttactttttcgttttataatactaatattttttatttccgatatttgttttgttcttttgagttttgaggacttgcgaccttctgtggcaatgagtgtctcattcttctcagatcttttgtccaaatacaaagctctacactttgttataatatgattattagatttgagaactattgattggattcttcgtatgttatttttcttattgattaaatctagcttgacatcatgtagattttgatcttaatttaaacttattcaccaaaagtgtttttaggttgctagagcgagcatagatgatcgtgtgtctgtatcacatcgaaagttactaattaagctcaatgtgaacaaatcatcttaattattaatgtgtgtttgttttttgaatttaaacaagagtttagaatctttaagttattatccatagactctcatcattattattttttgaatttaatgttaaattagattttaagaaaaaaaaacgtttttacaacttgtgcagtgatagattaagcaacattacgtttaaatttttttagagctttagagcttgtttagtatgttcctcttgtgctaaaccaaagttggagtcttttgtcatatcttctatcttcctcaaatcttattgccgaaagttggtttcgtatgtgagcatctatccacttgattagacgatttgctgggttgggaggattatcatgcttacgtccattacgctctcgccaaatagtatgtacgacccgactcataatatttttgggcctttggcaaaataaaattaaaactaaaaccttttaagtaatttttttaatataaaaatgggcttttttcctttaagaatcttttgaattttgtaatggacccatgacatttgcgtaatagtctaccatggattagagacagtcctgtgtacggatgcctgcagaactaatcgagctaggtaaccctccacacggtcattccactgagctgaagcttggctaagaatagtcaaccagtccgttaagaacctctacccgtatatatttttggccatggcctctcatcattagtcaagaacaaccacaatttcttcgcacgtttggtttcgcaagcaaccatttatgtcatatggctagagcgcgacaacaaatttcacaatagatttgtcttcaaccacggacacacaaccttcaaaagaccggataaacttattaaggcgacacaatcttcgcaagaaggaaaacgaaggccttcgtcggtgacttaatgcaaaatttttgtaaggtttttttttttggcaagccaagccttattagctagttaagtaaattacgacccttcttcatttcttaatatcacattcatataaaaaaaaaaacaagagacatggagaaaccattgggaagcatttctttgttggcaaatagatcacataggcaaataacataaaataacaaaaggcagaaagaagcaaattaagacgggagaaaccatcgagcatcctttagctttaagtgcgagagacttgggaagcgtgtgattttctttgtttcaagattgaacacacagatgtgtcggacccgacatgaaaaatccttttcacagttatagacacggtcgtaacgggtgaaatagatggttcgataccaaggggatggtcagcaggcacaatgatacctaaatccaaacgaaaggcctcatcgcctaaagaatatacctcaacagacacatacggtgtgtataaaagctcatccggatttggattaggaaccttcttatagaggcggaagccgattctagactcacaaacgatgctctcgactaacaaaacctctcctgatgttgtaacaacaatatttctatggctagaatacatcttatcatcactactcgaatgagaagctaggtaacgtggtggtaatagatcagtgttggctacaaattcattgtatgcctcgtaactctctgtgaattacatcgatatatgttggaatggtatggtaatgatcttccccgttcttgcaataggttatatagttggcacctgtatcgaaaaaccacacaacagtgtattcttctttattctcctcatctacccacaaaagacctctcaaattaaccacattctggtttctgtaaccaaagctaggtctagtaaatttctcttcgaaatccttatctcctattcgcttaagagtaaaaaggccttccactgagtctaaaggtgggagattgattctcttctcgctaaacaaatctatgatatagagattggattcaacatctaccgtgaggaacaagttacctgagtttgctaggaaacgagtctttgaaaagtctctctttgtattgtaaactctattatcttcttctggattgtatagcacacaaccatcttctggaaaaagcatcagccacgcagatttccttttcttgtgcgacgtttgtttcgagctcaagtaccaattcgtacacacgatcttagcgcggtggaaatcaacaaaaaatcaaacgttggaacacagatttcaagatattaagagggaggtccgaccatcggctagaattaggagtctccatggaattgatgaagaagtttaggaggagcagagcaagggttgtagcttcctctagtctctctctaattgaaatccctacttattgaaaaagaagaaagaaaaacaatgggccaaattacaagcccaagtagtatgaaaaaagagaataatgggccgaaatgttaactcacacccaacagttgggcctatttatgacgaaggtgaaacgcagatattttttttttgttttttttttttttttggtatttatgttattgtattgaagataaatttgatatttttatttttaatatgtagtatatggcataaattctcctctagtagacgaatcttttaccttatctctttgaatatatcttaacaaataattaaataaaatttaagaatattaattagagtgagatataggaaagtttgctcctaattttggtgacatggaaagagtatcttatcacatgatctatggattgacacaacacaaccgagctggtgtttggttctcttttctattatctcctaattattttacgtttaaagtcttaatttatttgttggtccatcattaccaaaataccaagttgacatttgtttttaaagttatttctctattagctggcacgagcctatcttctctgtcatttccacttggcagtatcataatgggtgaaacaatttgtgagaaacgtcgaactttgtttttgacggtgattacctaccactgcaactactactgtgtgagtacaacgaaggatgatgatgaagcatgtctcgaccaaactaatatccaataggaaaatgctcttattctctttatctgtcttcattaagtcatttgtaagtctttttccaaaatattataattctttgtaatgtattcgtatttttatggatcaatatattcatatttattacttctatgttttacaaattatatcatttaagttttttttccttacaatagtatcgttttatactttcattgcagtttaaaaaaaagaaaaatttatttttatctttataattttattttattaattataagaattttttttaattaagtgtatttataaaagttatagtaaaaatttacatagtatttttttttttgaaatatgtgaaaataatacttttcatgaaacaaagagagtatgtaacactgaatttactaaaactgaataaaaacactaaataacatattatattagttaaaatttaagaagtaataaaatattgaattactaaattgattatggtatcgtggtattacaaaaaaaaaaaaaattcccgggtttaatccatgtttagtgtgtaagactattttttaaacctacattctaacggcaagtttaatctactttatcacatagatgtctctctcgaaaggcgattctctgggcgattttcgccgttctagttttctccatcggagatcttttccgaccaggatagatcacggttttgatgtcaagatcttcactggcggttttaatctgtcaaaaatcaatgatagttactctcttccctcattttcgggaagtaaccaccaactaaaaccgccatggcctctcctatataaccaccgtgttcatccgattatgttctctctttctttgttctatcaattcgagtttaaactactatcaatcatgagtgatttccttcgaaaatctgttcaagaccttgatttgggtgttgacgatgtcccaattgttctatcgccggagtttgtttcccaagcggcgtcagtgaaccggttctctttgattgttacaacggtgaatccgagaaagcaaaatctgcgtgctttaattggccaaatgccaagggtttggggtcttgttgattcatgtgttggacggatcgttgggaacggaagggttcaattcaagtttcgtaatgaagagtcgatgaatctggttcttcaacgtggtccttggtccttcaatgactggatgttgtctgttcaccgttggtttccaaacatcacggagggtgaaatgaagataataccattttgggttcaaatacaaggtatcccaatactttacttgactaatgcaatggctagagtagttggaagcagactaggctatgttacggatgtggattttgatgaaaatgcaaatcaaatgggttttgtgagggtcaaattggcatggaactttgatgatcatctccgtttccagaggaacttccaattccaggaaaatgagaacaccatcatcaagtttcgatttgaaaggcttcgaaatttctgtaccaagtgtggatctctcaaacatgatgtgaaggaatgcaatttgtcctttgaagagtatgtccctgtcaacgtgaatgatgacaacgatgatgacaatcatgatcaaggacatgatgaagatgatatggctgcagaggattccttgcctagcattgatcctgcctctttgattccgggtttacaaggacacaacgccggtgccacaagtgtgaagcaggagggatcctcaagttctgttccatctgacttggcgagcgcttttgaggacacagagttgactgcagagagactgcgatacctccatgccaaacacgttcgggaaacattgatggatcatcaaagggaggctggactcctagaggaagtatctgacaatgctacaataggctttccatttgttaaaaggaagcgagtcagtttcgaaatgctctacaaccaggctgaagcagaagaagagtcggctgtcttaggacatattcgcaagagagataagaaagtgagtcttggagcatctgtctcttcaccactttcaatggacggaggcgcggggtccccggtacccccacagcccccatgaggatcggatcttggaactgtcagggcattggggtgccgctgactcaatcgcaacttagtaatttatgtaaagtatttaagtttgatgttttatttctgattgaaactttaaacaagtgtgaagttattagtaatttagcaagtgttttagggtttcccaatgtaataactcaacccccacaaggtcatagtggtggtttggccttgttgtggaaggatagtgtgcgtttgtccaatctttatcaagatgatcgccatatcgatgtacatatctctatcaataatataaacttctatttgtctcgtgtgtatggtcatccatgtcaaagtgaaagacatagcttatggactcactttgaaaatttatcaaaaacacgcaatgatccatggattttgataggagattttaatgagattttatcaaacaatgaaaagattgggggaccgcagagagatgagtggacttttagaggtttcagaaatatggttagcacttgtgatttaaaggatattcgttcaataggagaccgattctcatgggtgggggagcgtcactctcatacggtgaagtgttgtttagatagagcgttcatcaactctgaaggagcattcttattcccctttgctgagttggaatttcttgagttcacaggatctgatcacaaaccattattcctatctctcgaaaaaactgaaacaagaaagatgcgaccatttcgttttgacaaacgacttcttgaggtgccacacttcaaaacatatgtcaaagctggttggaataaggcgatcaatggtcagagaaaacaccttccggatcaagtaaggacctgcagacaggcgatggcaaagttgaaacataaatctaatttgaattcccgaatccggataaaccaactccaagcggctttagataaagctatgtcaagtgttaatagaacggagagacgaactatatcacatatacagagagagctcaccgttgcttaccgtgatgaagagagatattggcaacaaaaaagtagaaaccaatggatgaaagaaggagaccgcaacacagaattttttcatgcttgtaccaaaacaagattttctgtgaatcgtttagtgacaattaaggatgaggagggaatgatttatcggggtgacaaagagataggggttcatgctcaggagttctttacaaaggtttatgagagcaatggtcgtcctgtttcaatcattgattttgcgggtttcaaacctatagtgacagagcaaataaatgacgatctcacaaaggacttaagtgatttggaaatttataacgccatttgtcatataggagatgacaaagcaccgggtcctgatggtctaacagctcgtttctataagtcttgttgggagattgttggtccggatgtgataaaagaggttaaaatttttttcaggacatcatacatgaaacaatcaataaatcacacaaatatatgtatgatacctaaaattacaaaccctgaaacactttctgactatcgccccattgcattatgtaatgttctctacaagattatttctaaatgtcttgtagaacgactaaaaggccatctagatgcaattgtttcagactctcaggctgcctttatcccgggaaggttagttaatgataacgttatgatcgcacacgaaatgatgcactctctgaaaacaaggaaacgagtctctcaatcctatatggcggttaagacagatgtgagtaaggcgtatgatagagtggagtggaattttttggagacaacgatgagactatttggtttcagcgagacatggatcaaatggataatgggagcagtgaaatcagtcaactactcagttttagtgaatggcatacctcatggcacaattcaaccacaacgtggaataagacaaggagatcccttatctccatatctcttcattctatgtgctgatatactcaaccatcttattaaaaacagagtagcggaaggggatattcgaggtatccgaattggtaatggtgttcctggtgttactcatctacaatttgcggatgactctctttttttctgccaatctaatgtccgaaactgccaagctttaaaggatgtctttgatgtttatgagtactattcgggccaaaaaattaatatgtccaaatcaatgataacgtttggttcacgagtacatggcaccactcaaaatcgtctcaaaaacattcttggtatacaaagtcatggtggaggtgggaaatatcttgggctcccggagcaatttgggcggaaaaaacgagacatgttcaactatatcattgaaagagtaaagaaacgaacatccagttggagtgcgaaatatttatcaccggcaggaaaagaaattatgttaaaatcagtggcgatgtcgatgccggtgtatgcaatgtcttgcttcaaattaccattgaatatcgtttcggagattgaagctcttttaatgaatttctggtgggaaaagaatgcaaaaaaaagagaaataccatggatagcttggaagagattacaatactcgaaaaaggaaggtggtttagggtttagagatttggctaaattcaatgacgctttacttgcaaaacaagtatggcggatgattaacaacccaaattctttatttgcccgaataatgaaagcaagatactttagagaagactctattctggacgctaaaaggcagagatatcaatcttacggatggacttctatgcttgcgggtttagatgtaattaaaaaaggaagcagattcattgtcggagatggcaaaaccgtttgaatcagtcaagataattttattgcatcgcaccctccacgacctctcaacgtcgtcactcctacgttggatatcacggtggatacgttaatctcaactcagggttcgtataggtattggaacgcacatctcatttctcagcttgttagtcccgacgaccaccgttttgttatgaaccatcatctttccaggattgtgcatcaagataagctagtttggaactactcttcttctggggattatacagttaagtccgggtactggtttctctttaatgacccaacgaatatttaggttagaccagtggtgcctcatggttcagtggaaattaagaacaagctttggaaactccctattattccaaaaatcaagtacatgctttggcgtacaatctcaaaagcattaccaacacgctcgcgacttctcactcgaggaatggacatcgatccacactgccccagatgcccaactgaagaagagacgataaaccatgttttatttacgtgtccttatgctgcgtcaatttggggtctatcaaacttcccttggttaccgggtcatactttctctcaagacacagaggagaatatttctttccttatcaattctttttcaaacaatactctgaatacagagcaaaggttggccccattttggctcatatggagattatggaaagcacgcaataatcttgtgtttaataagttcagtgaaagttgctcaagggttgtgacacaaactgaagcagaagtcaatgaatggttacaaagtgtgaaccgaagagaggacgcttccgttttaacacgatcatcacacagggcaaacgtgcggtggaagaaaccggtctttcctttagtaaagtgcaacttcgatgcgggtttcacgggtaataatactcagagtacgggagggtggatcatacgtgatcatgcaggattagcgaaggcttggggatcatcaatagtctaaaatggtaccactgctttggaagctgagacaaaagcgttattaatcgcaatgcaacaagcatgggtacgagggtataagtgtgttcagttcgaaggtgattgtgagatccttatcaaggcaattaatggtgcaatttctagatgtgaaataaccagtcttctccgagatgtggatttttgggcatcaagattttctactgtggttttcactttcacaaatagactctgtaataatactgctcacctcttagcttctccactttattcgtgttacaagtttcaatcgaattctggttatcagccactttggctcaaaaactctctttgtaaagatttactcatataaataaattctgtttgttggaaaaaaagaaaaaaaaaaaacctacattctaaatactgaaaccataaaccatatggtaaaaagtggataaatgctcaactatctccatttcaatatacacatcataaaaaagatttatattcaatttattgtaaaatgaaaacttagattgcattactttttttaactctcttctctaatttaatttactatctaaatttgtgagttcataaaattttagattgagaacaattcatcagaaattctgattcagaacagtacaaatcttgtcatgcaaacttatctatcttgtaaaatctatctatcacttgtcgtcactaagtacaaaatctattttagtttgttttttttgtgtgtaagaaaagtttttttatttaataatctatcaccaatattttccaacacaacatgaccgttatctcctccaatctaaaacttaattacgaaactacccttacctctttcactgactgactcgtctccttctccacttggatctcaaaagtccgatccaaaaccaaatccgccataactctctctctctctcccacttcccacagagagacacattcatgccagcaatgccaggtctcgtctcagtcaaaactccttccgatacaccgccgctacgtgtagccgtaccagacacgcaacctctctcaaacccgccgcgaactccgatgaagaaaaccccttcctctacaccatctcgatccaaaccatcaccaaatagatccaccggcaaaaaagattccccaaccgtatcctcctccaccgcagccgtaatcgacgtcgacgatccatctctagataatccagatctcggtcctttccttctaaaattagctcgtgacgctattgcttctggtgaaggtcctaacaaagcattagattacgcgatccgagcaactaagtcctttgagagatgttgcgccgccgttgctccgcctattcccggtggtagcgatggtggacctgttcttgatctcgctatgagccttcatgttctcgctgctatttactgtagtctcggccgatttgatgaagctgtaccacctcttgaacgagctattcaagtccctgatccgactcgtggccctgaccactctctcgctgcgttttctggtcatatgcaacttggtgatacgttgtctatgcttggtcagattgatagatctattgcttgttatgaagaaggtcttaagatccagatccagactttgggtgatactgatccacgagttggtgaaacttgcaggttctcttaactaagcatttaatggttaattaaactcttagattacgtttgctaaaagttactatataggttagatctaagtttctgaagtctctgataattttcaggtacttagcagaagcatatgttcaagcaatgcagttcaataaagcggaagagttatgcaagaagactctagagattcaccgagcgcatagtgaacctgcttcactggaggaagcagctgataggagattgatggcaattatctgcgaggctaaaggagattatgaaaacgctcttgagcatcttgttcttgctagtatggctatgattgcgagtggacaagaatctgaggttgcatcgattgatgttagtattgggaatatttacatgtcgctgtgccggtttgatgaagctgtgttttcatatcagaaggctcttactgtgtttaaggcttctaaaggagagactcatccgacggttgcgtcagtgtttgttagattggctgagctttaccatagaacagggaaacttcgtgagtctaagtcttactgtgagaatgcgttgaggatatacaataagccggtgcctgggacaactgtggaggagattgctggtggattaactgagatttctgctatttatgagtctgtagatgaacctgaggaagcattgaagctacttcagaagtctatgaaattgcttgaggataagccaggacagcagagcgccattgcaggtaaattttttgtccataccatgaatgttcctttagctggattgctatgcagtgtattgaaattgtgcgattttggtctcgaattgtatgtaaagtactgatttttgtattgttaatcatgtaaggaaaagtcgcttatagtaactttactcgttttgctgctctgaatctaccggttttagagttagccaatacgctaatttgtaattgtgtgttagtgatattgtcgaagaattctagaaataagagatctaattacttatctgaggtatttttagggaagtagattgtgatcgtacaagaattcgagtctttagcatgacattgtcaatcttctcgtcaagcttcctttacatctgttttgctttgtatgtaaatatttgcagggttagaggcacggatgggagttatgtattacacagtggggaggtacgaggacgcaagaaacgcgtttgagagcgctgtgacaaagctacgggcagcaggtgagaaatctgccttcttcggtgttgtattaaaccagatgggactagcctgcgttcagcttttcaagattgatgaagcgggtgagctgtttgaagaagcaagaggtattcttgaacaagaacgtggaccgtgcgatcaggacactctcggtgtttatagcaatctagctgctacctatgacgctatgggaaggtaaagtcctaaagaaaactatctgactatgtaattagatcagacatccttaatgaaacattaaagtctttcttcgtgatggctatgtaatttgcaggatagaggatgcgattgagatattagagcaggttctgaagctgagagaggaaaagctcgggactgcgaatccggattttgaagacgagaagaaacgtttggccgagcttttgaaggaagctgggcggtcgcggaactacaaagccaagtcgctccagaatctgattgatccaaatgcaagacctccgaagaaagagtcttctgctaagaaatggcccagcctcggtttcaagttctgaggaaaaaattatcatataaaataaatcatccacatatatattcaatattttattttattgttattgttatattttttatctgatctattttctgtatcataatctgaggttgatgaattaatttcatgtatagtgtttttatttgagtttggtgaaatactgccaagatggtgagctgtttgtttgagtttgaaatttctttaattcaatcacttttttcttcttctgataattatattttctcgtgaatgtttgttctacgtgatattttgtacaaatatgaagtaaaatactaaaatgtgataaaatctatcactaaatgcattttgaaaactatttattggatgtatcctttaatattttgtgcattcatgtcttgtctttttatcgtaaacagttgtatctgttaaaatattgggggtatttttttacaatcgtgtcttttcatcgaaaacagttgtgtctgttaaaatattgatggttactttattacattcgtatttttttaatcataaacagttgtgtctgttaaaatattgatggttactttattacattcgtattttttcatcataaacagttgtgtctgttaaaatattgacgattattttttttacaaccgtgtcttttcatcataaacagttgtgtctattaaaatattaacagttactttctacattcgtgtcttttcatcataaatagttgtctgttaaaagattgacggttactttttttacattcgtatatttttatcgtaacttttggttaacattgaaagttatttttttcgttaatgtctttttatcgcaacttctcgtaaaactgattttcatcgtaaacagttgtgtttgttaaaatattgacggttacttttttttcattcatatctttttatcgtaaacagttgtgtcgattagaatatttacggtttttttttttttacattcgtgtctttttatctttatttttggttaatattgacggtcctttttttcattagtgtctttttatcgcaacttttcgtaaaattgtatttttatcgtaaattgtgtctgttaaaatatcgatggttatttttttacattcgtgtcttttcatcataactttttgaaatatagttaatttttctattagcgtctttttatcacagtaaaaatatttagggttatttttcaattgttgtttctctttattgcaacttttcgttataatattgataattatattttttgtttgtgtctgttcatagcatctttcctgacgaatagttgtctacttaaatgtttgtaattgttgaactgtatctattcgtcattcttcttaagtaatttctaaatatttgatctttaccataaattatttgctttatgatgaatctaaaaaattgtctttgcatttctgaacggttgtattttattatcgcaacatttggttaaaatgctgacggttatttatgtgttcatgtctttttatcgtaactttctgctaacattgacgattattttttttgttagtatatttttatcgcaacttttcgtttgtatcagtcattttaatattgatggttagttttcggttgggacaactactttttttgtttgtgtctttttatcataaatttctatttacattgacggttattttttcgtttgtgtctttttatcgtaacttcgtaaaacaattgacttttattttttcttggttgtatctctttattgcaattttccgctataatattgatggttgttttttggttgtgtctcatttatcgcaactttccgtttaaatattgacggttatttttttatttgtatcttttcattgtaactttccgctaatattgatagtgtttttttcgtaactttttcttagtgccttttcattgtaacttttcgttaacattgactgttattttttcgttaatatttttttattgcaaacttttataaaaatatctacatatacatttttgcaaccattttgtgaaataaatcctcaagttgagacttatttacagtggctgccactagcatttaataattgtttttgataattagaaagtaaatcttggaattaaatatttgacatttaactatcttcccaaaatctctatacattaactacacgattagttactaaaataaaacttccaaaatatttaacatcatttaaaaattacaaaattatcatttttgatattgcttttttgcataactataacaatttgattataagcatcaaaccgttgagatatttgataccagttaattactacaaaattagaaaatatttagacaatagttcataaacatatcataaataagatcaacattaataaaataaatagatttttttacgtgacgggttggcgggacgagtttggcaggacgttacttaataacaattgtaaataataaaataaaaatattttatagatagatatatcgctggttaaaatctagttgaaagttatttttacttggttgtgtttcaataactttaaataattataaatttatcttttaataaactttcaatatatctaaatgtttaataaactctaaataactataaatttatcttttaataaagtataatattaataatgttttaaaatttttaaagtaattagaattaatggaaatatattagataaagaaatgctagtaattaagaatattaattaattgataataattaataccaatgacattacttataaataagttttaagctgaatattggttgacaaaaaaaaagagttctaatctgaagattcattttattaaagtgttgcaaaaatgtatatgtagatttttaaaccaaaccaaaaaaatttaaaattattcatgagatcacggtggttttacaacatggctacgctttaacccaaaaaaataggcttttacactaaaccaaaattttaaaattctaaaattctggttaagctcaagctttaggctttcacacaaattacacaagggaattatgacacacacgtgtacaaagctggaattgaggttttattttcgaaacggatctttgatctttgggatcatttttttctatatgaccgtttgaagaagaattataacgttacaaagtctctctctctcatttctctcgttatttcaaatccctagatttttattttcggcaaacatctgaagaagtttatgatcaccgacgattgttttctccggcgacgattcgacgatcagacaatcgattccctaattcagatggttatgtttctaattttgtgtttctttctattaatttgattcgaatactattacgatgtctctctgttacttcgttttcccgaatcgtgacgttaatccatctggttttatgagtctggaggttgattgattttgtatttcatctgatggatacttctgatttgtgatttttttttaaaaattttttaattaggttttgaaagatcattaacgatcgcgaaactttacgatttaggggattttgtttggatggtcgtatcatcaccgacggtggaagatggcggtagatacggagggcggtggagagccgtgagggatgaagttacggaggaagcggtggtcgtggctggtaatcgaaacaaagtgggttttgtggctctgtttttggtctacatattgctcttcttcttgttctgattcttttggattacttttttttttgatgtaacagatcgttgaagtcttctttgcctgaaagaagaagaagaagacggtttatcttcgctctttgtgattcgagttttcttttggtaaattgaattcccaaagtcagaagttactttgaaatttttgtggttttgttaattctgaaggtctaatcatctgtgatctctctactctaagagaagattatcaaagatatgagcttctctgcatccctttttccttgttttgatctttctcagaaattttcttttatgtgaagattaactataatatggtggtgatactatgatttgggaatcaaaacaaattcttttgtatatatggaatgcatcaaagttgtatatttagtgctcttgttccttattggatacgttcatttgatcatattatatgtagaactttagattcaatatcattcatattaacatttccggttcaaatttgattttctctggattgtttttggtaggatgtcaatctattcactttctggacggaggagacactaattgaggacaaatctttatcattttgcacttgtaatggagaaagatggagaagattgttttctttctacaaggtatcatctcgagtcactagctaccttatttacttgtaagtgctttaacatactgcatgtcgtgttaaaattcagttgctgatgattcttaaagaaacgtcggatatggagaatctgttacaaatggttcacctttcaggtttgttcatggtttgagagtcaatacaaacattccccagcagaaatcgacatgttttagtaagataaacatgaatgtatcaaagtattgtaaatttgatgcccttgttcctaatcagatcacttcgttcatatatttccgtcttgaattcagttaacaaatttgtattttcaactgggaaggagcttgaaaatatagaacaagagaaggaattagaccaacatgttgtaaatttaaaattccctgtgctaatatatcagccaaccacgaactcacttgtaagtttctgtttacttatgtcatgctaaagtgtattggataggtctttttacattatttcaattgtatcccgttttggattttttagcatacttgggtattgatttcagtggttcttaacctatatagtaagttatagtttgtgttgtgctctcatattggactcatatagtgtcgcgtacatgtcatacaccgttatgcttatttcagatatatcgcaatggagctctgaaatggttgtgcatcatcttaatggagttctgaaatggttgtgcatcatcttcttgtttgttaagttgactccttctcccaattatgtatttttgaacctttctttctaattagttgttcaagttacctttctctcttctgtttcacttagaagtgctgtgtttcaggggattctttcaggttcctaaagtatagtttaagaaagctggttgtatcagatagcgagcttaactttgtgtgtttgtgagttctgttttaccaaatcctatgcaaattatgttgattctgtcattatttttcacattcccaggcatcagtctctggttatcggagtgtcttgaggactttttcttaattaccagcatttgttgcgtcttatgagatcaatcttcaggtaaaactccattaattgtagatgataaattatataattatgaagtgtttcaaaattttactcgtctctacatttttggcagctgaaagatacatggagcatcaagtgaattcctccaaagaaacagatcattgggaagagccgttgtctgaaggatgaattggtaagcagacccaaagttgtatactttgttgtttacttactggctatctctattttttgtttgcctttttgcttaatgatttaattcctacgaacatgtcttgtttctttaactggcttccttgttttctcttttttcttcattgcttgtttgtttcttcattggttccatgcgtgcttgttgaattccttcctaggtttcttgtgtgcttgttgatttctttcctatgtatcttgtgtgcttgttgatttctttccttggttccatgtgtgcttgttgatttctttccttggttccatgtgtgcttgttgatttccttccttggtttcttgtgtgcttatttgtttccttccttggttccatgtgtgcttgttgatttctttccttggtttcttgtgtgcttgtttgtttccttccttggttccatgtgtgcttgtttgtttccttccttggttccatgtgtgcttgttgatttctttcctaggtttcttgtgtgcttgtttgtttatttccttggttccatgcgtgcttgattatttttttcctaggtttcttgtgtgcttgtttgtttttttaatttcttccatggttacttgatttgttgttacttctttgctttcttcctttgttccatgcatgcttgtgtgtttcattctctgtttccttgcgtgcctgtttaacttcttgcttagttgtttggttcttgcttgcttccttgttttcttctttcaatccttactagcctcttgcttccttgcttgttttctcacttgctcctttattacatgcttacttaatttccttatctactgaacttgtttgacctttttatcattttcttaatcttcttacttactcacttactcaaaactatctctctagcttgtttctcagttgaattttatttagatagttctaggtctctgtttaacaatagtatagatggaagactattgagcgtttatcaacggtttcacacgattccagttatacaataatggaggtctatgatcattcttctctctttacgtcctcattgatcaggtgattgtggggcttttatatgtatatgtccatgggttatactaatatacaaggtgatctcatctgtacatttgcagattttaatttcgtttgcaatttttgcaaccagtttctgaagcaagagcctcatgaattcctggggaccatgaaacaaggtactcctttttttgtaagtccctttttgaaagatatttcttcatttgtatttcttcttctctctaatctttatcaaatcggtctttctcatcattctgattttttttttgtttttgcctttcttctatggcattggggtttacaagagggaaccctacttttaaaaggaaagaaacattggcaatcctcatctctggatttctatcaaatttgtttttgttcctttcttctgtggtattgagggttttgtacttccgctggattacgagagggcactcaagttttcaaaggtatgaaatcaagcctagaatttttactcttaattgaattcaatcattgttctgttttggttttgtatcttctttatccataattacagaggcgaatgaaaagatttaggtgtttttggtgaggcataatggcttcacattattgtaagtcttgtaatttttaattatgtatgtgttcatgtgtgcatacattcatgtgtgcatacattcatgtgtgcatacattcatgtgtgcaggtttagaatttagaatgaaggttttgtatgtgttcatgtgtgcatacattcatgccttatgtgtttgaatttagaatgcaggttttgtatgtgttcatgtgtgcatacatacatgccttatgtgtttgaatttagaatgcaggttttgactggttagcgtcataaaggtaatagtcttggtcatcgtgatatgccattagaatttgatgcttctctgaggtatgtcatttgtttaactgttactagttaaaatgcattactgaggtttgttaattggtattattattatcttttttctttgcatggactttaggtatagaatatttggtgaaaaactctcgcggttattttttattatgttagcattcggtgtttcaagagtacattgatgaagtttgcgcctgaatgggaagaataatttctcacatccaatgtgtgatggctgctatagttatgagacaaggtacgaaatttatttttttggtctcaagattttttccgatcaattttgcagtcaccctcttagcaaacttagaatctttcttgatctcttagaatcatggagactaattttgctacttattccttcttttttttcaaaagttcttaaacagaccgtaaaagaagggaatgcatcaacgaccttttagcatgaatagttagtctcccggatgattaggattgatcatagtagaggtatatcgttactcttgaaaatatttcacaactcatttgtttttttgcataaacgtaactccaaatttcagaagatatgagaagtttgatgttccaatggcctacactatagagcaacaattattgatgttggaatagcttggtctgcaagtttttaccgctaccatttgttcttgacttctttcatgggttttggttagtatatgcaggtaacaattacttttgtttttgttgagctcaaatatataccactcatcataaatactgatctatgggtttttccttccatgttcggtgttgagggatttgttcttcggttggtttacaagagggaacttaactatgaaaaaggtaagaaatattggcaatccccaactcttgatatctatcaaattcgttttccttatcattcattgtggttttgttttgttttcttgtgttgtattgagggcactaaatcttttaaagataagaaatagagtctagatttgacaatacttgtctatttttttatttctattagaattcaatcatcactctgattttggttctactttctttattcgttaaggaaaacatgaatgcagatgtatgggtcttgaacttagctaacaaatgtgtattttctaacagggaagaagcttggggaaaaaaagaacaagagaagatcatgatcagctaaagttgagtaatattgatttttttaatgaattatgttactattctgcatcgtctctccatttgaatcttgagattgatttaagtgtattaaaatgtgttacattgggacctcagatagagtatactggagggagctactgattcagaagatgctcatcacaaagacttcctttacgcttgttagacaatagacaccaattttcttttctttcagtttaattttcttatttgtttggttgtcggatcaggttaaaagataccacgaactctcctagaaaaccggagtatattgcagtagcaggagcagattgatgtatgttttcatgttcttgatcacaagtaatttcatttgtttgactccaacttcaaatctttttttcgtagggtattatttattataactaagttgctaaaacctttttcaggattgtgaagcatgaacacgagtattggaaatatgtagaggaaggtaacttgttatggttaagcttattatagttttgcctaattctattagttcttatgatcctgatgcaaacttgatgattctcttgtttggttctttcgtttggtcttaatttatctcaggagcctgttcgaatcaattatgcacttactttcttactgaaatttagaatgttcattagatctcaaagaaacttgttgaactcagtttgcttcttgttccattaggttaaacctgagagagacactactttgccaaccgagatatgccagaaacttgaagaccatttgagctagtgagatcaattagaggaccagattcatccaatcattgataagagccagtaccaacctgataaacgagatacagcaacatctatgtcagcccacaaagcacgaagagtacttgatcaacctcttccacatccagtttcccgaacccggaaaatctgcatcccaaaacaaaatatagctgcattcatgcatacatccatacatgcatatatccatacatgcatacatccatacatgcatatatccatacatgcattcatgcatacatccatacatgcatacatccatacatgcattcatgcatacatccatacatgcattcatgcatacatccatacatgcattcatgcatacatccatacatccatacatgcatacattcatacatccatacatgcatacattcatacgttcatgcatacatccatacatgcatacattcatgcatacatccatacatgcatacattcatacattcatacatgcatacattcatacattcattcatgcatacacatgcatatatatttgctttcttgatttattgattagatcattgcttgctactttagtacatttgctaacaacttgttcttgtttgtttcttgtgcttatctcagtttgtaacgtgcttgcttgtttcttgcactgttcactttattccttctttgtttcattgattatttgatcgttgcttgacttgtttgtttgtttccttcttggttccttgatttattttacttcattgggcagccttcttcttggatactcgcttacttaattgtttcaatcaatttctttacacactcgtttgcttgtttccttctttgatcatttggtttttctttttcttttttactttcgtcactatttcttacatgaacttctctacttgtttcgttgtttgcttacgattttcatttggttactcgctttcttttgctttctttacttcttacatagttccattgcttgcttagacgtaattgtttaagaaaacatctccacaacatcctccttgttcttgcaaacttcattacttaattccgtttatgcgtatctattaaaatatctacaactctttagcgaaactttataatccacactatacaatttaatttgctttatatgacatgtttagcaaaaaaaaatacaatttgctttaatttggtttttatcccctttttccattggattattattatctttacaaaaaaaagaaaaataatgttttgctctgacatgttctaaaacttgtggatcaaaatattagtaaataaaaaacttatatgattaagtattatttgacacatctcatgatctaaattaaattccattcccctttcatttccttaattccacaatatgcaattgtattttggttttttcccccttaattattctttttatcgggactttttgatatatggttattttttcataagtgtctttttcgtaactttctgtaaaaatatttagggttatttttctgtcattgtgcctctttattacaactttctgttataatatcgatagttatctttttcgtttgtgtctgtcgcatgtttccttatgaatagttgtccacttaaatatttgtaactgttgaactatatatattcctccttcttcttaagtaatttctaaatttttgttctttaccacaaattatttgtttcatgatgaatccaaaaacatgccttttgcatttctgaacggttttgttttattatcgcaacattcatttggtaaaatgttgacggtcacttttttttgttcatgtatcttcatcgtaactttctgctaacattgacggttattttttccgttaaatacttttttatcgcaatttttcgtttgtatctttgtcattttaatattgacggttattttttgttgtgttttttatcgcaacattttgttaaaatatttacaattacttttttagttagtgtattttcatcgtatctttctatttacattgacggttattttttcctttagtgttttcttatcgcaattttttatttgtgtctttttatcgtgactttctgttattatcaacagtttccatttgtttctttttatcgtaacttcgtaaaaattatttacagttatttttttggttctgtctcttttatcgtaacttttcgtgaaaatattgacggttacttttattcatatcttttcatcgtaacttttcattaatattggaggttgtttcgttagttatgtcttttcatcctaattttttattaacattgattgttatttttcttttagtgttttgtttatcgtaaattttcataaaaatattaaaagatatttttctttggttgtgtctctttattgcaattttccgttaaaacattgatggttatgttttcgattgtttcattttatctcaactttctgttacaatattgacagttactgttttcgttgatgttttttcatcataactttcccttaacattgactattatattttttgtttttgttttttatcataacttttcataaaattattgacagttattttttctcggttatgtattttcgttgcaactttccgttataatattgacaattatttgttgcatttgagtctttttatcgcacttttccgttaaaatattgacacttgcctttttccattcatatcttttattggtacttttggttaacttagttacaattattttttctatttgtatatttacatcgcaattttggttaaaacattgattattactttatttgtgtctttttatcgtaattgtccaggttttttctgtatcatcttttattgcaactttttataaaatattgatggttttttttgaataattattaaattttataacatataattttttaaaaataaattattatataaatattttagattatttcccgcaatatcgcgggggtcccaatcctagttattattaatgttaactaatatattgcgttgaatggtagacatgtttttcaggttttgtaaatgtgattccactgaatacatatcagtataccactcacaaaaactagattggatttataagaaaattattaatcaaaaacaattcataaaattcaatagtagtaatatcggagagaactaaattatggtaatgtaatgatgaaaggatacttatttgaagttgaaactagagatgtccctttttttttttttttttactttattagtttacaaaatcataattcttgtttacaacaaacattcatgagaaaacttggacacgaatgatacagataccacaattgagtacatatttttcatttttgggtatggtttcggtttagtttgaattggttaaactagattacatatccttaatgaaaactacgtactgtgcaaaaacattaaagactttctttgtgatggttatgtaatttgcgggatagaggatgatttaattgagatattagagaggaaaaacttgggacttcacattcggctttgaggacgagaaaaagcgcttggtcgagctcttaaaggaagatggggtcgtgttgctccaaaatctgattgatccaaacgcaagacctcccaataaagagtcctctgctaagaaatggtcgagcctcggtttcaaggaccctagccccaagaaaaatgtaaggtatatcctcaaacttgcgttccaagcctccatttattctctttggaaggaaaggaatagcagattgcatacagttctcattacaaaaatcaagaacaatcattaggtgcaaacttgatcctctcttgctctctctagagttcaagagaactctcctaacgttatatcctttttggtcacttggtttgagttgtttcagtattagcctattaggtgttcgcaagtttggaaatatgttttcccttgcttgctttcgatgctattgtgcttatttaatggaagtttagttattttttaaataaacgttatgagtaaaaattatcatatataagaaatcatccacatatatattcaatattttattttattgttattgttatattttttatctgatctattttctgtatcataaatctgaggtttatgaattaatttcatgtatagtgtttgtatttgagtttggtgaaatactgccaagatggtgtgatgcttgtttgagtctgagaatttctttaattcaatgacctttttttatacatgttataaaatattatggatacttgcaagtcttctcctatttacttgtacaaatttgatttttgattcagctactatgtgacttgtatgacaaatacagtcgaaacttaatatgatattcggtacccaaatgacaaaaacccacgtacatcaaaagcagagaggctttataagaaatctatgactatcaattttattttttcccataaattatatgcatggtagaaatattatgaaatgagtttccttaactatggttggcaactaaaaatgtctttagtgacaaaaatatgcaacttttctacaaactgcaaatattagtttagattaaatcaaacaaatcatgccttcaaaaatctgtaaaacaaatctttttatttttaacgccggtggcaccatagacgaaatcgacaattttgaaggttggagttggatttgtctgaattttttttttattggaatttggaaagcagctgaaagatgactaaatgcgcagcaaaactcttcattcaggcttggcgtaacttgaatttgttttctttcttctatttttttagtttcattctagtttccgatcaagtcttatggttaaaatactcaattatatactcatcatttaggcatcgaaaacggtcctaacaaaacaccaaacatatattcctaggctttcacgtgtttaattcttacccgcatgatacatttccctcaaatggattgacataatgctattgttgttaactttttgtttgacacaaaatctatctagcaaattttttatagttatagatttaatatacgcaatgttagcttgattttgtttctaacttaaggaaaagttgaaggatgttttaatttgcaaggttctctttcaaaaagatttcgtgtaaattcgacaacggcctcaaacctactctaatcctgactctaaataatattataggttgaaagctttgtaattattgtttactaaaataagagaagaaaacattattacttactctcctttagaaatatatgtttgcattatgctgtatatatagatgaataaatgccataaacgtttaaatgtgtgttggtagatgtcattttacttcattcttagaggtctcttctatcaaatttagttacgtatataaatatagatgtcttgtgctttcttgcaaggaaataaacagagataatatactatttcatacacatccacacacatatagatgtctttttgtttgttgcatggatgtagacatacatccattcacatttccaagtatatacactaacctaatgacctaatgttcttgagagagacttctttcacaacctcttctagaatgtgagtttcttatatttttgttggtataaagtatttgaacatctttatcaaaagttaaaatgtttgaccatattcttggtaattcaaccggtaagtaaatgttattcttctatgacagaacccttaattttgcctgttgtatactagaggtttggttgggtgaaaagtgggcatgataaaaagaacaacatttagttttcctccttgatttttctaaattagagtttcgtatcaaaatacctaaaaaagcttgttttgtggtgcttccaatttcgaaatcggctaaactttttccacatgatttcttcttttacgatagtaagatttagaagaaaataaaaactgaataacgtcagattttccttaataaaagaagaagaaaaatctcacaacattttaagttcctttatttttttgatatgtgccctaataaatgcagtgaaataagctcacaacaaaagatgcacaacgagataaagccaaatgaaatttagtactggtatacaaattttaatgacacgttaatactctttttcgttttggttttataatcgtacttaatattcataactagcttcgaatctggtatttgtatacttaaaaagcttacatcagccaatctactatcattgaaattgtagtgagaaaatctaatataattctttagtgactgtttgtcaaaaaaaaaaaaaactcatgtctaaagtacataacaaattcaaattttgatacaaaattagttatttgtatttgttgtgaccatttctattctacattttgtttgattattagttgaattattcttagttaaatagagcaaacaaattaaattaaatgatttcttaatctataattactgtaaatacttcaaacatcttttaaatagaaacaaataaaataattactaagacatttgtccttatataagtctaataaatgtgtgttttaattcaatacctccaaaaataatttcaaaaaactagagttactgaattggtgctttcacacggtgcatgcattgtattcacacctatatgcatgtcatatattcatggtctctatgatctcgctctatataaacaccacccaatcgaccaaccttcttctctgattattttctcaaattatttaattaatttcttcttcttcatcaccaccaattacactcaaaattatggtgtttgcacatttgaaccttcttcggaagattgtggggattataggttagtccagaattttgacatctacaagttattatatctatcatgatttttttgtcccttcttcttaactttggatgatcttgtttgcaggaaacttcatcgctctatgtctgttcttgtcaccaacgtaagtattttgctatatctatgatttaaataaaattccagaaacaatgaaagatacgtgaaaaagagattcataaaaacgaaaatcgtatttcttaaagaaaaccaaacttgtttcatgaatttaacacatgcatggttcatcctgactactgaaagatctgaaattttttgtttttcattctcactgcagctttcaaaattttctttgtgtagtataatcacaatgtgaaaattgatacttttttcctcataatataatgttttttcctattatactaattgataacaattaagaaagtttatttatgtaatagagtttcttccaaaacaagagaaaaactaaaagtatgtatcatcaataaatgactaatacttttaataaatgtctcattacatcaggccaacatttgttcggatagtgaaaaagaagtcagtggaggaatattcaccaataccgtatttagcgactcttataaactgtttggtttgggttctttacggactaccaacggtgcatccggacagcacattggtcattacaataaacggcacagggatcttgatcgaaatcgtattccttacgatctttttcgtttattgtggccgccaaaaacagcggttgataatatccgctgttatagcggctgaaaccgcgttcatagctattcttgcggttttggtattaactctccaacacactaccgaaaaacgtactatgagtgttggaatcgtatgttgcgttttcaacgttatgatgtacgcttctccattgtctgttatggtacgtaacgtttcgtttttgtgtttaagattttaaaagcttttgttctttttagagaagttattgtttcctctttaactcttttccctatttttgttggttcatgtattattttttgtttgactaaatgatgataggaaccaaacactacttcattaaccattctcatctttttgttgttgtccttgcatgaaatataaagaaaatggtaataaaaacaaaaagtgtggagttcatgccgttttggttatcggtagctggatttctaaacgcaggcgtttggacaatttatgctctcatgcctttcgacccattcatggctgtgagttttgttcacactctctttcattataatttcatgtttcacctataaaactatattaactacttatgtgacaaaaagaaaaatgtatatgtacatgagtaaagaattttcatgaaataaaaatctaagcaatttgtacattttacaactgttgtttttctataatgggtatttgcagataccaaatggaattggatgtttatttgggctagctcaactaatattgtatggtgcctactataagtccaccaaaagaataatggcggaaagagaaaaccaacctggttacgtcggtttatcaagtgcgatcgctcgtaccggatctgagaaaaccgcgaataccaaccaagaacctaacaatgtttaatttggtctagtgttattaaacttcggattatgggatttttttcccatccaagactcttagtatatgaataagatggaaactttcattactttgtttttctttttgtctaaaattccattactttgttttaaaattcaaactttgtaatgcaattttgacgtcccttttttgaggagcaataagctacttttcaaagtttctggtgtaatgttcaaacttttatgattatgcggggttaaattaaaataaattagtcgtcgtcattagtcaacgtgactcactcactccactctcaaattttgaaatcaaacagctaaaagctattctcttctccgaggaagaagaagctatagagaattggaaatgctctaatgtttcaaatagaacctggttgcaaattcatatggtcaaagccacgcattgacttttttcatcccaacccaaatcctcatttacaaataaatccaaactctaagaaaacacaacaatgttcacaaaaacacaaacacatcttcaatatagcaaacgcataacatttaaacctactatttgtacacagctttatgtcggacctactatttggtccaagaaaataattcgggacttatagacataccaatcaaaaccaaagcctaaagaaaactaatccacataaactttgcaattgcaactaactgattctatacatgagtagaataaatgattatgcactttgtaagcaggccattagagaatagcaaagttatcttgataaagttttccccaaaagtaagcttgtctacattctacagcttctctagtatgttttgattaaactcatcaagaaaatcagcatcaaatgcttcatctaagctatactcaatgtctagtctagcttccgttagagacgagacatcaactaaattacatggccagtaaggaggaacagtcgaactcagactacgtagatgtggtgctacaatacatatctgccctgaaacccaacaattgctatagatttctaaagttctcaaacgcaacgttttgctgagatcaagaaccttgaagttatagcaacggacaagatgcaacgttaagcttttgagaacaggacaaccagaaaaagaatcttaggcatagtagatgtaaaacctcgaccgcccctatcagtgggcctcacgtcttctctcgggcctatgggcccacccttgtccgctagtccgtgcgccgcgtccgaaaagctttaaagactttttaccgaccctacaaatcaccacaagatctttttccatgctttgtcactcgcatggttccgacaatgacttctgggaatatcatccatcctgaaactactccagcccaagcatgtttaactgtggagttctcttaggacgtttgaccgaaaagataagtgcacacgtaggtggtcaaatcatttcttttaaacctctctgcatgcaccaccatattcctgaaatcggggtgttacaattcacctccactaacagatcgcaacgtcctcgttgcacaccaagaccgtaacccccaatggtgcgaaccttcttgactccacactcatttgggtttggctctgataccacttgtaacaccccgactggccctaccagtgggcctcatgtcttctctctattaacaacttgtaacaccccgaccggccctaccagtgggcctcatgacagattcaaaactcaagaggcatagatttaaaaatcaactcacaatgacaattcacgctagtgtattctagctatgtatgaatacttcgcaaatagggtttgttggatcgggttgaagaagaaatgttttgagataagcaatttatttggtaacacgtatcaaaactatatattgagacaaaaaaaaacaaagaatcaaatgtacgtaatttaataataaattttggattaaaaccaaaagtgatgcaatacgaacacaagaacaacgctttcaaaaagcaaacacatacttattcattttttttgttttgttcacaatgtataatattggagtatcaactcctacaaacttggaagcacaaagcaatagaaaggaaacatggtttctgtcctcaaagagaaaaacacaaatccacaatgttatttgcaaagctttattaaaaggaaaaacgagatacttagtcaaatgtgacttagtcttgatggtattttgggttgggccgtcttatgcattagtcgattcttcttcatttgcttctttcaccttcgccgatgcttcttcattttcatcttcttcctttttagcagctgcagtagtcgctccttcggctgtttcaaaacctataacgctgatacctccttcctcacgatgacgtgcaataacagacttataatatttcagttctccatcggaagtatatatccctaaatcattagttttgcaccaaatcttcatttcatcgtaaaatacatctagattaatagtgccgtactgcttccatataagaacacgataaccttgaagacctttattcttaccacgattatcattaagctcgagattataagggaagtaattcagcacatacgcttgatcttcatctttagagtctctataaatcttaacagcaccaacattaagatctctattaattgccctagactctccatccttggcatcatacgtcttgccatcacagaagcgtacggttacacacttaccataaccataattagaaacctgatgcaacaatggagccatatatataagattgaaatgtttcaaagattttgtttgatgtgagaaataatgaaggaagtcttcttcttcttaaatagatttctcacatttgggatatcgcctttgtccaaaagactttagacacttagcgtgtaaaatgcaattacatcctacggttaagattcaaattattaagagaataattagtcaaagaactatccaacagaatgatttttagtcataaaataatacttcctccacaaagtctatgttaatattattttctccacaaagtctatgttaataatagttccttccaaaagtctatgtcaataatacttcatccggaagtctaacaaccctaacgcttctctctcgaaaaggccaaactaattttttcttatatacttatttgttaacgttttgagttttccacaaatactaaaaaattactattgtttgattattttaacattattttatattatatttatgaattattaaccaaaaaatattctagtaaatttaattagtctatgcattctatattatattttgccgaaataattttaacatctatttggtaaaatttaatcatctctagaaagcttatttatttggtaattataacaactcaattctaatttcttttacctgttttttctatggtattactatctcaagatcctctttcttaaccatttaaactaatttatatgataccgtaaattagttatattcacacaaaaaaaaagttgtcatatccaatcatatacacatgatcaaattttacttcgtttagttttttaaacaacaatttattttatatggcaggagagaaacaaacaaaaacatgggtctaatccatgttcgagtaatcctaaaattgtcatttacaatttatttttcatctatttctagaaacaactccgtacttgtgtgattcgtcaacgaatagatttttttcagtatcaagatttctccaagttaagaaagtttctccgaaaatggtttctagcatgaagaactcgatgactactgttcattttacaatattcttaatcactcgtacataatcatctttattttagttaataaatttaacgtttcatataaagaaagatggagaatttgctagactcaaagatttgtgtattccaataaccatactttacaatattgtgtgcttcctcattttttattctttttcttaatatttttaaattttgttgctcgtcatgttaagttgggataaaatgatttcaagttgtttgcttttgccgcaaatgatttaaatgatgtgaaaattaaaagctttcagcttaaaatggatcatataatttttgaagaagataatatatcacattattaaaaaagtgaaaaaatttcgttacttaggtagaaaattgacgaaatttaacaagacgtcgacaaatatctagtaacatacaataatatgaacgaattgaaaataggtgtattaaaaacgaaaaaaaaaaagaaaaaaagaaaatgaggtgtattatttgttttgttttgattggcttaatttttattgatgtgctggaaaaaaacattttaatattattatttttttttccacaattattatttatattaagttatcgggaaaagactctgcgctaaagaaagccattcaagaaccgatatgcttatatggaaaaatgctattttgaacccgggcttttttagctaaacaatctgctcgagtattagaactacgaggaaaatatataatatggaaagaatgatttttcgaacccttctttctatattacattttaatattattattttttgaaattgtgggcttttgcggctaatgatttaaatgacgtaacaattaaaaaaactttgcctaaaaaatggatcttttgttgacaaaaaaaaaaaaatggatcatataatttttgaagaaaataatgtatcacagaataaaagaagagagaagtataattatttaggtagaaaattgaaattcacaaaattttacaagacactatggaccgctcttatacgctgtcgttacatcatatacgctgtgttttaaatcggcttgatgattatggatgttagatttgcacgttcaaatatttatttctttattggctaaaacgtcaaaatcaaaagtttttaaaactcttaataaaaatccacttccaactccacttctatatcccttctcccatgcgataactaggccataatagactcctcataattcagctagaggagctaaccatatgcctattctcaatgcaaaaccacccaaccacaagccatcattacccgtaagacaccacccgacgtggctggcccgggttgccgtgtgaagctccatccgtcgaaagcttgacccagctctcgcttggcttcttaacccaacacatatactcctccacgtcgagaccacctctcttaacccaacacatatactcctccacgtcgaggaccaagtacttttcaaggtcaaccatgtaccattttgtattcttcccactttatacttgatgcggagaactctcgcttgtaggctatccacattattcattagtctccagcctacctttgatattaaggctcggttcatgactcttgttgtcctttaacccaaacctccttctgatttcggtttacacactctcttccacgaaatcaaattttgtttctttttcacgtcaaatagaacttctccaaaacttttctaagactctcacctgagcaagtgaagaatctgcaaagaggataaggtcatttttgaaacatacatgcgacagcttaggacctccttgagagatactaatcggtttccattccttcctccctaccgcagtttcgatctggtgacacaaccgctcaaaacacagcataaacagatatggagataaagggtcacctaggcgcaggctgtctgttccccattccacaatactctcattcatggtcccgtcacacaagtcataatccatcccctccagttggcaaacaatcctgctacctctaacgtttcctctaggaaattccatcttatgcggtcgtatgctttttcaagattagcttaagcaacatccttcctccccttctattgtttgtattgaaataactaataacaatgaataaagactcctttttctctggtgtttaaggtaaatattgattggctatacgttttgttaagagaaacttttatttaaaaaatcaagaaaattgtttgtataaatcattgaatactgtgagttaagactaaaaaacattagctaagaaaccaagacaaatatgagaaaaccaataaaataattttattgaaaaaacatataatagtaaaataaaatttgtattggtacaattaaatataaatattaataattaatgtatcattaacctttagaatattaatatagagcttacattaattatttgggaaatcacatttttaaccctcaaagtgtcatcgggtaagcagtttaaatctcgaaagaatttcactagcactataaaccactaaaatagttttactaacactttaaaccttcaaactagttcaagaggcatagatgtaaaatgaacttacaatgacaattcccgctagtgttttgtaactatgtatgaatactttgcaaataggatttgttggatcaggttgaagagaaaatgttttgagataaacaatttatttggtaacacatctcaaagaatttgcttattagtctcaaaactaataaaaaattatagaatcaaatatacgtactttaataatgactatggttttgagtttggagggattacatgatttggctcagaaactcttgatattcaaaataaaatgaaataataattttgggatcaaaaccaaaagggatgcaatacgaacacatgaacaatgatttcaacaagcaaacatgtacttattcatttttttgttttgttcacaatgtataatattggagtaatattggagtattaactcctacaaacttggaagctggaagcaaaagaaaggaaacattgttttgtcctcaacacaaatccacaatgttatttgcaaagctttattaaaaataaaagtgatacttagtcaaatgtgacttagtcttgatggtactttgggttggcccgtcttatgcatttggttcattcatcttcgccgatgcttcgtcattttcatcttcttcttttttagcagatgcagtagtcgctccttcagctgtttcaaaacctataacgctaatacctccttcctcacgatgacgtgcaataacagacttataatatttcagatctccatcggattgatatatccctaaatcatcaatttcgcaccatatcttcatttcatcataaactatatctatattaatatcgtcgtacgcggtccatatatgaacaagataatcttggatacctttattcttaccacgattatcattaagcatgagattataaccgtcataattcagcagataaccttgatcttcatctggaaagtctctataaatcttcgtatatggaccactattaatctcttcattaattgtcctagactctccatccttggtatcatagatcttgtcatcacagaagcgtacagttacacgcttaccacaaccatagttggaaaccctatgtaacaatggagccatatatataagattgaaatatttcaaagattttgtttgatgtgagaaaataatgaaggaagtcttcttcttcttaaatagatttctcatttttgggatatccccctcgtccaaaagactttagacacttagcttgtaagatgcaattacattctacggttaagattcgaatcatattataaaagaattaatgattagtcatacaattatgttaataataattcctccaagaggtctagatgttaatatataattagatattgacccgcaatataccgcgggtgaatatgttcattgaaaagtatagatatttgtttttacaaaatttaataatatgaataatatatttttgacacataactttaatctatgtaaagcttgagtaattcattgacacatagaacatcgcgagttgatattttcgttagatcgcaggttgtaaattcattcctaaatctttttcaccttcaagatgacattctagagattgacccgcggtacatcgcgggtggatatgttcattgaaaagttatacctatttttttaataaaaattaatatttatatatgaataatatattcttaacacataattttaatctatttaaagctttggatgtctaataaatcaagctttcggctcattcgtattcaaaatcattttggttttttttatagtaaaattctaaatcattgcccagtttcttaagcaatatgagaccttttacactctcttttttcatcgattgagtactatatgtctgttttaaaaagatttaattccatcatatgtagaaaaatctaatattctattaactctatgtattttatataaaatcaaattaattaaatataagaacaaatattaaagtgaaagaaaaatcatatatttatatttaatgtagataaagagatattaggaaactagtaattaattgaatgtagttcaataaagataagatttaattaaagatataaatttagacaaatatttatttttagatagattttgcaggcactaaatatgtaataaaaaagagttaattcaagtaattaatgcaagttaacgaattataagttcgtagttattaaatatttagttagataaaatttgtaagggcttgtatgttattagtaaatagtatagaaagttttggccaaaaaatctatcatgtagatacttcatcgagagagtctatgttaataatacttcctccaaaaattctatattaataatattttctctgaaagtctgttaatatttctctagaaagtctattaatttttaataaagaaaatatggggcttttacagggcaaggtacttaatggcccaaaaattaagaattgagcattttttaaaagggtttacaaagaaaggcattttatgtgaaagaaattgactaattacccctctaattcaactccatcaaaacttcttcttctccttctacccacacaatgcctttgaccaacgattttgatccgatgaacctaataagcgttctttggtaacatgtttcaaactctttcagcaagcaaattaatgtctttattcattgttttgtttacaatgtataatggattatcaactcctacaaacttggaagcacaaagcaaaagaaaggaaacatggttttgtcctcaaagagaggaacacaaatccaaaatgttatttgcaaagctttcttaaaaagaaaaaggagatacttcgtcaaatgtgacttagtcttgatgctactttgggttgggccgtcttatgcatttgcttcgttcaccttagccaatgcttcttcattttcatcttcttcctttttaacagctgcagtagtcgctccttcggctgtttcaaaacctataacgctaatacctccttcttcacgatgacgtgcaataacagacttataatatttcagatgtccatccgattgatatatccctaaatcattagttttgcaccatatcttcatttcatcataaaatatatctatattaataatgtcgtacgggttccatataagtaaacgataatcttgaagacctttattcttaccacgattatcattaaggtagagattataaaagttgtaattcagcaaatacccttgatcttcatctgaaaagtctctataaatcttaaaaggaccacaattaatcacttcatcaattgccctagactctccatccttgatatcatacgtcgtgtcatcaccgaagcgtacgattgcacgcttaccataaccagaattagaaatcctacgcaagagtggagccatatatataagattgaaatatttcaaaggttttgtttgatgtgagaaataatggaagccttcttcttaaatagatttctcatttttgggatatccctctcgtccataagactttagtcacttagcgtgtaagatgcaatctcaagattcaaattattataagagaataattagtcatagaactatccaacagaatgttttttaggccctgttcgttttcttgtcgcaggatccagcgaccagcgacagcaaccagcgacagcaaccagcgacaacatacattgttcgtttgtctgtcgctggactcagcgaccaattacagcgacaatcgctaataattgtcgctgtgttgttcgtttgactgtcgctataaacagtcgctatattgtttttaaaaattaattattttggtgctaatttatattttaaaatcaaaatgtaaatcatatatatcctacaccatgagaaaaataaattaatatatttatttattttagttttatcaaatttaatttgactataattagtttatgttatttgaatttaatttattttaacttaatttaataagaattaaaactcaaacccttcgtgatatcgcagataaaaatattataaatttgtttatataataatttctttaaaacaaatctaactccaaatgatgcatatatgatatttatttaagtttaatttaatttaattctgtttaatttaattatttttaattattctttaatttatattttttgatcgctaagttgttcgtttgcatgtcgctggatccagcgatcaaactaatcgctaaaggccctgttcgtttgcttgtcgttggcgactgaaaccagcgacagcgaccaaaagttgtttgtttgcctgtcgctggttcagcgaccaaaaatagcgatagttgccagcgatcagcgaccgcaatttttggtcgctgaaagttttaacgatcagtcgctggttttagcgattagtcgctgcttttgatcgctggactttttacctgtttttcatctcttggtaaaatttatttggtaaaatttaatcatctcttgaaagtatctttatttggtaattataacaactcaattctgactttttacctgtttttctactatattacaatctcaagatcctctttttttactatttaaaccaatttatatgatagcgttaattaattatattcaaaataaaataaaatagttcttatactcaatcatatacatatgatcaaattttacttcgtttagcgtttcaaacaacaatttatttgtagcgggagaaaaacaaacataaacatgagtctaatctacgtacgactaattacttgacccggttaatcgagaaatcaattcgacaacaaatagattttcctcggtatcaagatttctccaagttaagaaactttctccgaagatggtttctagcatgaagaactcgatgactactgttcattttggttcttttacaatgttcttaattactcgtacaatcatctttatttttattaataaatataaggttccatataaagaaagatggagaatttgctagactgaaagatttgtgtattccaataaccatattttaatttttacaacattgtgtgcttcctcatttgttttacctttttcttaatatttgttttccattccattatttttaaatattgttgctcgtcatgttaagttggggataaaatgattttaagttgtgtgcttttgccgcaaatgatttaaatgatgtgacaattaaaatttaaaagcttttagcttaaaatggatcttataatttttgaaggggataatatatcacagaataaacgaagagaaaagtatcattatttaggtagaaaattgaaattcaaaaaaaaataacaagacattgatgtgctggaaaagacacagtttaggtttattatcttattttaatttaaaagttattgtactttaaacaaaatattttctatatccatcatatttgggtgttaatcatttttccatatgaagttagtttgctcgttttcagagaaaagcgataaagtgtagtatattataaatgtagtttatttggctctttgtattacatcgtggtatgcataatcattttgttataatattaatgtacttgcatcttaatctacttgacgtctctttctcaattttttgttttgtcttttttttattaactaatgtgatattttgataattataatttttattttttttaatcattcactcattcaatcagcgataacttttaatatctaaatatatattttcttatcaaccttcttaacaatgtatcacttatacaatcgtaaaataatttttgttctaaatcaattttatagattttacacatctgaatctttctcttgttttagtaaccatgtctaataacttattcatggatcagataacattatgttatgacattttgaatgagccaaagaacatttgaatctttatgtaagatgctaactaggcgatatggattacaagagcttgaaaatgtctatcttgaggaatctgttgccatgtttctcgaggaggttgataagaataggactgttcgagatatagttgcaagatatcaacagtcattgaatgtggtgaaaagaaagattgatgatgttttgagcgctcttttaaagtttgcagcggatacattaaagtcacaagaatgtgagtttacaagagtaaaatactgttttgaagaatgatgatcgatattggcctttttttagagattgtgttggagcacttgatgaaagctagaacctacaatgaatgttcttgctatatgtaatttctatataaagttcatatatgcatatgttggtgtatctcgtagagcacatgatacaaaggttttgaagtattgtgcgaggaatgaatctttttcccctcatccatctaatcgaaagtactatcttgttaactctgtatatcccacgacaactggatatcttggtccacatcgtaggatattatatcatcttggtcaatttggtagaggaggaccaccagtaactgtacaagagttgttcaaccgaaaacatttagatttgcgatctgtgattgataggacatttggagtatggaaagcaaaatggaggattttggatcgtaagcatccaaaatatgtttgacaaagtgaattaagcttgtaacaacgacgatggcagtacactacttcataagggattcacattggaaagatcatgatttttacaatggcaatgcacaaaagaatataagaagaagaaaaagaagaacgaatgaaccgaccggtgatagagcgatggaagctttgcatgacaacaacacaaacgaatgtaataaaggtcgtttattatataagtttttttagtgacttggtgtagtacttttaattattagtttactatttttgttttaattaagctcatgatgtatcacaaaattttattgttataattacataattagttaaaagcactcaccaaaaaaagttttaaaatattattactagctaaacaaaaaatgttatgcatgtaatatatttaaattactttttttattcaaaataaatttatataaaaaaataagaattaaggtacaattgatgcagcggcgacgaaacgaacacagacacctgcaaaaatgttaacatcgccatcaacgtcacgaaaacgaacataaatcatgcatcagcgacaacggtaacggctgcgacaacaacaccaaaacaaacaaaaatctgcagtagagtttgtagccgctgctaccactacagcatgcggtgatgaaacctacagactaaatcttgttaaaagtattaacgaggtccgttatttgggagagaatagactactttaaagtattgggtgtgatgttacatcttttaagattatgcggggtcaaattaaaattaatcaatcgtcagtattcactccgcacagtcaaaagctacgacactcactacacactcgaattttaaaatcaaacagcgaaaacgcgattctcttctccgaggaagaagaagaaatggcggagaaacagagatggattgcgatgtatacgaaacacctcaagcagaagcgaaaggtctatcacgatggcttccttgatttacatatcgccagaaaaaaggtttttcttcactcttcgcttccaattcttcgtataaaaatccactagattatcttgattttgttggcttattcttcatagtttactcggaattcaatcttcgttctccgaagatctggctcagtttaattggaggaacgagatttttcttgtttgatttcgtggagaaatttatgaactatcgattatttccagtaccgtggttgaattttgacctagttctcgtaattctgaataatttttggtgattgtccctaatctttctcgtttccgagattgctttgaggttatgtggattggcttttaagttctgattgttgattagtggatacacagctccagattcaactgaagttatgatttgattttgtttcgaaaatttgattgattatcgaatataagcttctttaaagcttgttacatttggatttttggggaataaagtatttgtttctgttatgctcatttgtttagtaggtctcagagctaacactagtgaatgtgtaaaaccaggtgatgctttatgatgaggacgataatctacttgaaagcaggacgcttaaggcatgtgaagttgtgaacacaggtgaaacactcacatttcaagcatatcttgtggatatatgcgatcctaaggacggaagtaaagcttcttctgagccaaaggttgaaccaagtgatcaaaaatgtgcacgcaaaccatttacagttctcaggccaaatttcaagaaaagttctcttcgttgtggtatcatgttctgttatccaactcttacaattttatcaggaatgtatttcctcttgaaaagactgttctacttatttccctttttattttggcagatgagaaaaaacctgaccttgtgaataaattttcttcgaaaagtctcagcccatctcacaatatgattagaggtgaactataactcggtcatctactcctagcaagaaattttactgtctattaatctaattcctgtgaagagtgaaaatcgagcactgcaggctagtaatgttttctgtgtacactttcagtattcaaaaagagagaactgcataagtatggggcactgactccagactcaacaacaaaaggtttgatgcttgcttgatatgtttatgtagttggctattggagatagtgaaagcagaatgtcaaaccatttcataaatagacctttggcactttgcttaattcaaaattgatgcttcagattgttaggtgttcgttaatatcacactgatggatgaaccatgctatgtatatcagctctgtattcagtatattgatatcgttttcatcatgtacggcatgtacctgcttgttcagttagattgacactttaattttaaggatcttctggaactcgtagaagcttgtattaataattccattaggatggagaatttttttttttccccatgcacgaacaaacttcatgttagggatatagtaatctttttatgtgttttggatttggtttaatcatgcagaatgtagaatgtatgaatgcgagatagaaatgcagaatgtacatctatacttactatttttgtgcatgctatgactaacagcatgtatgcaggtactgtatctcttggctcagttgataaagaaagcaataaccaccctttgatcaactctccatgtactggtaagatataggaaatctacataccacatttttttaattctatgccactaatcactagattagatttgaatcgtagaactcatgtttgtaaagccacattcctctacattccaatcattctactgtttggtatagcaataggttaatgtgacatatcctgtcctccttaaaatggtactgtgtgaatgtgcaggaaggtctgttgtagattcaaggttagagaattgtaagttaagcaaggatgttcctccacccaagcctttacgtgatggtaaatatttatttaaatgcttgtgtttttctccatgcggtttcttcataataccatttcatgagaacattacataaacaagctttttcttttcactgcagtaaatcagatactctccattcttcagaaacggaatgctacagagacatgttctgataataacatgcaaacatctgtgcttttgacaaaagtacctccagaatctgaaaccagcaaaagacacaaaatggagtctatttcaacgaaaggtaactccggaatttcaacctttttgacttgtaaagcttaactaaatccaagtataaatagttagcctttcagaatacaaaactgttcttatagttttttttgggtttattgttgaaatctataagaatctcatcactacaaacaattctttgtttgcttatctgagttgcagaagcatctacggaacaagtaatggtgcaagaaacctcatcggccagcacaagaggttgcttaatgagtgatcctccgagtttcgacctcggaatttaaacagccccctcaagattacagaaaataggtaactcgttttttcattttacctcaagttcttcacgaactatagttttttcgaaaatatagtttctcattctaagctgtgttaaaatcaaaactagtatgtaccgtggaaaaagtatgtagttttatgcataagcagaaattagtaagtaaattgaatggtttatgctccaatttgcgtgcaagttaacttcaaaatgagaaagtttccacgaaattctcttaatgtaacgatgacaaatttctaagacatctacatttttattatgaagctaaatatagataaagctagaaataagatgtagcgaaggagcgagtctttagcatgtcctacgagtgcgggttaaccataataaccacaaatctcttctacaaatattccaaattttcaacaaacacaaaagcagttgaagaagttaacttttgagagagatagataagtttactttaatagaaagatacatacatatacataggcaaagaagggaaatggcaggaccggcacaagcagcaaagcagtcaagtgaagtgctaggccagcggaagtcgttagggatatgtccgttgagagcggcagcggttggagcggtgataatcggtggaattggctatgtggtgttgtacagcaagaagaagcctgaagcttcagcaggtgatgtcgctaaagttatgtcaggcgtcggtggtactcctgagaacactcgtcctcgtaattgagcgtctctctttaatttgtttactttcaaatcatgggattgttatctttgtggttgatatatatagttgaattctctaaacattttaaacatttgaatctttaggtgaattaagtttactctagacttcgaagaaaaccttcaaattcagttatttgatgttacaaatcttgacgggcttttcatacgaaaagatataatttgatgttagtcataataggagaaatttgtaaaaagtgatctgttttatgagatctcggtaaaagcagtaacaatatttttaacaaagataaacgaaagagctaatatttggttcgtttatttattccatttatacattaacttgagagctccggttggattattacgtgcccatactccatcatcttgcacttgccagaaacatatgttaggcttcatactcccacatacatcatgtataaaactctctttcccaacaaatgcgtcaaaacttacatgatgcttaaaatcaggtccctgaaagatatattaacaaagatgatcacaacttttttccaaataaaaacataattatagaacgattaaagatcatataaacattagaggtttcaatagttattgtagatgctccaaaccaatccatttgtagagtagaagatttttgaccaacaaaattttttcccgtccataaaagtaaaacaatttattcaccaatgtatggacaagataacaaatttactgtaaatatatacattcagatttaagaacgtgaaagatttctcttttattttttttaaattaccttccataaggtgcaccatatcaatgtcttaaacccaattcttaaaggagctttgaacacatcactgaatgcaagaaaaacaactcgggtcgattcctgaccagatctacactggaccataagtttattgttacccccaagttgatttgaaatttcaatgttaaaacgtctaaatgtaagaatagagtctgttctttggattaaaaaggcgaacaaggcaaaatatattataaatttttctatcattgttttttttctttcaacatgtatttgtctttaacatgaattccacacatatatatataatataatatgtcacatttgttgatgtatttaatttcattacttttgttctctcttatatggttagttatatcctatcatttattttttttatatatttttctttaaaatatgtaaactaatggaaacaaacaaacaaatcttgcataaatttacttgcaaaattaaatttcattaacacatttagattatttttttaatttatgttgtaatcctttatttgtcaattatttttgtttttttatattttctttgttatgaaaccagcatatctaatgtacaaatcagtatattttttttgaattatttgttcacatagtcaactttattcatgaattgaaatatagagatattcagaaagacaatttgctatccactctagaaaaatgcattatccttgaatattaaattgaaagaaaataatcgaattaaacaaaaaatgatgaaccaagttaaaaaccatctcatttggcacaacattgagtctaacactcaccattattaagcacatttcatatggtttaagtaattatcacatgttcaaaagacaaaaatatcaaattaaattatagaaatgtaactgaagttataacttatgatcgtaatatatcataatgttatacataaaattatgccttaatacgttcatcactatcattgtttcaataatgcaaaggcaataaaaacttatcttttgaataaaatagtagacaacaaaaatattgtttagtgaaaaggttttttggatagttagtaagttttaattttaaaaaaaaataaactaaatgtttacagtagatttagaattatagttattatgaattattcggactatcaataaaatcttgacatgtcccttctatttttacatttgtttcaatcatcatttcacatgcccactttttacacccactcacagtctcacacatttttttctcttacacacattctcacatctaatcctctaattaatagtgtgaccgggctaataagctaattactttccaaaacctattatttatctccagaaaacccaacaaaaaaaattcacccccaaatcgccgcatacttcttataactatgttatagtacttaaaacatttgtaaattatattggagatttcaaacatctgtaattcaaaaatttctatgattcaaaaattaacagagaggtaaaataacaaacccaaagatataaagtccattaaaaattatactttgatttcaaattaattaaataataaaatttgaaagagctcatagctcagtggtagactatttgactgcaaatttagaggtcaccggtgtgaacctggttgggctcttcttttctttttttcgttttctaaaatatgttacgaactccaaatagttggttaatgatatgcatattaacccgtgaatgatttaatatgaaaatgataattggttaatgatatgcctataaaaattaatatggtcacgggatttgatattccttccttccctactaacccaaatagtcctacaataaaattatccataagttgaaaaaaataaaataataatgatgttcctaatgtaatagcttagttattgcatagtgcgattccaaaactaataaatgaaaatcaaccaaattattggttcatccccacgggccacgggtcatattatctatatgtcattatgtattcatacatacatacatacatatttcttgttttatgatatgtttttgtacatattatagtttgtatatatgatatgtttttgtacatattatagtttgtatatatgtgtgtttctataagtacaatataaaaaatcacttatagtctatccccgaagatattcagttgaaatatttgctatattgctggcattttttataagaattttatctagaacgcaagagaacaaaaaaagaaaaaaattagaaaaaaaatgagttataaaggatgaggataaggtaatagtattatgcacagcgcggagtatcacatgcaagtagtgagattaagagacaacaaagagactgtttgatcaatccttgtctgagagttactctctctttagtatttataaacctatcttgaaccaaaaacaatcaaatcaaactcaaaatttagttttaaactctctgtttctttcttattttttcttcatttttagttgctgtgaagatggggaattgttcgcaaagagcagtatctgatggtggtggttcggttaccgtaattgcgacaaattcaagaaacatcctggaagagtattacagaagccggagatgtagctcgttgccaataacaagggagaaaacactagggtatcttgttagacaaggtacaacaagccctagaggagtacttgggccaaggatacaagtgtcgccgcaaagaagaaatggagtttggaaagcgaaagtggtgatcggaagtaagcagcttgaagagattttggcagttgaaggcaatacacacgctttgattgatcagctccggtttgctgcagcagaagctttagtttcttcaacctccgcctctgagatggtcagagttaaaagtttattgtccaagtcccgaaaaagacaatgagaactacttctgttaggttcgatgattgcgttttttttatgtggcttatttgtaatcctagcaaaaagtgtatatagcacaaacatttgataaatgaaaaaaatatcttgttatataaagagtgtatctaactcggttttcgaagtttatgttttgtgaaatatagaaaccaactgaggaaaaaattaatacatttggttctgtttgacacagtctgtgtttcagtctgatctggtttttgagaaaatatttaaaaaatattaggttttagcaggattacttttttggggtttgtttagtttcggttacggtttgttcaaatgcaaaagattgaaatttgaaaccggatcagatggttttgtactttggtccagagtttttggaatcggttaaagcgaaatggatacaactcagtacgagacacataacgaccaattcgagagaagaaaataaaaaagacagttacatgagagacctgaacattcgaacaactaactacttaagaagacacttacacatgtttagagataaagtatcacatgttcttcattcagacacgcgattccattttcttgacagcattttcgatggctggcatgtttttcttgaaggttgaccattgttcatctgttaagcttattcctggagataacattataacatatcagagaccagacatgaatcaaaaatattctcaatatggtccattttgagtaaaatggttgtcccttttttttttatctatagagaagaaaagatgaactatattcaaacccaaataactattctcaaagtagataaaacagaaactatttaatgacttttacacaaaatatcaggacttgcacaaattcaaagatgtaatacagaacaagcttaagtgctaggttaaactaaactaccataaactgaaagaatcattcaagtcaacaacttttcggccaaaatggtttgtaatcaccaaagctttttacttaatatacaaaactgaaacttaacacacccaaaacaataacaactctgaatcatcattgactccaaatttcgaattgtgaacgaaaatcactttgatgcaactctaaagtggaacttgaaagaaacatttgcacataaacacagaatttggctctacaatttctgaaaaattgtgatagaacaaagagagctttaaagtacctttagaagtaggaagttctttgccatctttcttgtaatactctctgatagaaaccaaactcttccctttaaattcctgaatcgtcactcttctcttatccgataactaacaacaacaacaacaacaacattccaaattcagaacacacaacattcactaattcacaatctctgcttcagagataacactattagcttctctacgagaccacatacaaatcaaaatcaatcctatttcaagcaaaatcagtaatcgaattcgagaaaaagcaatgaaatcaaaccctgcaaatgataagatcgccgtcatcatcaaactctttgtttcctttaccacaatccttatctccatcttcttcttccttattcacttgtgagttttcatattctctcgctctctcttcgtcgaggaatttctccacgacgcttcgtacaaatgctttgtgagatttctccgagagatcgattgcgagtttctccgaagcgagtttacgaaccttgaactctgttatctctttcatatccgattcactgagtatctctatcacagttttctcgatcttctccttcgtctctttctccatttttagggtttttctccgccggattttgaccaaatcggattatcggtgttataaacccgataagtatagatgaaattatcgcaatcgtataagcgtggtggtaatccatcgctcatttctatttataaaaatggataatgcttatgtttatctattatattttctttaaaattgaataaatatggatgtaattatcgcaatcgtataagcgtggtggtaatccatcgctcatttttatctataaaatatggataatgtttatttttatctattattttctccttaaaattcgataagtatggatgtgattatcgcaatcgtataaacgtggtggtaattcatcgctcatttctatctataaaatatggataatgcttatttttatctattatattttctgtaaaactggataagtatagatgtaattatcgcaatcgtataagcgtggtggtaatccatcgctcatttctatctataaaatatggataatgtttatctttatctattattttttccttaaaactagataaatatggatgtgattatcgcaatcgtataaacgtggtggtaattcatcgctcatttctatctattgaatatggataatgcttatctttatctattattttttccttataactagataagtatggatgtgattatcgcaatcgtataagcgtggtggtaatccatcgctcatttctatctattaaatatggataatgcttatctttatctattattttttccttaaaactagataagtatggatgtgattatcgcaatcgtataagcgtggtggtaatccatcgctcatttctatctataaaatatggataatgcttatttttatctattactttttccttaaaactcgataagtatggatgtgattatcgcaatcgtatacgcgtgctggtaatccatcgctcatttctatctataaaatatggataatgcttatttttatctattattttttctgtaaaactggataagtatagatgtaattatcgcaatcgtataagcgtggtggtaatccatcgctcatttctatctataaaatatggataatgcttatttttatctattactctttccttaagtctcttactttcttgttaattctattatttttgggttggctgattttatacccataaactaattgcattctcagctttttccccacactttttggctcttaatttttcaccataaactttgataattctttaaattacaacatgtactttcggattcatccttaaacatacatttccaattgaaccggtctttaaaccggaattaaccacaaatccgcgtttactgtaccacgattgcgatttacccgattaatcaccatatccgttaagaaaaaggttggctgattttatagccataaactaattgcattctctgcttttcacccatactttttgctcctgaaatttccaccataaacttcgataattcttaaaattgcaacatgtactttcagattcatccttaaaaatatgtttccaattgatttagattgttaaaccgagattaaccataaatccgcgtttagtgtaccgctattgtgatttacccgactaatcccacacccgttaagaaaacgacatcgttttctctttgttttataatgtgaatctatctatatatgttatgtgttgtgttaattggtaaggaaaatgacaaatcgaactagataaaactcctaatcataaggatagataagactccaaatcaattagtcaacctaaataatatcatcttaaagagaatcaacttccgaaaatacatcatccaaaatagacaaaagaggttgaagattgttccaatgacaatctaaatcaattggaaacatatttttaaggatgaatctgaaagtatatgttgcaattttaagaattatcgaagtttatggtggaaatttcaggagcaaaaagtgtgagggggaaagcagagaatgcaattagtttatggctataaaatcagccaacccttttcttaacggatagaggtgattaatcgggtaaatcgcatcgtggtacagtaaacgcggatttgtggttaatcctggtttaatgaccggttcaattggaaatgtatgtttaaggatgaatccgaaagtacatgttgtaatttaaagaattatcaaagtttatggtagaaatttaagagccaaaaagtgtgggggaaaaagctgagaatgcaattagtttatgggtataaaatcagctaacccattatttttttttaagtaaactctattatattttcatttttcttcttaagtttaatattttataacaatttgcgatatttttcttaggctgatgtcagtcaagttttcgatactaattacggtgtcgtttcgtgaatctattagttcactctctgaaaagtttgcttatgttaacaaagatctaaaccggagtgagtgagcaaactttttcgtttgatggcattacgttaatacggtacagacgtaagcgattttcgtcacaatgatcgacgatgttagaaaagtgattgatatatggacttttttttttaacaccttaattgatatatggattttttttttcacttcttactgttacatatacacattataaaatagttttagagatgggttcagagaccattttcttggttattctttttagacaacctccattagtgaattgttgggtgtctttcaaaaaaaaaaaaaattatgacttaaaacacgcatcttcagttacatgtcttcctataaatattttttatgttttcttcaagacaccgagtatgattgattggttggggtgtaggaaatttataaagacactaaaaaactacaatcatgttgtacttttcttattttttctcacagcctaaaaaatataatttttaactattttggctataagtacaagtttttctataagtacattatttttaaaatatatattaaattgatatttgtgaataatataatataacataaatacaatttactaataataattcttttttaaaaatacatacgaccaaaaccttatttctacaaccaaatcatccatttcattctctttctgaattcatattgctttcttcttctggattttggtacttctctttcaaccctcagattcactttctttttttcttccacaattgcggaacaaccgcattcttattaacgatttatccatcgtatcatcagttcacatacggaatacattcatgtatcatggagaaactagcttccttatctcaagactcgtcatggggtaataataatctgaagctctttaagtctcactaaaagaccttcaaaggtttaattaaagtttttgtttgatctttgttcatactcagtattagtccaagtgctttgcagttacagcacattaccactcactatatagtgagcgaggctcatcggatagagatgcaacctacgactcctttatcttacaatgtcccagtcatggaaagtgaaaactcttaattaagttgcaatttgggtcgtcattcaataagatcctctatgccacattaagagctctcatcagaggattgtgtgcatctatgacattgacgccagcgtttcctttctacttactagattaaaaccattgattcaattccaaaaaccaaatagaaattaggaaaaagtaataattagaccaaccattcaacagcaactgagaaaaaaaaaaaaatagaacattcagtacatgtagttaaaactaaataataaccactaaaaatctaataagccaatttctccaatatgcagtttctttcttcttctttatttgttgtccccatgaaaataaaagaagagaaggaaaccaaaactaaaagatattatcatcattcatcaatgaacaacaacttgttgatcatcgatgagcatcactgagctgtgatgatgaaccatgtgccaccttccattgtggaactcgaacacattggttattaggaatggaccaccatccacgttcaggtatgccttcatggtgacccaagccatgtctgttagtatccgagtgcgaaccgtgtggacctgaaagtcaaacccttgttcccaattgaaacaaagttgccagctttgtatcacttcattgtacctgcaattcaagaagggaaaacatagatgattcataccgatttcttttaatgaaatccacaaagatgtatttagcctatttgaagatggccaaatctagaacaaagatgcataagaataaaactgtgtggagtagactcaaacaatggaaggtgctgaaagaatccaaattctatcagagctgctgtggatatactactgttaactctgttatcttattgctataacttttttgcttaaacgtttttactaaatcatacaatactcttaacatcttgtatcacgaggaactgcacaagagcattgttccgctagtatactcaaactcagataccatctcatagctaagaccatagaaacatacccaaaaccgttaaagaacatgctaggtacacattagaatgacaaaagggggtgaaatgtggagttgttacccggagaagagttcgccagaggcatggatacacttgacatagtccgagttcaaccacaaccgagccatcgcttgaagcgctctgtctctaatgatggtgaagaattccgtattcacactaataatcgctctagtagttgcatagtactctttccacccattgactggtgttataccatcttgctccagagtaaaatcctaacacatgagaaaaaagtaagagaagcattaaacaaaatagcaccattcacgaaaacacacactaatccagaaactgctaagaatacacatcttttaacctagaatcatttctgaatttccaatacacaaagctaatacaaatgagtgattagtgaatctaattaccttgtgataaagagctttccaagcattatcatcattagcagctttcctcatcaaggaattagtcatggataagcgacagagactgggataatccaagtaactaagcgcgtgtgtcgtaatttccggaaccaactgctccatcatcgaaactccaggcttatcatccgccaccgtggaagttgtaaccgtcgttctctctccgccacccataggaggcgtaccaccgttagccagcggcgtcgacggcataggtttgttgtccagttttctcgtccgaggaacagatcgagagaggaagaaaacgattgcgattggtactgcgattatgaagaacaataaggactgattacgcggcgagaaggagaagaagttagaagagacataaaaaaaactttgtaaacatgaatcagaagaacagaaaaaacctacagaagaaggagcttgaaaggtgacgtacttagggtttaatggtggtttccttcttctgcagaaaccctacaaattgaatcgggaaataaatttggcgagacgcagaagagagagagattcagaagctcttttgtctccaactccgtaactgaccatcgcaaatgtttatcaaaatgtgtcactgtaggaaatagcctcaagtttcaagggtattatagtcattgcacatgtatgtttatccaagtgcgtcagagtcactatagaaaacagatccgtcgtcgtttaacaattttcaaaaatataaagaaatgcgtcaggttaggcccaataggcattttaagaatttcattgctttgagcctttgacccaaacaaactatcatcatcttcttttacatttagcttttaagtttactagttcagtttaataatcacagtgacgaaaaagtatgtaactaataataaatatatcattttcatctctaaatattttttcaaaaacctgtcagcgaccaagtaaatctcagtttcagacacagtttaggtctatctggttcggggtacaacaagaattgcttctctcgccctaagagaagaagactcagtttccaaaacccgtggagaagacaaaagagagatactagttaaaatctatttacgtttttgtactgaactacttgttacttcatcttcttatttacgccatctgattttctcacttgcacttatccttgtggtgagctccagaggaagcggtttcgacgtattgctcggcaagtttcttgatcttgtctccttctttgatcaagaagttagcactcttggctttgctatgatacttcatcactttttctgtggttttagtcactgcccatctgtattgttccacgtttatcactccgctcttgcacagtggtctaatatgttctttgatgtatgcttccacctgacgaaaacaataaaaccattgaagagtgaagacaaagggaatgagaattttgacatgacagagacttttacagtttttagtaccttcttggtgatggagttaccaaagccatcagctttgcctttttcctctttagacggcttttcgcttggtttgcacttttgaatgcttctgggaagttttttctcttgaatgcaagtgatttcaaagtttgaagcgatgaactctctctgtgtgttgctctcgcactctgaatcaggggctttagctttaacaccattctcagcaaatccttcgatgagaggtctttcaactagtttctctgtaccaggtccgtatagttcttcacattcagctacagaaaggatctcacctcccccttctccttctccttctccttctccttctccttctccttctccctcagcctcaggtacaagctccataggaacaaagctctttccatcttcttttccatttgtggtctcgttcaggttttcagttgttgtctcttcatcctctacgacttcggatggattcaaagactttccaggttgaacagtggataaaactaccttcaccttagtcaagctttcatccggctgcattactgaagcttttttagccattgtagcaccgaaatagtcttcttcatccaattcatattcaaaatccccaaagatgtctgtatcaggaacagaatccatgtcaaatacattatatgggcctgtctccctggtcttgtccaaggaactgtctcctttctctggaagaacttctactgaacgggtcgggctgtttggtggtgaatcagcaagacctgctgctctgagcgcttcaaggacggctggattatctgaatctttactacttatacgttctgactcactatcagccattggtgatgacgaatttggttctacagcattatccatcgttttgctctctgaatgatgcagtatttcttgtgagcatagattcagatacacaactttgctacttgatttgtcagcaatcgccttctcgatatttatagcatcagcaacggctagttctgtcgctgcacttcttcgaatagtcagaaggttttctttctttaataaatgttctgtcaggcgatataattgtgtctgcagaaacagcaatttgcttaggaacaaaaacaagtaaagctattgcacaagttgtgatgttaataatgtttttgcaggaaaatcaataacagattagcctcaattttctgtattatcagtttaacgtatgtaaatgtaataaaagcacggcttggggatttctacctaaaggagttaattctacgtaatagtctttctcttgattatcagctatccacgtacctgcctaactgccacaggaactttattatggcgactagttgcaaggcttggtctcatatcagctggaagttgagcctgatagaaatggtagaaacaaacgaatgacatctcaaaaaaccagaatttttaaaagaaacaaagtaagtgatgagaattacacaccaacaatggataattccctttaagctcgggagagccttctttgtcttgggttgagttgttgccagctaaagctttctttcttgcaagaacctgcaatgcccatttccttttgtctttcttgagatcgtcaggattttcaaccatttccttagagttacttgatgtaagattgggttgcccatccgactgtttgtttcctgagttcagttttgatccagcagcttttacactgctccccttggcagcactaatttttggtaaggtcttgctggcttctgtgggttttccattgttttgtgagtttcccatttctttcggtgccaaaagaggcttgagattatcatttcttgggaacacggaggtatctgccaaatacaatctggagaggataggatttgaggcctgtggggtttcagatgaaaagtttgttttggtgtcagctggtttattcttcaagaggctaagcacagacttcagagtttcaattttttcaggctttctaccttgtatgcaccgatgcttccaaaactcaacttcacagtcccggtgccatgcactttttcgcttcccatttaaatctgcataaattttcttcgtcagattctctctgacttttcctttctgcagcatcaacttctttgccttcacagccagagcagaacttcttctaggtgcttcaccagttttaggtcctgccacagcagctctaaaggcagccaaaagttttggatcgaattggttttctctgatgtcctccatcgatttgttacgaacggcttctcttatttctttccttagtttctcaaccagaaccattgactctttctcgtcctccggtgtcctcttgatcttctttaccctcaaaccagcagcattctctgcttctgaagacttatcagtaggatttgaacgcatgagattttttctacggccagttcctttgacaatgctgaatatatcaacagttgtattgtttgaaggggatctgctctcgtggtgaacggtagttaattcttcctcttcctccagttttagttcattgagagattcgtaaatctcaggtttagtttctgagttgccatcatccccactggtaaagaaatgccacgaggaaacaacaacacattcaaaaattcgacacaaagcatagtatagagggaaagatggtaccacgaagaacagatttcatctttgaaactgacctgcaatctgaatgctttctctttaagctgatgacactggcaacatctgaattggaaatggctgcagtggaaagatctggtaaacgcattacagttgcagataatgatcaaattacatttagccataaagaggaagaaatgaaggaagcagaagataaacaggcgaacaaagggcagtatgttacttactttttttatcatctatcgacagacaatccttctctacaacagggtctacatttaacagaaataaggacaaggcatattgagaatctttacgtgttaagaaattaccaccaaattaactctaagtcaatcaatatacctgctctattctctatgtctgcagcaaaaaatggttgatctgaatcagaagatagtcttgatgatatatcatgtggtaaggactggttgagttccgatttgactgcgacctgctctgtattttcctccctacaaagaattttaagatgcgaactatctgggtctccatccattttagcttgaactggcaatgggttggtatcacttggtcccatatgagactcgtctcctttgactattgatacaacaagagctgtctcgccgtcatcagcaactgtaactgaaaagtttccagagtaaacagcctctactgagcatccgctatttgtcttctcagaaatatccagggactttcttgtctccattagtgaggtatcaggttgtgtctccattggcgaggtatcgggttcatgtggtttttcattagagagacatctgtggacacaaaaccaaggagggaaactatgacaagatggctaaataagatagagaaaggaagaataatatgtataggcattaggtttcacttagaattggtacaaagtgtctttactagataaagattaaaataattttatggaaactctaatataaaaatatttttgcctaataggctaataattaaagaaacaatataatgaaacaacggtgctgaagttgatcaaaccatggattaagcaatcataggtagtcaatacgccaacgaaacctacctcggacatacccatgtatcctcagatgcattttccacgtcaaaacccacacaaatagcatgatacctgttagcacagttgaaagcaacagtcagaagctaatttgaaagaatgctgtaatgatgaacaatctaaaacaatacgaagtacacaaaagcaagtacatataaaagattgaaaaggctagtatctttgccatttacatttcatattacaaaattccttcatgtgatagactgatagtgatagcatttagaaaccggtagcacaactaagctttagacacaaaatccatctaaaagcatggtagacacaaacattatggcactgtaacaacaaggcaagctccagaagttcaccagcaatgaattagtgatagaaaaaagaggtaaaaacaacaatcacgacaatgtacaaaaaaaaaaaccatagataaagtcaacaggtaataatagttaccacatatcacacgaatcacaagcaattgatgtatcaaggtttgaatccccttcaatgtaactgaaagtgttacgaatcttgcaaagatctccatctaaacagacaactgcctacaaaatgattaggaaagcttaatgtactttgtagtaactaggaaaacccatatatgatatacttacattttcatcaatatagtgtgtatcgtcaatatagtgtgacggagaagagacgacatcagtctcctcctcaatgcagcaatcttcatctctgcatgtattgcttagtttaacgtcagcagatcacaacagtttttagcaaatacagaaacatatggtacacatgacatctatcacattttaaatcacttgattatactatgccacttaatataaatttatcattataggccacaaataattgaggacaaagagaccgctcagatagttcaggcaagcaaactttatcacaacaacaaacacaaggaaaaaaatagtaccctgataccaaatcctcatcgaccttgctgctttcacctgaatcaaacaccttcataatcaaaacaaaaactcattattcctaaactcaaaagttctacttacaaaaatcatgacaaatgttcagataaaacaaaacaaaaaacaaatatgagacatcttacagggacacatgtaatcaactgaaactctctctgacatagagggcagaggttcataatcgtagaccaattatcaatgcattcaaagcagaacctgaaatttaacagacatagacacaaattaccagactgctccttaacaaacacccatagcaactttgcaatatttaaagacaatgaaaagcgaaaacaagcttttaccagtgctgacagcaatcaagaacgcctctatcaataattatatccatgcaaattccacatctttccccttcaatttcagtcataccctgttcaaagaaattaaaatcaacactgagaagcaataatgcacaaacacagtttattaaaatctcatccttgagattaaaaaccacatatgttccaggaaacgtgacacaaactaaatgaaatggttgacatagcaacttatgttcatgattctaactataaagctacataaacaaccattttcaccggaaattacaagttttaaagctccaggctcgaaatgaaaaaggtaaacccatgattagttcaaccaaaagaaaaatagcccagaaagtacaattttacactaacattatgttcaacttcaacagcttcatcttcaaccaagttactagcgtcaaaatcgagctccatttccttcgtcacaaagatgatcagagatgaaatcgatttcctgtaacaagaacgacgcgtgagaacaaaaaatcgaggcgaaatttttgtaaacccaaagcctacctacctcggatcaaaaacctacgaagaagctgagagaaaaaaatctcagaacccttgatgaaattgaaaaaaaaggcgaagcagcttccaagggcaaaattggaaaaattacgagagggtggagatgacgtcacctctttaggccaagatttttgttttagaaactttgatgagaaaagaattgaaattatgtcttcgtctccctgaagatgaaattttccatttataaaccacacgtgctttttatgggtcgaatctcttaactttctgtttcatgtgggccatttacgtaaatacattgagcccaactttgtaaaacatttatcctttttcttctctaaccccgtactttctttctttagcataaaagacctatagttttcctttatgtaccatggaccaaacatcaaaattgcaaagttcatttacaatttactatgttttttatgtacatttttatcctctcagctgatttaagaatgaagcatagtttctaggttagtagggtaacacatgtccacgtggcgaccattccatacattgtcggctagaatggcgttaacggcgtctgtaggatgaaactggtcccaccagaggtgaccggaggcgtcagagcaagccatctccggcgagatgcatggaagccatcctttgtacctccctagcccacaacacgcatctgtcgtctcattaaaacctgtccacaccacaatacacacacaactaagattcaacaagactcttgacaagttactttcacacttgaagatgatcagaaaactctatatatcactctcagaagactatgtttgagttccaagatactgctatgggattataatgctatgttgttacttgttaccagtcacagtctttttgtgaattgagaattgacatagaagtggtgcttaccgtagtgttggtggttcctgagaatgtccatagcgctttggaacacgtcacagtagataatggatgcccctggaagctcacggttgagtttatctacagtgtatctcatgacaaagttggattccatgatcatgctgttcacttcttctgcacattctccgttctggcttctgtatttccacatgtagtatggtgcacagccaataggtggcagtcccatcaccaccatcctcctcaccttgacattgtacaaggtctgtgaaacaaacataatacttctcttattaggccatcaatatgcagctaaatgaagaggcaactactataactcaatcatgtttaggctatcaatatgcagcttaatgagctttatgctctctacaactatacaaaccagagatccaaaacagaaaaaagggttgtgatttgatcttcataaaggcaacgttttgtgtactaatcaagatgtctcacttatactaactatactaactcagaatcatacttgtctgtcccctataaactctttaccaagagaaaacgtataaagattgattagaggtctaaccttgagctcctgtctcatattagaagccaagaactgattaaaattccatggagtatagagattctgcacattggagatgtttctgatgtagaaatgtatgtaatcattcactccaatcgatatgtagaaaaccgagtttgacactaaacgttccgaagctttctccccaatactcagtatcatctgctgaaacgtatcaacaaactgctcaacttgcatcgcaaatgaaacccgctggccctgcaacaacaaaaattcccccacaggattgaaaaagctgaaagatggtatacagaaaatgaactcaaaagactctgaaaaactgagtattaccaattcagatccacttgataagatgattccagcaccagctgatgcatagtttactccttgaaacatgtcttcaacagtcccagtttgtccaagatagctaggaacgaatggtaagcctaaacgatcagctgttcacaagattttcaatggacaacaaaaaacgaatgattcaacatttcctcaatgaatttgttcctctcaattgtataaagaatcgaacacaagaagtcaacattttcgcttacacttctaagaatcaactgggactataatcaatatccagaaactggggaagaattgtaacctagataatcaactgggattcttccattgcaaaaccttcccgttggttgatgcgtatcgaaatcgcgaccgtagggaagccgatctgctctcgctaaggttccaagaaagttattggttccgctatcgactgaggaatctccgaaaacgaacaacgccggtacaaatggcaaagacggcttcaccgtcggagattgtgctctgcgcgacggcgatggaggtaaaaacggcggaatcgaaggctgaaacgtagaaatcgaaggataaatcggcgagattcttgtagttaagtgatgatcggcgatcaatttgggtctcgtgaagattatcagaagagagaaaacaagaacgagaagcttgatcgacattgagaaagtgcgcgggaaaatgtgcagatgctctgcgaggttttacagagataaagtgaaacgtcgtcgtcttattgatcaagagactatatataagattacaacacattgaaccggctaaattagaacgtagacgcctatttccggtttatatataccgactatagagagacacttatttatgattgcgatacattgaaccgtctaaaccggaaagtaaaagcctaataccggttaaatccatttaaaaaaaaactgatacaaatcatttgtactggtaaactttagtctcaaacttgttatcttccctccaccactgatgaatcccatgagcttgtttgaaatctctcgaggagcttaagttcaccgtcaaaaccgaagatggaatcagatgtaccggctcttgtcctcctaacagcataccgcccaacgagtgctgcgtcgctacccgctctacaaacccaatcccgatttcttccatcttgtttcggtgctcaaagtaaccaacatactctgagcataagtggtcaccagggttgacatacagccgcgggaaccagtcggataaagcttcaaatggatcaggaggtgcgggtaatgcacggtcgttttggctgtagtgttgggtggcttttttggctagagcaagtccagctgtgatcacactgcctacattttagataacatctaggatcaaagtcaaaacagaagtaatgttaaagtttatatctctggttatgtcacacttcaaagcctaatttgatcagtaatataaagaatgaaactgaagggaagatataagttacttacctgcaatgcgtatcccatgtttaatcctcttatccttaattttttcgataggggcagacaaaaacggcggattgaatgcgaaacactcaggaaaaaacccggttctagcgatggttttcccggtaagtaatgccatagatgcaccaagagaatgaccagcaagccaaacactagaaccaccaaccgaagcaacaatgtttctcactgcttggatagctatctcaaaccgtgttgtcgtgtgaagcccgtttctaataacatggatgtcatgctcgatgtcacgggaaatggagtccacttttgtaaccgttcctctgaaagcaatcacaaaacgtggactaaattccattgatttgacggtttgagagagctgttgcggcagtttgtactcatagattcctccgaagatagagttatccgcgtcatcgacaaacttacgaatgaggcggaaatggaaaaactcagaccatattggagataaagctaactcaggaccttctctttgtagctgacggtcacgctcagctacatagattccttgaaccaaagatccagctacggatcgtcgatgatgttcattagccctgcatattcaagaacacaaataagacagacgatttcttacacaagtaaatgaagcattttaaacacaaaggaacaatatttcaggtttttaaacacaagggttaactctaaactctaaagtctataccaattggtgccaaaacattagctaactcaacaacattctatgaacacaaagtttcagttttcgacataacaaaatctcgaaaatggaagtaaatgaagcatttttcacataaaggaacaatttttcaggtcttttaacacaagggttagctctaaactaatggtgccaagacattagctaactcaacaacatttcataaacataaagattcagttttcgacgaaacaaaatctcgaaaaatgcaaaaggagagtagaagtagtagatgcataccaatctatagatgttaagtgtaatggtccagtgagactaaaatcatctctttcactaatcatcattcctttctcttcttctgtaccactaaacatatggtaatcaaatattagtagttcaaaattagagacaataaatcacaagctagcacaaatttagttctaaattcaactaaattcccaatcgcgttataaccctaacacaaaattaaaacaaactcattcaaagaaatgattttgtaaacaacccaacacacacaaaatcattctaaattaatgataatgtcaaatttataatcaaatccaaaacaatcacatagaagaaagattcggattgtgcataaactatcagtgaaaaacagaatgagtataaacgaaccttaagaggttgattcagatctgaagtttggttactgtccagtgttatgtttataaagaatgagaagaagtgtgtgggctcttgaacttaaaagcttcagaaagatacatttcaactatcaccgagctgaaaacgacgtcgtgtcaacctcaaggtactttttgccgtatagagctaaacatttgcgttgtagctattcataacaaatcttttttgattatacaagaacatatccaaatcaattacagactaagtattgattgtaataataatacataatgtccctatatttccctaaaatctgactctttattgttgttgttttttcttgcggatactataataatttagtgtggagaaatatgttttagcaaaagaagaaaacgattaagaaaagttaatgagagttgtcttcagaagaggaatcatatccataaggattattactagcccagttccacaaatctctacacatctcctcaatcccatatttggccctgcatttgttaccaacccaaatttagacttatctcatttacatattcccaactttttagtgtctaacatacaattttgtgcaagtaatatcttcaaagttatagctttatgtatgtatgaacttacttccaattcaattcactttctgctctttccgtcgaggcgtatacaacttcagcatctcccggtcgacgtcccgcgatcaccagagggattttctgatccacaaaagagttcaaaggtttaacaaaacatgacttagaatccaagtatctaaagatgaaagaaagtgtcactttttacctttccggatgctttttcaaaagcatcaaccatttcaagaactgatgttccatttcctgttccgagattgtacacttcacaacctgaatataaacaacacacaaacaaagttaagagacttgagaatgattgtagtagataagagaaacgaatggaaatcataatataccgatcttgcaatcttctagcttacgtagagccgctatgtgtccatcagctaaatcaataacatgaatgtaatctcgaacctaaaacaaaacatgagatcaaaatgttgaaaacctcttcttgttttatgaaaacataaaagacaagtacatacccctgttccatcttttgtattgtaatcatttccaaagacagtgagatgaggtctcctaccaacagccacttgttgtacaaagggcatgagattgtttggaataccacgagggtcttcaccaatgtcaccactaggatgtgcaccaacaggattgaaatacctaagcaatataatcttccattccgggtcagaaccgtatacatcgcggcagatttcctcaatgaatagctacaaaaacatccataataagtcagattcacacttcataattaaccacaatactcaagtgggttttgtcaagaaaacaacctttgttcgtccatatgggttcaaagcagaaattggaaactcctctgtacaaggaacttcttttggagagccatacacagttgctgatgatgaaaacacaagctggaaacagagtaaaagtagctaatcatgagaattgatcaagcaaagtaaaaatggattcgaacttgttgtgtagtggcaaattatacatacatttttgcagccatgttgagccataacttccaaaagagtaatagtaccaacaagattattattataataaagcaaaggcttctctacactctcaccaactgctttaagtccagcaaaatgtatcactgcatcaaacctgtaaaataataataattccacgttcatcaatcaataaagaataaacccaataatatgcattatcactcattgttagtgataaagtgaagaagctaaaagaatgtttgtttttttctcaatcatactttgtttctgagaatatcttctcaagagcagacctgtctcgaagatccacctgcaaattaagacagaacaatcaagttttaacttttgacagtaactaacagattcttttgaccgtaagtaaacataatacaaactaattcagaagaacaagattaaactttatatgaaatacaaaaatagaaagtagaacaattactctttcacatggtactcattaggcctaaactaatatttaatacataaataattatttttgggttataaaacttagagaaaaagaaattgtaataattaacattaacatataaaattacattgacacaacgctatacaagtttttaagccgaaaatgcgaatagttaaaatggtacaaaataacggtaaataacgcttttggtatcgtttttatgattgttaaaacggtaaatacccagtaccattgtagtagttaccaatcaaagcaataataccaaagaaagatacccatgattttggaatcaaacaatcttttagaaaaactgatattttattacgagaatttatgcccaaaattaaataaataaataaacacaaaaaaaagagcctcgtagtcaaatcaatgattaacaagtcaaatcataatcccaaattcgttgaaatcatcaactacacaaacacaaatccttcaatcacacgtttcctagccctaagaaagcgaaatttcaccgaacctggtggaaggagaggcgttctccgtgttcagccgcgagtttcttcacacgttgaagagagacggcggaggaattatcgagattatcaacaactacgacggagtaaccaccgagaagaagttgaagcaccgtgtgactaccgatgtatccagcaccaccgcttactagaacgtttctagccatcattacgaaacagaagaaaggatctttgttttttggtaaaggaaaaagatcaagagaaatgtttttagattgctttgtgatctccagcgaaagagtgcttggaggtttttaatatatagaatcggtgatggttacgtgaataatatggttacattaaacttaggcttaatttaaaaacgcatgtattattacgttttcaattaagggaatggaataatgaaaatgccacgtggtggaatatggtgtggttgtgacgaatatacgagagttacagttatcgaaactactcttttcttgatgaagctggaaatggtaattacggtttgtttattaacggaatcgaaatgaagcaaaactgtggaattgttttttttatgtagaacaaaatcgtggatctttttttgacattttaaaaagtaatgtttttttttacgttacaatgttattttttctctacttatttttttttccttatctatcctatcggctgattcggttagactcgataaaaatacaccgaaatattatagaatggacttctcaaacaagtaatcaggtcgtctgcatttctgactatcagataaaccagggccaaagcccaactgacttctttccaaacaaatgtgtttttgtttttagagaaaatcgaactctggaagtttcactctttaccaaaacttccttttaccactagactatagatgcttggcttctctaaatgtattttcatttgttttactcatactttatttttttatttaaattactacggttcccgtttaaccataaatacacgtttactattctctaattaggatgactccatatcaaatttatgactcaaaaacaaaccaaacttggtcgtttagttttgttgaataaagatgatttagaaacatagagaagtccaacactcctccaagcgtccaaggtgtgtgatagtgtgggtcactttccacttgtcgaagtaagagaggtcccgaattaaaaatttataggtgaagaacaaaggagtcaatgtcaaatgccgaccacgcgagagaaaatgacctgaactgatttttttaacgaagagatgaaagagtaaaatggtcaaaacacactaaggacagccaagaaaaagattcaaggttttagagcttcacatacgaatgttctacacttgaaacaatgaatccaaaccaaactacataagtagcaaatatgttcaccctacccttgaaacaacactattctgcaggtcataaatcagttggggaatcttgtagctcttctcacccacgggaccatcgaacgctgctgctgatgagatccagctccattgttgcctacattgcttctattgtctgcaaaccttctcattctcattctctcttccttcatgtttgcaaaccgagaatccagtgtctgaggccattgcctttgccctcctcctcctccatttgcctgctgctgcactatcttctccctttgctgctgctgctgctgcatgtttaataagcccatcaatcaatcactaataaatctctttatggttatacatgtaagccagtttattgatgcagcaaacaaaagatcgaaggtttaagaagcaggtctaatgcaacataatagatggatatgaataattacctttccgacaaaccctctttgtgaagctctattctgagctggtggagcaataaacctgcacagaaagaaaaaaaaagctgaaaaactgatgaagatctgcaggaacaagccacttataaagaacatcaggagcctagagtatatcagctgagaatttgcaccaatagatcatcgttctgataccaagttcttgatattaaacatttaacttcttaccaccatagaaggatctaagaagaaagccactaacaggttaaagaaagagcctttgataatagaaaaagaaacacttcatgatcctaatgccctcagtgcacaaaaagtatgtagccggctcatgcaggattgaatgaaagaatactaagacactaactccagtttcccggtagctacacgaaaaaaggacaattcttgcattttccaaatgatttagtagttaattggtcaagagtccggacaatgcaacttctttaagactttatcaggaattaagagcagacagctcgaagaatgatccgtcgcatgttcaatcatgaagatctgagcatctgaatcctcatgctgtcttagtaaccgtgcatctacccatttcaatctcccaacaatagaccaactgactcaagctatactctttaggtcacaacaagaagacagaactcaacatttaggaagctgacatgaatgcaactgagttttaagaattaagcacgataacatattgcaccaattggctaaatctgataattaaaactgacttcaagcaaactccaaaaccaatgaccagaaaagtctctcctcaatctgaatgagcttaaactccttcctttatgtcaaacctaccaccccattaaagtttaactcctcctccaaatatcctccttaaactcaactagatggttttgactcgctattttgagccagggttatacagtcatcaatctgatgagcatccatcatccaggaagggaattactatgtttgaaacacgggtttgaaacacaagtatacaaacccgtgtttccttccatagacacaccctatgataagcagcttagaagcttctcctagtagcagaaataatcgaagaccataaaaagagcccatgttaacaaacagatcagagaattatctgtagcaatctagaccttgattgattcgtattagtcatccttccaccattataaggtctaccacgcggagtagcagaagcggctttacgagcaacggttgttgttacaggaaactggtttccttggaaattagacctcttcttagcaaaagcaccctgaaaatatgatataaatcacaacaccacaaaagaaaaaatcttctaagtgacaggaaaatgaagcttagacaacaaattcaccgagaacacaacaacactaacctgtctaacatcagaccgagagtccatataacgctgtgctttcaccgcactattcttcgcagcaccactaaatttctcctttttattctgctcaaacacaatatgccaaatgttcaataaagaatcaaagagagacataaaaatgtaagctttaacaaaccaagttactaaccaatactctctgtttcttgcccttattcacattggtattgctcttttccatcttgataatctcatctatacccacatacaaatgatcatgaagctataaactaaacaaaggatacatctttatatgagtaaataaattaaacataaacacacctaaagacatgtccattttcttctcagtgagagcaacagtctccgtagtaatcggtttctcagtcgccatctacatagaagtggacacaatttaaaccaaagatttcacaaaatcaaatacataaaccctaaaaatcattagttaaggttcaacgaattttgagtttattgaacttatgagaagcaaggagatacaaaagagataaagcaaaccctagtttttgaagattgatctgattcaagaatcgatcaaacaaaaccctcaattaaattgactcgtgtgaagaatggaggagaagctttaagagatgaaatcgtttaccgattttagaaagtcgattgtctcactgagacaaaaaaagagaggctttttatttttaatccgataacgagttaaaccaaagtgaactgagtcaaaacgtttccgatcatgtatacgtggcacattttcattggaagagatgattggttgttttgcatttttttttttcttgttctctcccttgaagttgaagagtttaacttcgctaagaggaacagagatggacttgagtttaatatgttctctgtttctaacaaatgtttttttttttgagttttcacatacaataaaaaatattaaaagttaattataatttataaatgcattattatttgtaatttacgatttaccattttctataaccttaattaatatagtatacaattatttttcttgaaatttataattcatcaataataactaataactattgcattggaaccaatttttttcctaaatatattatttaggaatagaggagtagttgtttttggcaaaatggtagattattataaatctaaagtggtagcagttaaatttgaaaaagatggatggcatagtaactaaaaattatttaccacaataccttaaaaaactatgaagaattgattaattaactaacagactaattaaaacccatatttgtcctttgaaattataattttaaataattttacgaaacctatttaagattacataatattttttttataaacaataacaccttttaaaattattaaaacttattcactatccagtttcctagtttttatatattttgaagcaataatgttgtgcttaaaatatatgacatcatagtgacaaaagagtttatttgtgaaatctcaatcactcattttgaaatgccattaatccgtttagtttccatattattaccaaagcctttcatgtaattggaaacttttgtgtttaagacttaatcttgtgttgcaggagccaaaagaaaaagaaaaaaacaaaaacaaagaaattgtaaagaagtgtaactagaaaaatcgatcactcatcttcaaatgtcattatccatcaagttgtcatattattgctagacagaagtggtcgtctagacttagttgacctgaaaaaagaatagtcaaagtcttttatatgtggacctgaaattagactttgtagtttgtacgtaagtttgtgttgctagagcctatatgagaaaaaaaaaacagtggatattggtgattggtttaatctggttaactccggttatctagatactggtttaatatcatttatcttgtgtatatataaactaaactttagtttattttgttgatgaacgttgtaacaaacacttaattctgttaataaagattcagtttaatctccgatcttttctcttcttttccgttttaccggaacttcgccggtgttaatatggtatcagagcatatcatttgagcttccgcatatcatcggagatgagtctttcattgaatcatctttctcttatgagagtttttcgattcctacaatcgtttgttgcaatttgcaatttcttcgtcagctatctaattttggttctgattcttcttctttccttcgattgaccttttgtggtgacgaatctcactttcttttcatttcgtctcactttctttgatttttctttaacaatttgttaagaatgggttctatgaacaatccgttgaattcttcaagtcttcgtccacctccagctagtgttcctgaacaatcgcgatatcaagctgatcaatatgagaatccgcatcatttgcatacgagtgaccacgcaggtttggttctagtctcagaacgccttaatacagcttcagatttccattcttggcgaagatctatttggatggcattgaatgttaggaataagcttggattcatagatggaacgattgtgaaaccaccattagatcatcgtgattatggtgcttggtctcgttgtaatgatactgtgtctacttggttgatgaactctgtgtcaaagaaaataggccagagtctccttttcattccaactgctgaaggaatttggaagaatatgttgtctaggtttaagcaggatgatgctcctagagtgtatgatatagaacagagacttagcaagattgagcaaggttctatggatattagtgcttactatactgaattgcagacactttgggaagaacataagaattatgtggatcttccagtgtgcacttgtggtcgttgtgagtgtgatgctgcagttaaatgggaaagattacagcagcgaagtcatgttactaagttcttgatgggtttgaatgagagttatgaacaaactcgtaggcatattttgatgctaaaaccgatacgtacaattgaagaagctttcaatattgttactcaagatgagagacagaaagccatacgtcctactcctaaagttgataatgtggcgtttcagactgtttcttataacagtggtgatccttatatggagaatatggaaaatggattcattgcggcttataatacagcaagaccagctcaaattacctctgtgtactaactgtggaaaggttggtcatactgtgcagaagtgttacaaaatcattggctatcctcctggctataaggcagctacatcatacaggcaacctcaaatacaaactcagcctagaatgcagatgccacaacaatctcaaccaaggatgcaacaacctgtagcagcacaaatgcagacaaacatgccaaatacaggaccaatgcagatgatcccttatgcaaatcaaatgcagatggttccatactcgaattcaatgcagatggcgaatgctgcttatgctgaataaggttcttttgttccaatgatgccgcatgttaccagtggaggtaataatctaaacttgcaagatctttctcaagatcagatacaacatcttatttcacaattcaatgctcaagttcgggttcaagagcctgcagctacttctatttatacctctagtcctactgctactattactgaacatggcttgatggcacaaacatctacttctggtacaattccttttccttctactagcttgaaatatgaaaataataatctcacctttcagaatcatactctttcttccttacaaaatgttttatcaagtgatgcttggattattgatagtggtgcttctagtcatgtctgttcggatttaacaatgtttagggaattaatacatgtgtctggtgtaactgttacattaccaaatggtactagggttgcaattacacacacaggaaccatttgcatcacgtctactctcattctgcataatgttttacttgttcctgatttcaaatttaacttgattagtgtctgttgtcttgttaaaaccttgtcttactcggctcatttctttgctgattgttgttatatccaggaacttactcggggcttgatgattgggaggggtaaaacctacaataatctctatattcttgagacacaacgtacatccttctcaccatcactacctgcagctagttcattcactggaaccgttcaagatgattgtcttctgtggcaccagcgtctaggcatccgtcattacctgcattacagaaacttgttagttcaattccttctttaaagtctgtttcatctactgcttcgcattgtagaattagtcctttagctaagcagaaaagattagcatatgtttctcataataatctagcgtctagtccatttgatttgattcatttagacatttggggtccttttagtattgagtctgttgatggttttagatacttcttaactttggttgatgattgtacaagaaccacttgggtttatatgatgaaaaataaaagtgaagtttccaatatatttcctgtctttgttaagctcattttcactcaatataatgccaaaattaaagcaattaggtctgataatgtaaaagaactagctttcaccaaatttgttaaagaacaaggaatgatacatcaattttcttgtgcttacactcctcaacagaattctgttgttgagcgtaagcatcaacacttgttaaacatagctaggtctttattatttcagtcgaatgtacctttgcaatattggagtgattgtgttcttactgcagcttatttgattaatcgtttgccttctccattgttagacaacaaaactccatttgaacttcttttaaagaaaattccagattatactcttttgaaaagttgtctttgctatgcatcaactaatgttcatgataggaataagtttagtcctagagctagaccatgtgtgtttttaggatatccttcaggatacaaaggttataaggttttagatttagagtctcattccatttccattactcgtaatgtggtttttcatgaaacaaagtttccatttaaaacaagtaaatttttaaaagaatctgttgacatgtttcctaattccattttaccattgcctgcaccattgcattttgtagaaagcatgcctcttgatgatgatttacgtgctgatgataacaatgcttctacatctaattctgcatcatctgcatcatctattccacctttacctagtactgtgaatactcagaacacagatgcattagatatagatactaattctgtacctattgctagaccgaaaagaaatgctaaagcacctgcttatttgtctgagtatcactgtaattcggttccttttctttcttcactttcacctactacttctacttccattgaaacaccatcatcatctattccacctaaaaagatcactactccatatcctatgtccacagccatttcctatgataaacttactccactttttcattcttatatatgtgcttataatgttgaaactgagccaaaggcttttactcaagccatgaaatctgaaaagtggactagagcggctaatgaagagcttcatgctcttgagcagaataagacttggattgtggaatctttgactgagggtaaaaatgttgtaggttgcaagtgggttttcacaataaagtataaccccgatggaagtattgaacgatataaagcacggttggttgctcaaggctttactcagcaggagggaattgattatatggagactttttcacctgtggcaaagtttggcagtgtgaaattgttacttggacttgctgctgcaactggttggagcttaacgcagatggatgtttctaatgccttcttacatggagagcttgatgaggaaatctacatgagtctgccacaaggttatactccaccaactggtataagtttgccttctaaaccggtatgtcgactcttgaaatctctttatggcttaaaacaagcatctagacagtggtataagagattatcttcagtcttcttgggagcaaactttattcagtcacctgcagataacactatgtttgtgaaagtcagttgtacttcaatcattgtggtgttagtctatgttgatgacttgatgattgcaagtaatgatagctcagcagtggagaatttgaaagaattattgagatctgagttcaaaataaaggatttaggaccagctagattttttctaggattggagattgctagatcttctgagggaatttctgtctgtcaacgcaaatatgctcaaaatttgcttgaagatgtagggctttctggttgtaaaccaagctcaatccccatggatcctaacctgcacctgactaaagagatgggaaccttactgccaaatgcgacttcctatagagagcttgttggacgattgttatacttgtgcattactcgtcctgatataacttttgcagtacatactttgagtcagtttctctctgcaccaactgacattcatatgcaagctgctcacaaggttctgcgatatctcaaaggtaatcctggtcagggtttgatgtattctgcttcttctgagttgtgtttaaatggtttctcagatgctgattggggtacttgcaaagattcaaggagatctgttactggtttttgcatttatcttggtacatctttgattacatggaagagtaagaagcaatctgtggttagtcggagtagtacagaatctgaatatagaagcttagcacaagccacttgtgagattatctggttgcaacagctgctcaaagacttgcatgtgactatgacttgtccggctaaactcttttgcgacaacaaatctgcactacacttggcgacgaatccagtctttcatgagcgtaccaagcatattgaaatcgactgtcacactgtaagagaccaaatcaaggctggaaaactgaagactctacatgttccaacaggaaaccagcttgcagacattctaaccaagccacttcacccaggtcctttccatagtttactcaaacgcatgtcattatcaaatctttatctccctcttcaacagcaaggaagataagatttgaggggggtgtattggtgattggtttaatctggttaactccggttatctagatactggtttaatatcatttatcttgtgtatatataaactaaaccttagtttattttgttgatgaacgttgtaacaaacacttaattctgttaataacgattcagttcaatctccgatcttctctcttcttttccgtttcaccggaacttcgccggtgttaatagtggaggcagcagaagcttggatgcctagtgtagctatgtcgattgttgtggatattagtagagtatcagattcggtagctcaaaatgcaaatttgagtcggagttgggtacgagcactcaagatgaaaatatctttgcaagattgaagaaggtggctcaagttggagatatagaaagactctacgagttgatagcggaagatccaaacattttagaccactttgatcaagtatctttttgtgagacgccactacacattgcagctgaaaaagggcaaactcatttcgccatggaactaatgactcttaagccgtctcttgctttgaagctaaacgtgttaggtttcagcccactgcatttagccttacaaaacaaccacattcgaacggtgagagggttagtggcaatcaacagcagcttagttagcatcaagggaagaggaatgattactcctttgcatcatgtggctcgaataggagatgcggaattgttgagtgagttcttgtttgcttgtccttcttctataaacgatttgacgagtaagtgtgagacagaagattgcaatcttcaggccagctcgagctccggtgaaaccttgatgatttccttttgctgcttcctcttcacgcaccagaagaggcagccaccaaccaccagtagggcaaagatgcccaacaagatcaggtagaattgtcctggtagcaataatagataggatccatcatatttggtccgctctccatctaaaaatttatctagatattgttcttaatctttgttctaagaagtgtttgattcaataaacatatcttggttgctcaatgatgtctttccgaggagtcaagaagtagagcgcaaatttcgattggaaattgtttcgctgagtttgttttatgaagtaatggtttgttttgttttgaactttgaagggtaactaacagtctaataaatcttagtgctctaacactaaattagttatactttaggacacaagtaaagtataactaactgtctaataagtcttagtgctctaacactaaatttccacaatccatctcttgatatcttcacgtcattcaccggccagctcgagctccggtaaaatcttgatgatttgtttctgctgctagcttcctcttcacgcaccagaagagcgtgaagaggaagcaaccaaccacaagtagggcaaggatgccaacaaaatcaggtagaattgtcctcgtgggataggatctgtaacatctagtccgcccatctacaaaaacatctacaaaaagttaatattaggctaatgggattacccctttgatatttaatggatgtctcttggcgcagtgtttttgaagacactcggtcattccggcgtttcgtttattagatgatatttcagttatttttggatattttggatattttctagtatttactatttttatatatttatcaagtattttggattatttggtctataaataactaatatttttagatatataattatatttcgaatattttcatatatccaaaatattttggttctttcggttatagaatttggtattcattcggttattttcaaatttttggttcgattcggttaatgacctaaattgctactaatgagataactcccaattgttcttctttcatggagtatcatataaatctcaaatggtttatgcatgggttcacatgcaagaggcatagcgatcaaaaattaatcaaaaattacatatcttaattttacgtgagttattggtcaattagatattgacatgtatgaaattatttcttttaaaaaaatttttagcatggatattaattaattacaattaatattgaaattcaaaatagcaatataaatgatttaacattgatttaattggataaaaagttgtatttatcgttataatataatatttctattcgtaaaatcaaatacaaaaatgtacctaataaatgtaaaattttaattatatttgaatcactaataacgctagtgaaagatatttttaattaatgtcattatccatctagttgtcatattattgctagacagaagtgtatggacttagttgacctgaaataagaatagtcaaagtcttttatgtggtggacctgaaattagactaatcaaagtctttgtgtttactttgtagtttgtacgtaagtttgtgttgctagagcctatatgaaaaaaaaaaaaaaacaaagcagcagaagtgtggatgcctagtgaagctatgtcgattgttgtggatgttagtagagtatcagattcggtagctcaagatgcaaatttgagtcggagttcgggtatgagcactcaagatgaaaacatctatgcaagattgaagacggtggctcaagttggagatatagaaagactctacgagttgatagcagaagatccaaacattttagaccactttgataaagtgtctttttgtgagacgccactacacattgcagctgaaaaagggcaaactcatttcgccatggaactaatgactcttaagccgtcacttgctttgaagctaaacgtgtcaggtttcagcccactgcatttagccttacaaaacaaccacattcaaacggtgagagggttagtggcaatcaacagcagcttagttagcatatagacagttgtgcacatttctgtcaagaaccaccaatgttttgcatttaaggttttattgggatggattaagagagcaaacagaaaggaaatcttggactggaaggatgaagatggtaacacagtcttccatatcgctgcattgattaatcagactgaggtaagagaatcattttggtccatgaaaatggataaatatgttcccatgaccttagtataggcattttattcttatcagtgaaggattctttatcctcgaattgttggttgaggtgtagtcaatttttgcaggtgatgaaattgctgcgtaaaaccgttaaagtaaaagccaagaacttggatggcaaaaccgcgatggacatacttcaaactcaccaatctccatgtttccctgtagcaaaaaaacttctccgaagtgctaaagaaagaccattttgtggttccacaacgactcttgcgggatatttgagcagaaatctttcgtttattgagaaacggaactctctcttggggctgagcaatttgagcatgactaaagacaggtctataaacgctagtgacccacgcaatgcaatacttgtggtggctatactgatagtaacagctacataccaggctggtctcagtcctcccggcggattttggcaggatacaaatgatggcaggtatggtcacatggctgggcagatgactatgccgttcatctatgcctttttctttattggcctcaacggatttgccttcgtatcatctctatatgtgataataatcatcacaattggactccccaagtggaagttactttacggttcagtggcggctttaagtatcgctgctttagcatcatacagcactatattcccaagttcatatgacgcaaatagctatctctcagtgctcaccttcctctgtgcatacatatcgattatatgtatcatgatgtttgctacattcatggctttcattgttgataaacatcgtcggtaccaagtggacttcccagcgagctgcttcagctcatctcaggagccatgaagcgtatacctgttattttttgtttatttttgttgctctgttaaagtgtattatctcatgtactatattctcattattatagtatagaatagttattctacttaaaacatgaaacaagagagaagaattgaacaatatagattcaaacatcccatacttattgcttatgctctgtttactgagttcaccggggaaaaatcaaaacccggaatgtgtttgtatccgtaacaactgtttcttgtttttattgtatgggtaagaaaagaaaagaaaaaccaatgtgatttgatttcaaaagacaagaggaagagggatttagttgtcaccatagagccacttctcagagttactagtgtaagaaacaagttcttgaggcttaaaccacagactgatctcatcctttgcagtctctggtccatcacttccatggattatgttcctgcaatttcacatctcaattaccatatcttcacaatgtcataatgttaattaacttcaagaagaaaagagaacatacctgccaacagtaactgcaagatctcctcggattgttccaggctcagatttctgaggatcagtggctccaatcagtttacgtccgtatctgatcacaccatctccttcccagacctaaaaccgagtcataatgttatcgagtttgttatcaaattccaaaagctgaatgaagagtttctctttatcttaccatggcaataacaggaccagagctaaggaagtcacacaaaccattgaagaaaggtctttccttaagatcatggtaatgcttttgtgcgaaatctttagaaggaacaatgactttgataccaactagcttgaatcccttgcgttcgaatcgagaaatgatctctgatatctgagatagtatttgcacatatgattaagaaactataacaactgagaccaattaagactaaacaaaaacaaagcttttcttttttattaccagtcctctttgcacaccatcaggcttgatagcaataaaagttcgttccatctgattgaatcagacacgttcagcgacgaagaacataaagccgataaaccaaaatcaagaatactaataacgattgttacctcagcagcaagaacctcttgatcttgaatcatataagctataacagaaacaatagaacaaaacatcggtcaatccttcaccgcattttaaactaatgaagtctaaaagattcgaactttatcctattctactcaaattaacatgtgactgaacttaagatttggctacattatcaaacatattcaaagaatgaggctgaaaaaaacctgcagcaggaagagctaagagtccagtgatccaactcttagaagcaacaccagaacctgatgatcttgcaaagttagatgcatacaaaggaatttttcctgacgccgaaaccgctgccgcagcaccaatggctcgtccttctgaacaatcaatcatccccaaatcaagaaataagaaacatcagatcttaaaaaactaatttgattagatacttaactattagaatcccaaattcatattctttttctttcaagaacaacacacaaaagcataattctctaaccttacaaaaatgaatccatcagatcaaataatcactgaatcacgaatctcatcaaatttatatcaatttctaaaaattcgataaacgatttcaaaaactaatcaatcaattgatttcacgaagcatctatagagattcactaacggagatgagataatgaacgtaccagagaagaagcgagcatttttagctgaagagagaagagatttggctgctttggaagcagatctgcagatttgagagctcatttttgtttttttgcagagagtgtgatgaagtgaaactgaagccttggaaaatgtggagaatggagatgatgagatctgttgggtcgggtttttatagcccacgtgtttcgggtcgggttatatcggattcgggttagaaaccctacccaaagcataagtaggcagaaagaattatcacgagtcatgtgtttggtaaaatgtatgtgttacgtgggcttagtcagagatttacgacttcatgaagtctactccaattttccaaactctctttttatttttgctgattttgtgttaaatttacatgacaaaataatacacctattcaagatcataaccataagaccatatatggaagattaagagcaaaacatatgaatcttataacaatattgttcaacataaagtttcttgtcccaatgtatgtttaggaaaagctataatacatagaaaggaaattaagaaagagatagttcagcttttatttttgaccacagaaaataaatgatagataaatcatctttagtacttgagagttgagaccaagattgagctcatcattgttgtaagcaccattgtcttcttcattttcgtcaatttcattcactacaatctaccacaaagaatccttattgagatggatattaaaatataaaagttaacccatgtgtagacttgtcaacataaaaaatattattctcctcgaacgatatcaaaataagtttcaaagaaggacatgtttgagattggttggtgtcattatcagaggaaagagttgtatacaaatcggctttgattggtagccctatactgatgtagtattaaggtgtataactttaacaattactaatcacaaaaacgttaattaaagactttacaaaagaatattattttcagctttttatacaactttcatgtatttttttacaatacataattatgtattatttcgtaaaattttacaactaaattttgtatagttttgtattactaattagacccatcattttttaattaaaacttttatgataatcttttatgtaagatatcggacgatttgtgtttcttttaacatttttgtaaaaatgccaaaagatacacagagaagaacatgaacatattaataacttacacatgagagaaaactaacatgaaagcgaacatttcactcgaaacaatgaactttatttatgatgacacacaaaattacgacggaaaacaaattgtttgtggtaatacaccaatgccacatttcaaacacccaagatctcatatgcaaaaaaaaaaaatctcggaaaaaggttggtaaaataaaaacaggcaatagcataatcccaaaaagaaattccttttttttcttcttgtaatataaaatgtttgaaaacctcgaataataagaaaataaaataaaataaaataaagagaactatacttcttcaggccattcaatgacactctccaacgacggtttccaccttcgacataatctccggctagacttctcttcttttgccaccgcagccgcagcttctccggccaatctttctgcctctagttctctaagaaaaactccaaaagaagccaacttggcgtctcctcctttgtttgcaccgtctgcattaagctggaaaagaatgattttctctaactcatctctccttagaacaatcttcaactttcgatcttttcttttgtaatctttcttcatcacttcttcaaatttttcttcttcttcttcagcaatattttcattgtttcttccgaccaaacagtttcccattatgatcaattttaatggagttttagaacccacattaaaagaaagaagaatgaaagaaaagaaaaaggaaacttgggatatgcccaagaaaaaaactcttgttcttcttccttttttctcttctgtgtggttgattttgatctttaagaatcatggagccattgtggtaatatatataatgtgtgtgtgcaaagagaggaggggagagacagatagttgactcctatagtaaggctgctaaattggtttggttttaattttggaattgaaaagatctttagacctgtgaaagttacaatagttgaacccaggcccggctctagcacatggtacaaaaaccctaaacataattacatggtacaaaaaccacaatttcaaactcaatacatcttttaataattatatgtcgcgcaatgcatggtgaggattaaccatctaagaatttatctaagaatttattagttttcttgataatataattttggtcgtgatcataacaaaatctgaaatattcaattattctaatgagatagtatgaactatatttgctatcatgtaataaatttaaatttaaatcaacaaaccaaacgtcctatctttcgcagataagtgtttactaatctgattttcattgttttggcgtctgaatttttctattagtattgacgtagatttcgattatagtataaaaataactaataaaatatcattgtagaagacatttgacgcaagctcatgttctgtctgattagttgggtctttaaaccaaaccaaaaccgtgttaaaaatcctggcacatttcatttataatgatacaaccaccaacctaccttgttattaatttattattatttatttttaacaatcatcattagatactataataaactaatttatcaatttgaaagaacccaataattgtctctctttttttgtattaattctaatcattcttgttagttatatgacaaatggaagtaaagtatttcaaacctcaaaatgatttgccgtaattcaaaataaagtattatgccaagcatttgtaaatatgaagtcttcaacgaaaataaaactgcaaccttattgcaatgtggtaccccaatcattaaaaaaattcagaatccaaaacttaatatttatattagtttttagaattggatttaaaaattatcagataatgatatagttataataaatcggcttctaaatactataataaacctttctcatctcgaaaagacgtttctataaactcttacgcgttgtataattgatctgattcaccaattcttataatggatgtgattaacctgatccaaaagaactttatagaaaattgtttaaggacaagtttaatcacatttgtaatttaattattttgttctctggtatatgcttattttgtttaacattattaactgcatttcaatagctatttagattatattttagtggctattcatgcacttaaatacaaaccgtgatgagcctgatggcatagcccgatccttagtgacttttgcattcctaccatgccaagttccaatcattggagtgcatgttttcattatttcatatctagcatttaggagaattctcactgatctaaacacaacctcagtaaattttaacaacttatagacatcttcaacttttcatgagcatagaatctttataatattatatgtaatatgtgcactatattagataacaataatcacacaatataaactctatgcattgatataagtttgtgcaagtataaaactaaaacatataatgctgagattttacatatgaaatgaaaacatatcaaatttgaagaatcactttgtaaataaaaaagaagtttcacacttaaaatagagtaatgaattgtgttattccaaatttagaataacacactacttttaactctatttttggaatgcgacttggagataatgctcttaaactaccgggtttcaagccgcgaactcactcaatcacttagcttttaattcaaacatagcaatctgtccacgagagagcgagagagaacaaaatgacgtcgcagaaaagattcatctttgaggtggaagccgctaaggaagccacagatggaaatccctcggttggtcctgtctatcgtagtacttttgctcagaacggattcccgaacccgatcgatggtatccaaagctgctgggatattttccggtccgaatctcttttcttttaatgtgttctattgtttaagtctattgtttttttttttctccatgcattgctatttggacgacattttgtgtgctcatatacgttttgatttagagtgtagcatgcattatcattttgaaacatgttaatatgataaacgtatatcgatcagggatcttgggaattttatttcatgttttgtacgtaagaatgattactaagttatatctttggctcaaaatgaatgaatactgaattgtttggtgtcaattcttgtaagatccatttttagcttcttttcttgctcttacgtgatggttttgtctgacatggtacatggcattatttaaataattttggggtggccttctatattaattgcaatcggtcgtttaaagattttgtttaacgatatatagttctttctctaacaagtttttaactttttattattatccagtagcttctgaattttaataataaatgtgtttttttttttttctattgcgtgcttctgcttgcagcacggctgttgagaagtatccaaacaatcgaatgcttggtcgccgtgagatttcgaacgggaaggtgacttgttatcttttcatttgttttgtaatttagcttgtgatttagtgttttcgagaggatagctaatatctttctgccctttttctataattcttaggcaggaaagtacgtgtggaaaacatacaaagaagtatacgacattgtcataaaacttggaaattctctacgtagttgcgggattaaggaggttcaaattcatatttactatatatttttcatatgtcctcaaataatggttttagtgttccttaagtttgtctcttatgctctgatatgtggaaatgtagggagaaaaatgtggtatatatggtataaattgttgtgagtggatcattagcatggaggtatgtactggaatgtataatctttgctaatacgagcattcattgtttttactttgacttgattgatagtgcacttgtgatgcaggcatgtaatgcacatggcctttattgtgtccctttatacgatacgttaggtataaatgtaccaacctttatcatgtttttggatgattctactcttttgagtgttcgagtatagtaacattctggttttgaacacaggcgctggtgcagtggaattc

SEQ ID NO: 567 - DNA, 108598 bp, Arabidopsis thaliana
cttagcacaagccacttgtgagattatctggttgcaacagctgctcaaagacttgcatgtgactatgacttgtccggctaaactcttttgcgacaacaaatctgcactacacttggcgacgaatccagtctttcatgagcgtaccaagcatattgaaatcgactgtcacactgtaagagaccaaatcaaggctggaaaactgaagactctacatgttccaacaggaaaccagcttgcagacattctaaccaagccacttcacccaggtcctttccatagtttactcaaacgcatgtcattatcaaatctttatctccctcttcaacagcaaggaagataagatttgaggggggtgtattggtgattggtttaatctggttaactccggttatctagatactggtttaatatcatttatcttgtgtatatataaactaaaccttagtttattttgttgatgaacgttgtaacaaacacttaattctgttaataacgattcagttcaatctccgatcttctctcttcttttccgtttcaccggaacttcgccggtgttaatagtggaggcagcagaagcttggatgcctagtgtagctatgtcgattgttgtggatattagtagagtatcagattcggtagctcaaaatgcaaatttgagtcggagttgggtacgagcactcaagatgaaaatatctttgcaagattgaagaaggtggctcaagttggagatatagaaagactctacgagttgatagcggaagatccaaacattttagaccactttgatcaagtatctttttgtgagacgccactacacattgcagctgaaaaagggcaaactcatttcgccatggaactaatgactcttaagccgtctcttgctttgaagctaaacgtgttaggtttcagcccactgcatttagccttacaaaacaaccacattcgaacggtgagagggttagtggcaatcaacagcagcttagttagcatcaagggaagaggaatgattactcctttgcatcatgtggctcgaataggagatgcggaattgttgagtgagttcttgtttgcttgtccttcttctataaacgatttgacgagtaagtgtgagacagaagattgcaatcttcaggccagctcgagctccggtgaaaccttgatgatttccttttgctgcttcctcttcacgcaccagaagaggcagccaccaaccaccagtagggcaaagatgcccaacaagatcaggtagaattgtcctggtagcaataatagataggatccatcatatttggtccgctctccatctaaaaatttatctagatattgttcttaatctttgttctaagaagtgtttgattcaataaacatatcttggttgctcaatgatgtctttccgaggagtcaagaagtagagcgcaaatttcgattggaaattgtttcgctgagtttgttttatgaagtaatggtttgttttgttttgaactttgaagggtaactaacagtctaataaatcttagtgctctaacactaaattagttatactttaggacacaagtaaagtataactaactgtctaataagtcttagtgctctaacactaaatttccacaatccatctcttgatatcttcacgtcattcaccggccagctcgagctccggtaaaatcttgatgatttgtttctgctgctagcttcctcttcacgcaccagaagagcgtgaagaggaagcaaccaaccacaagtagggcaaggatgccaacaaaatcaggtagaattgtcctcgtgggataggatctgtaacatctagtccgcccatctacaaaaacatctacaaaaagttaatattaggctaatgggattacccctttgatatttaatggatgtctcttggcgcagtgtttttgaagacactcggtcattccggcgtttcgtttattagatgatatttcagttatttttggatattttggatattttctagtatttactatttttatatatttatcaagtattttggattatttggtctataaataactaatatttttagatatataattatatttcgaatattttcatatatccaaaatattttggttctttcggttatagaatttggtattcattcggttattttcaaatttttggttcgattcggttaatgacctaaattgctactaatgagataactcccaattgttcttctttcatggagtatcatataaatctcaaatggtttatgcatgggttcacatgcaagaggcatagcgatcaaaaattaatcaaaaattacatatcttaattttacgtgagttattggtcaattagatattgacatgtatgaaattatttcttttaaaaaaatttttagcatggatattaattaattacaattaatattgaaattcaaaatagcaatataaatgatttaacattgatttaattggataaaaagttgtatttatcgttataatataatatttctattcgtaaaatcaaatacaaaaatgtacctaataaatgtaaaattttaattatatttgaatcactaataacgctagtgaaagatatttttaattaatgtcattatccatctagttgtcatattattgctagacagaagtgtatggacttagttgacctgaaataagaatagtcaaagtcttttatgtggtggacctgaaattagactaatcaaagtctttgtgtttactttgtagtttgtacgtaagtttgtgttgctagagcctatatgaaaaaaaaaaaaaaacaaagcagcagaagtgtggatgcctagtgaagctatgtcgattgttgtggatgttagtagagtatcagattcggtagctcaagatgcaaatttgagtcggagttcgggtatgagcactcaagatgaaaacatctatgcaagattgaagacggtggctcaagttggagatatagaaagactctacgagttgatagcagaagatccaaacattttagaccactttgataaagtgtctttttgtgagacgccactacacattgcagctgaaaaagggcaaactcatttcgccatggaactaatgactcttaagccgtcacttgctttgaagctaaacgtgtcaggtttcagcccactgcatttagccttacaaaacaaccacattcaaacggtgagagggttagtggcaatcaacagcagcttagttagcatatagacagttgtgcacatttctgtcaagaaccaccaatgttttgcatttaaggttttattgggatggattaagagagcaaacagaaaggaaatcttggactggaaggatgaagatggtaacacagtcttccatatcgctgcattgattaatcagactgaggtaagagaatcattttggtccatgaaaatggataaatatgttcccatgaccttagtataggcattttattcttatcagtgaaggattctttatcctcgaattgttggttgaggtgtagtcaatttttgcaggtgatgaaattgctgcgtaaaaccgttaaagtaaaagccaagaacttggatggcaaaaccgcgatggacatacttcaaactcaccaatctccatgtttccctgtagcaaaaaaacttctccgaagtgctaaagaaagaccattttgtggttccacaacgactcttgcgggatatttgagcagaaatctttcgtttattgagaaacggaactctctcttggggctgagcaatttgagcatgactaaagacaggtctataaacgctagtgacccacgcaatgcaatacttgtggtggctatactgatagtaacagctacataccaggctggtctcagtcctcccggcggattttggcaggatacaaatgatggcaggtatggtcacatggctgggcagatgactatgccgttcatctatgcctttttctttattggcctcaacggatttgccttcgtatcatctctatatgtgataataatcatcacaattggactccccaagtggaagttactttacggttcagtggcggctttaagtatcgctgctttagcatcatacagcactatattcccaagttcatatgacgcaaatagctatctctcagtgctcaccttcctctgtgcatacatatcgattatatgtatcatgatgtttgctacattcatggctttcattgttgataaacatcgtcggtaccaagtggacttcccagcgagctgcttcagctcatctcaggagccatgaagcgtatacctgttattttttgtttatttttgttgctctgttaaagtgtattatctcatgtactatattctcattattatagtatagaatagttattctacttaaaacatgaaacaagagagaagaattgaacaatatagattcaaacatcccatacttattgcttatgctctgtttactgagttcaccggggaaaaatcaaaacccggaatgtgtttgtatccgtaacaactgtttcttgtttttattgtatgggtaagaaaagaaaagaaaaaccaatgtgatttgatttcaaaagacaagaggaagagggatttagttgtcaccatagagccacttctcagagttactagtgtaagaaacaagttcttgaggcttaaaccacagactgatctcatcctttgcagtctctggtccatcacttccatggattatgttcctgcaatttcacatctcaattaccatatcttcacaatgtcataatgttaattaacttcaagaagaaaagagaacatacctgccaacagtaactgcaagatctcctcggattgttccaggctcagatttctgaggatcagtggctccaatcagtttacgtccgtatctgatcacaccatctccttcccagacctaaaaccgagtcataatgttatcgagtttgttatcaaattccaaaagctgaatgaagagtttctctttatcttaccatggcaataacaggaccagagctaaggaagtcacacaaaccattgaagaaaggtctttccttaagatcatggtaatgcttttgtgcgaaatctttagaaggaacaatgactttgataccaactagcttgaatcccttgcgttcgaatcgagaaatgatctctgatatctgagatagtatttgcacatatgattaagaaactataacaactgagaccaattaagactaaacaaaaacaaagcttttcttttttattaccagtcctctttgcacaccatcaggcttgatagcaataaaagttcgttccatctgattgaatcagacacgttcagcgacgaagaacataaagccgataaaccaaaatcaagaatactaataacgattgttacctcagcagcaagaacctcttgatcttgaatcatataagctataacagaaacaatagaacaaaacatcggtcaatccttcaccgcattttaaactaatgaagtctaaaagattcgaactttatcctattctactcaaattaacatgtgactgaacttaagatttggctacattatcaaacatattcaaagaatgaggctgaaaaaaacctgcagcaggaagagctaagagtccagtgatccaactcttagaagcaacaccagaacctgatgatcttgcaaagttagatgcatacaaaggaatttttcctgacgccgaaaccgctgccgcagcaccaatggctcgtccttctgaacaatcaatcatccccaaatcaagaaataagaaacatcagatcttaaaaaactaatttgattagatacttaactattagaatcccaaattcatattctttttctttcaagaacaacacacaaaagcataattctctaaccttacaaaaatgaatccatcagatcaaataatcactgaatcacgaatctcatcaaatttatatcaatttctaaaaattcgataaacgatttcaaaaactaatcaatcaattgatttcacgaagcatctatagagattcactaacggagatgagataatgaacgtaccagagaagaagcgagcatttttagctgaagagagaagagatttggctgctttggaagcagatctgcagatttgagagctcatttttgtttttttgcagagagtgtgatgaagtgaaactgaagccttggaaaatgtggagaatggagatgatgagatctgttgggtcgggtttttatagcccacgtgtttcgggtcgggttatatcggattcgggttagaaaccctacccaaagcataagtaggcagaaagaattatcacgagtcatgtgtttggtaaaatgtatgtgttacgtgggcttagtcagagatttacgacttcatgaagtctactccaattttccaaactctctttttatttttgctgattttgtgttaaatttacatgacaaaataatacacctattcaagatcataaccataagaccatatatggaagattaagagcaaaacatatgaatcttataacaatattgttcaacataaagtttcttgtcccaatgtatgtttaggaaaagctataatacatagaaaggaaattaagaaagagatagttcagcttttatttttgaccacagaaaataaatgatagataaatcatctttagtacttgagagttgagaccaagattgagctcatcattgttgtaagcaccattgtcttcttcattttcgtcaatttcattcactacaatctaccacaaagaatccttattgagatggatattaaaatataaaagttaacccatgtgtagacttgtcaacataaaaaatattattctcctcgaacgatatcaaaataagtttcaaagaaggacatgtttgagattggttggtgtcattatcagaggaaagagttgtatacaaatcggctttgattggtagccctatactgatgtagtattaaggtgtataactttaacaattactaatcacaaaaacgttaattaaagactttacaaaagaatattattttcagctttttatacaactttcatgtatttttttacaatacataattatgtattatttcgtaaaattttacaactaaattttgtatagttttgtattactaattagacccatcattttttaattaaaacttttatgataatcttttatgtaagatatcggacgatttgtgtttcttttaacatttttgtaaaaatgccaaaagatacacagagaagaacatgaacatattaataacttacacatgagagaaaactaacatgaaagcgaacatttcactcgaaacaatgaactttatttatgatgacacacaaaattacgacggaaaacaaattgtttgtggtaatacaccaatgccacatttcaaacacccaagatctcatatgcaaaaaaaaaaaatctcggaaaaaggttggtaaaataaaaacaggcaatagcataatcccaaaaagaaattccttttttttcttcttgtaatataaaatgtttgaaaacctcgaataataagaaaataaaataaaataaaataaagagaactatacttcttcaggccattcaatgacactctccaacgacggtttccaccttcgacataatctccggctagacttctcttcttttgccaccgcagccgcagcttctccggccaatctttctgcctctagttctctaagaaaaactccaaaagaagccaacttggcgtctcctcctttgtttgcaccgtctgcattaagctggaaaagaatgattttctctaactcatctctccttagaacaatcttcaactttcgatcttttcttttgtaatctttcttcatcacttcttcaaatttttcttcttcttcttcagcaatattttcattgtttcttccgaccaaacagtttcccattatgatcaattttaatggagttttagaacccacattaaaagaaagaagaatgaaagaaaagaaaaaggaaacttgggatatgcccaagaaaaaaactcttgttcttcttccttttttctcttctgtgtggttgattttgatctttaagaatcatggagccattgtggtaatatatataatgtgtgtgtgcaaagagaggaggggagagacagatagttgactcctatagtaaggctgctaaattggtttggttttaattttggaattgaaaagatctttagacctgtgaaagttacaatagttgaacccaggcccggctctagcacatggtacaaaaaccctaaacataattacatggtacaaaaaccacaatttcaaactcaatacatcttttaataattatatgtcgcgcaatgcatggtgaggattaaccatctaagaatttatctaagaatttattagttttcttgataatataattttggtcgtgatcataacaaaatctgaaatattcaattattctaatgagatagtatgaactatatttgctatcatgtaataaatttaaatttaaatcaacaaaccaaacgtcctatctttcgcagataagtgtttactaatctgattttcattgttttggcgtctgaatttttctattagtattgacgtagatttcgattatagtataaaaataactaataaaatatcattgtagaagacatttgacgcaagctcatgttctgtctgattagttgggtctttaaaccaaaccaaaaccgtgttaaaaatcctggcacatttcatttataatgatacaaccaccaacctaccttgttattaatttattattatttatttttaacaatcatcattagatactataataaactaatttatcaatttgaaagaacccaataattgtctctctttttttgtattaattctaatcattcttgttagttatatgacaaatggaagtaaagtatttcaaacctcaaaatgatttgccgtaattcaaaataaagtattatgccaagcatttgtaaatatgaagtcttcaacgaaaataaaactgcaaccttattgcaatgtggtaccccaatcattaaaaaaattcagaatccaaaacttaatatttatattagtttttagaattggatttaaaaattatcagataatgatatagttataataaatcggcttctaaatactataataaacctttctcatctcgaaaagacgtttctataaactcttacgcgttgtataattgatctgattcaccaattcttataatggatgtgattaacctgatccaaaagaactttatagaaaattgtttaaggacaagtttaatcacatttgtaatttaattattttgttctctggtatatgcttattttgtttaacattattaactgcatttcaatagctatttagattatattttagtggctattcatgcacttaaatacaaaccgtgatgagcctgatggcatagcccgatccttagtgacttttgcattcctaccatgccaagttccaatcattggagtgcatgttttcattatttcatatctagcatttaggagaattctcactgatctaaacacaacctcagtaaattttaacaacttatagacatcttcaacttttcatgagcatagaatctttataatattatatgtaatatgtgcactatattagataacaataatcacacaatataaactctatgcattgatataagtttgtgcaagtataaaactaaaacatataatgctgagattttacatatgaaatgaaaacatatcaaatttgaagaatcactttgtaaataaaaaagaagtttcacacttaaaatagagtaatgaattgtgttattccaaatttagaataacacactacttttaactctatttttggaatgcgacttggagataatgctcttaaactaccgggtttcaagccgcgaactcactcaatcacttagcttttaattcaaacatagcaatctgtccacgagagagcgagagagaacaaaatgacgtcgcagaaaagattcatctttgaggtggaagccgctaaggaagccacagatggaaatccctcggttggtcctgtctatcgtagtacttttgctcagaacggattcccgaacccgatcgatggtatccaaagctgctgggatattttccggtccgaatctcttttcttttaatgtgttctattgtttaagtctattgtttttttttttctccatgcattgctatttggacgacattttgtgtgctcatatacgttttgatttagagtgtagcatgcattatcattttgaaacatgttaatatgataaacgtatatcgatcagggatcttgggaattttatttcatgttttgtacgtaagaatgattactaagttatatctttggctcaaaatgaatgaatactgaattgtttggtgtcaattcttgtaagatccatttttagcttcttttcttgctcttacgtgatggttttgtctgacatggtacatggcattatttaaataattttggggtggccttctatattaattgcaatcggtcgtttaaagattttgtttaacgatatatagttctttctctaacaagtttttaactttttattattatccagtagcttctgaattttaataataaatgtgtttttttttttttctattgcgtgcttctgcttgcagcacggctgttgagaagtatccaaacaatcgaatgcttggtcgccgtgagatttcgaacgggaaggtgacttgttatcttttcatttgttttgtaatttagcttgtgatttagtgttttcgagaggatagctaatatctttctgccctttttctataattcttaggcaggaaagtacgtgtggaaaacatacaaagaagtatacgacattgtcataaaacttggaaattctctacgtagttgcgggattaaggaggttcaaattcatatttactatatatttttcatatgtcctcaaataatggttttagtgttccttaagtttgtctcttatgctctgatatgtggaaatgtagggagaaaaatgtggtatatatggtataaattgttgtgagtggatcattagcatggaggtatgtactggaatgtataatctttgctaatacgagcattcattgtttttactttgacttgattgatagtgcacttgtgatgcaggcatgtaatgcacatggcctttattgtgtccctttatacgatacgttaggtataaatgtaccaacctttatcatgtttttggatgattctactcttttgagtgttcgagtatagtaacattctggttttgaacacaggcgctggtgcagtggaattcatcatttctcatgcagaggtttcaattgctttcgtggaggagaagaagatccctgaggtattattgcaactttgtttttaactcttgagataggctagtgcttttgacacttttttatgataatttaacccctttttcccttttgggtaccagctttttaagacttgtccaaactcaacaaaatatatgaagagtgagtaatactaattgaacctttcactactttttttggtatacttgtgatgctaatgatcaattgtgattaatcgaaaatgaagctgttgtgagctttggcggtgtcaaaccggaacaaaaagaagaagctgaaaaattgggattggtaatacattcgtgggatgagtttttgaagctggtaagagactattatttgcttctttaacaatgatcattcacatataatatggtataatgtatattctgtcaatgacattaacagggtgagggtaagcaatatgagcttcccattaaaaagccaagcgacatatgcacgattatgtatactagcggaacaactggtgacccgaagggagttatgatttcaaatgaaagcattgttactataactactggagtgatgcatttcctagggaatgtgaatgcaagcgtgagttttatttcatttgtcatgatttcacatgaagcgacagtttttaagttttaagttgtactgaattttgcaaaacaaatcagctatctgagaaggatgtgtatatttcttatcttcctctcgcgcacgtctttgatcgggcaatcgaggaatgtattattcaagtaggtggttcaattggtttctggcgcggggtgagtggatacagctcaaatctgaccttcctactagttattaaattttaatatatgcattatatatttctatactatgtccttaggatgtcaaattgttgattgaagaccttggtgagctaaaaccaagtatcttttgcgccgttcctcgtgtcctagatcgagtatacacaggtatcaaatatttctcgagctcttgtataaaatgctttcatccaatgaagagcatcatatacttggtttcataagttcaaacccacttatatgtaatttattatatatctccaacaggactacagcagaaactatctggtggtggtttcttcaaaaagaaggtgtttgatgttgctttttcctagtaagtcctttgtttgtcacctaaacctgatcttaaacgcatctaaatatctaacacactcactcttctttagtaaatttggaaatatgaagaaaggacagtctcatgtggcagcttctccattttgtgacaaacttgtattcaacaaggtaagtagtctctaaaaataactatctgaaactcttttgagacttcaacactttttcataatcattctctcaaggttaaacaaggacttggaggcaatgtgaggattattctgtctggagcggctcctctcgctagtcacatagaatcttttctaagagttgttgcatgttgtaatgttctacaaggatatggtaaacctttagacctggaagagattcaattagctaataatctctcgatcttatgattgtttttttttgtaggtctaactgagagttgtgctggaacttttgcaacgttcccagacgaactagacatgcttgggactgttggtccacccgtgccaaacgtcgatatacgccttgaatctgtcccggaaatgaattatgatgctcttggaagtactccgcgaggcgaaatatgcatacgaggaaaaactttattttcagggtactacaaacgtgaagacctcacaaaagaggtttttatcgacggatggttgcacacaggttactaaaaacctcaacactttgatcattttgctttcctatatatagcattttaaatatcagttcttatttaccttatttaatttaactatgtgtatcttaccaggtgatgttggtgagtggcaaccaaatggaagcatgaagataattgaccggaaaaagaacatcttcaaactcgcgcaaggagagtatgtcgctgttgagaatttagaaaatgtctacagtcaagtagaagttattgaatcggtaagttgaactctaccccattgatttataattgttatgtttcactggtttccaagtcaaaactaattggcaatgagtatattgtatgtcatttatatatgactctagatctcctcttactctcatgtgagattcctaagaatattgtttcttacatcttcatcaatatgtttttattagatatgggtatatggaaacagctttgagtccttccttgtcgcaatcgctaacccggcccaacaaactcttgaacgatgggctgtggagaatggagtgaatggagacttcaactccatctgccaaaacgcaaaggcaaaagcattcatacttggagaactcgttaaaacagccaaagagaacaaggtttctttatttttctcttctcttctttatttggagtttttggttttggttgtttaccctccgcgtttgtagttgaagggttttgagatcataaaagatgttcatctggaaccagtggcgttcgacatggaacgagaccttcttactccaacctacaaaaagaagaggcctcaattgctcaaatactatcaggtaattttaaacattttaggcgatattatgcttataatattttcggttttaaactctctttctattggtgttatttaacagaatgtgatccatgaaatgtacaagacaacaaaggaaagtctagcttccggacagtaaatttcttctacttatttaattcattctttcttttgcataagacatgactgcttcatatatggttgttctcttactcttaataagtttgtattaatatcttgagatgttacatagcatcttgacatgctagaacatgtcttaagtttttcttctttttaaagttcctacattattaaggttccagactttgtacaaacttgaacccggaatctcgcaatcagttggagtaaatttcattaatggatttgaatgtaactaataagtaaattttgttggaaaacagattaaatttttatgagacaaaatttgagttttttcaaagatgtcgatttattttgtaattcgttatttttatttacagaattttacgtttcctaaaaattaaaatgaagtttctttattttaacatatacagtattaattgttaatgtgttacgcaatcgaatcatataatatttttcttaaagtttcaatgaattaaatgtccttatgtcaccactcatattaaaaacacacacacatcttgaatgttgtcaataacaaaaacttgtacctacttaactgtgtgaattgtcagcattctgttttgtcaaacaagcaacttgcgtaaagccgtagacacattgtaaccataaattacaattttaaacaagtatccttagttcacttgtaaaaacaccaaagacaaagcctagatgtcacagtctcacagatctctttaagtgaggcgaatgattgtaaatagctttaatatgtatcatttatccatcaatatctcgatccatatccatcccattttcattattatatttatcgaaaaatattcgagccatggtatatatattgataggtatgcttcgagagtgattataacaatctagtgggaagctagagtcacaaaaagaaacattattgcgaagtggtggacaatctaagctagaaacggttctcattatttaattcttcttgtttgatcattcccatttggttaattgaataatgtattcgatcgtgacttcatgttctcaatagatagtattttgtctgagtaataaaagacttaaggtaagaaaaccctttaggagaggaaatgtgacgtgacattgtccttgaggtctaataatgaacaataaacggtttatcttttatcagcttatatgtgacgaccgttgcaacagcgtcatgtgatctttttttatttgatcgagactttcgttttacaacaaaccggaccggtcaatctaacaaaccaaccccatatagacacgtaacgaaaccatcatactccactttttcaattgcttagattttgaatcctcattcacattctaaatttccgagtctccaccgttagcagatatactgaaaaatcaataaaattcgaccccaatatataagaacaattataatttatttattttaagaatgctatcgaccggtttgctcattggttaaatgatagcgatcccataacaaatcagacaccggtcaggaactctttttttcctttatttaatatgtctatacgaaggacaataatatattcttcttttcttttgaataactttcggcaataagttttactttttaaaattcaatgacgtgtttttcaattttcatttataggaaaatgtaagaaaatattcccaagaattaatttttttttttttttgttaagcccaagaattatttttatcaattataggagttttttttcatgatatctttataaattctgcataaagttgaccaacggaatacctaggaaacccattttggatttttgggttgatcactatccctgctcatatattccaagtaatcatcctcaaaagagaaaattctaagaaaagtttaaaatgttgtacctatccattcataaaactagtattgttgtcgacttgtcggcatttcttcctttattcttttaatttgagttttttgaaacatatgcaacttgacgaacaattatacatgcaagagttatgtaacagacgtgtgtcttttactcgtgatatgtgtccgttagtggacggacctccattcgcaggcaaatgatgtttcttttgtttatttccactaacatttaacgtatataattataattgcctggcgcatttgaactattcgacgaatacttatcgatggaaaagaacagatattttctcaaccaggtttagattttgaagatttacaagaatagaaaacttaatgaattgattgtactacgtattttattggatttaataataagttaatggagttgtatctttttttttctctgtcacttatcaatatgtatattaagtactttggatagtattcacacacactaaaaaaaaaaaaaaaattttatgtcacatacatgcatcaattgatggcggtttgtttggcatgaaatataaataactaacatattattttgaatttacagaagtttaaagttgttataattttaggtttgaatacggatagttaaagagttgttataatctttgattgatgcccgaagatattagtagtactattgaagtcagaatttattagcctgatcgatggctaaatcttcgatgttcccaccgactctttaatttgacggattcaatcttgcatgcaaaccacttgactagcagacaaaaatatatatatatatttaatcacaaacaatgtggtctaccaagatgtctagattacggtttctatttaagtgctttccttgttccatgaaaaaacgtatcacgatagaagtggccgtctctagaccgtcatttcatttttttacgtttttttctttaatttttttcatttttaataatagtacacgacaagagagcttgtgtatatatatataagcatgtgttaggtatataaaatactttctgccttcaacggatgtgttagttttcgaacacttaaagaggagttgttatcatgaaaacggatactactctacccataatcgccgaagacggcgactgtggcgacagcaagagggtaagagtggctgattcaggatataccgtcggcggtcaggacagacctgtaaaattaccaaaaatcgaaaacaatggtacgtagttttactagatatgaaagacactaattttccttgttttctgaattttcaagagtgtttctaaatattgttcattctaaataattctttaaaacatttcatacttgaagaaaaactatatttacttttattttgtttaaggtcttaacaacataaaaataaacacagatttagtgtggttttatcgaaacaaaatttattttaaaacatcattacaacaatgtttttccaccatcgaggactaataaagtttcttctacatgtatcttataggagatgttgggacatcagaaggaacacacgttttagtcgatgcactaatggccgaagtggcaattaaagataaagacggaaaaacaaacgccggccacggtgtagtctcagtcatgggacgacagagagctatgacaaccgccgtttccaccgtcgtcgacgagattccgtcttatgacattttcggaatcttcgacggtcttaggctcgctaaattctttgaggacaggctgcgtcggctcgtgaaagaggaggtgaaagcatgccacggccgtggggtggctgcggactggaataaagttatgaaatcctgtttttccgaggcggtagggacggtgggaaccaccacttccgcggtggttacgatagtcggaaaagaggaagtgattgtgttgtgccgtggcggcgcaagggtggttttatactctcacgacggagttgctttgcctctctgtcatatccatcatcacaaggtaaccttttgttattttagttatttcttttttggggtcaattaatgaaaataaaatgatgctataatgttttttctaatttgaaaaaaaaaaattataagcctagtgtgtgttggtccatgtttatattttagtacttaaccaaaaatatcttttgtcacctttttaggatggtgtagagcaaattctaaagatccataaacgaaaaaagatagacgactttattgtacttgcatgcgatggtctatgggacgttgtctccgacgatgacacatatcagcttgtgaaacgttgtctttacggcaaattaccaccagacgggttagattctttactaggaatattaattttttttttttttttgtctaatatatttaacgacttatgtgagtttcaagattaatatcgacttttctctgttttcgtgtgaactaagattattttacaataagatttatgaatctgatactttttggctaaaacatttgacaggtgtataagtgaatcaagctcgacaaaggctgcagtgatattggcagagcttgcaattgcaagaggaagcaaagaaaatataaacgttattgttattgatctcaaaagctctaccgtttcttagtttttttttttttttttttttgcgattcttaattattattattattattattattattattattattattattataagttttgttttgttctcccgattataagtttccattttacatctttcttttctagatatacttttttctttgtttataagcctagtgtgtgtgtgttggtatttattttaatttcttctgttattttcccttgttttttatatatttattttgaatgtaattttcttgggagtttgtctctgacacccctgttttgtcattctcctcagtgataaattactacctaaatgtatttatatatgcaaaataactttggaattaaaagtattgcatacagtattattatatgttgacgcatattctgtgaaaattaaatttattgtagttgagaaaatgttttgtgaaatgcaaataacggttatatttttggcgttagttatattgtagatgctatacttgaagtatgaatcaaacatatccttttactttatgtacaatataaaaaaataaaaatcatggatctaccattactgagttaaactgaatctatttataacgtataaattattgatttatagtaatagaaaaataaaaactaaaaaggtgcaaaggctttcttggattacaagaaacagattaatcctaatgtcatagtctcaaatctctcgctatgtgtacaagctaaagaattcttctttctcatcctcccaaaaatctaaccaatcggtaaaaactagacccaatatattcaaaagcaggtgaactagtttacaagttagtaaaccggtatcacacaccgagacacttctactgatcattccaaagaatagttagaaaccaagacatctgccggagaagctgagtggatatagacaaattccatgcttttgcctgatggtaaagattgcatccatgatggaaaactgaatgaatttccggttttcgtcacaccccatattggaccgtatagcttggtgattgatatcttcaaaattttcaatgttttcgtagatctattggttaatatcgtagagtatcgatagtacacttttccctcgttcttccatgagtttgtcatcttctgcgatatggtaatgggactaggagaagaagctgctatagacataacaaaaaagtaagcaaattgtttaatttcttataccgaatcaaattggtatatcacgatgttggcataagaaatctaaatatgacaaaccaggaggttttgtcggtttcctttgtggtaccggtgctggttttatgataaccggacttggagtcggactaacacctgaaataggaattcggttagtaataaccccggttaacttgactagaacttgaaaccaagggttttaattagttcactacatatacggttaatcatgactagaagcataaaacttttaacaaaacaatataatgctttaaatcttaccgggaagcagctggtcaaaaccggtcgaaccggaaattaaccgggctaatacaccaagaagaggcgcgttgttgtaagttgctggttcggtttgctcataattgtcccgttggtcagcgaagttatcgtaggcgtcgggtccacccactagagctccggttaaaacatttggatcgcttcctttccggctaaaccatgtggcgtaaccaccacggcaagtaacgaacttttgatcgacattgaaggagacaatagacgaaccacgatgatgaacttgtcgtggatagttctctccgtatccgaccatgtaacttgttgctctagggttgtctccaagaatgtaatccacctgatagtagttttaattaattgatcaataatccaatttagacaggttatccatttcacgatacattttctatttattaaggatatataatggaacatgttatgtatgtagcagatatcctaattatccattaggactaactaaccttgtaaaattaatgaaaatatctccaaaatagccgaaatattcaatcccggatttgacctttacctgaattcatattagtttaggtttattttttcgtagtatatatatacttgaattaactatttgtacccttattcgctattgtttttattttgaatatttcgaagttcaagcctgaagacctggactcacattacgttaaattcatcgcctttggataagagattctttccaacaggtgtcgaatccatcacttctactcgagagatttaccattaggttaaccccacgttggtcttatccgctattatctactcctaattcttgatattgacatcaaagactcaaaaattatagtgtatgttattatttagatcattcggatcgacgaattcgacatataactaaagcctactacgcatggtaacacgactatctacaattaaattccaatagagaaaaccatagagatgggcttttaactacttgactaaaagcattttcccggtgttatgtttcaatttcaagttgaattatattgttgttttggtttcagattaaagggagaataagaaaataagaaaaagttgggacaaacctgtgatttagaaaattctaggagttgggatggagaaatgtttccttgagaacaaagaagatctcttttggagtacgagagatagtcggagtaaacagtggctaagaatgaagcactcgtgacaaactgcatattattccagctttgtcggaaaatcaaaccccctggagttttcttaatgttctttgtacttttacctaacaacgaacacataaactgttctgctttctgttggtacctctcgaacacagcagtatgttctccaccttttccttgcatcaaaacctattaaccaaccaaaattatcggtttatacatttttagtaaaaccaaatcaagtaaaccacatcaaaccgagaaaactcttaaatgtaaatgaattaaccttggccacaagggtttgaacaccagcatacttaacgtcccaaccaaattcggtcatcgaccagcccgtaccacccattgagtcgccattcttgccgaggtaatctagatagtatttatcatttgttgcttggtataaccacgcagcagcccatagtaactcatcctggttatacaaaattgcgctagtaaaatatcaatagctagcaacaaatgttttcgttagttacttaagagagtttgcgttaagtacattgtaaccgctgacggatcggtaatatttttgtgccacggtaatgctgctgtcatatttgcctctgtatttgtccgcaaattcaaatagctggcaatataagaattgcattaggatcagtagcacaatcgtaaatattatgagttgagaaggttatttctactatctacgtttttgcacctagccaaaattaactaattcaaaacgttatttataattccttctattgcaatcaagcatcacggaaggagttgaaaattgtataaacagaacaatgtgcttaattaaaattggtttcactaaaccggaattgaaactcgattttctcagttttggttagggttcaagaacctgatgtgcgtgacggagtagctcagcagagtatgatggatcagagcgacggaaaacgatggaagcggcagccattgcggcagcggtttctccggcgagatccgaaccgggattgttccggtcaattttgtaagccctacgatcagtagtcatttcctctggcctttgccaacaataatggtccgacttaccatctcctaccttcacatgagttacaaaataattaccataaccaaattgaaattatgtatatagttagtctaattaataaagaaagtgattagtgattagagtgttattattgttacctctccatagagaacgttaggttcagggtgggctttaatgaaataatcagttccccacttaacggcgtcaatggcatggccaagttcgccgttggattccagctggccaccgtattctatgatgctccaacacattgttgtcaccgtgaaagccatcggaagcccgaatttcacattgtctccggcgtcataatatcctcccactagatccacctgctcaaattttttcgaaaatgtaattaaaataaacataatgtagtactattaattaaacgttataaaaatcagctccttttgacgtttaggtggccaaaaccatccaaacgcttagattttgatcatattgattaaataatgggtcaacggaaagtcaacactttatatatggatctaaacagcggtaaatctatttataataatttaagaaaattaaaaaaaaatgtaaaatatatatttatattaattattattttttgtattatactgattagataaaaaaaatatggagcacaaatccgatgaacagaaagttttgaatagtggtaataagtagcattatacgagtctcaattcattttgttaaaaaaaaggaagcttacgccgcttgatttgccatcgtaaagaccggaatgagatcgccatgaaactctttggttaggagggaggtgtcctgatctctgagcttcaaagaagagaatgcttttgcttagagcttgtttatagtcatgccctgaaattgcaagttgaaccaaccctagaagaagaacaacaagaatcgaaatggtggttctagaacccattacttatatatatatgtatcttctttttgaaattatgaaagaaagttggatcttgtacaacagaaatgactgaaaagaataagtgggtctttcttagactttgttagtttaatttatagatccttcatcaaaagtttgatagagactttttgaatggagaaagagaaagagagggagatatatagtttggtgaacgaagctgagaaaaagagaggctgaaagtgaaggaaggtaccaggaggagagaaaacgtcagagtcgatttaatgatgtcttttgttttgaaatttatattcatttttttaaaataattattatatagtttatagtcttttatgaatgtataacaatgtgtcggcagccaaatttttcagttcaaatttaggctgaaacaataacatctttttaaaaaatgttttttttatgaatgtaaaacttttaaaaagatttttatttttttcccacaatctaatatagtttctaaatttttaggtgagattataaagtagtggctcaatcaattaatagaggagtccatttctatatcaagcttgttgaattaacatcaagaaaatttaaacataaactaaaattacaacatgttcatgaagtttttttttttgttacatcaacatgttacttgaagtttaaacttttgtaagtgcaaagatcttctatacatgttactttgtcttttagtataaaataaaaaatttgaattacttttaaaagaggaaatcatacttgtctcttccggtccgttagggaaggtatgaggtctgattggtaaccaaaagctgtacaaatttttaagttgttagctggagctgttagctttatcggaatagtgcaaaactgttaaaaagagctatacaaagaagctgtactaaaaatctgagagtaaaactttttgtaacgcttttgataaatgttttatgattgataactgtcaaagttgtacaaagctatactgttattattatggttagcattcaaacccatgaatcttgcatgcatctaaacaattggtatagttatagaatattatcattactttgttttttttcatagaaaaacaaaatattatgcttcatgtattatttttactttttatgtatttttcagtttttaattctgaatccacttagcaaagttcgataactttttcaataaaaatattacaacaaaagaaacatttttttttctttcaaaaaccatctaagaatactgagaccttcgtttagtgttttatccccatcaatctaaagaatcttcacatcttcattatcaattctttcgttctgtttctagagtttgagacatacatccgctttctccatgcacgtaatcaatttttagtttcttgttcttttgtcaagctatcaatttagtttaaataataataaaaaacttaagcaacaacaaattaaactatcgcattaatttgtaacaaaataaaaataaatgattgaaatattcattttaactatggaaaattacaaaaatcaacattttcttgcaatttacgttaaaataatgaaaataccaatttcccacatttcatggatgttgatcttgatttccgttcaaatcttcggtttagaaaataaaaattatggaaacaaatatagaaagttctgttttgaggctgtcaacaaaaaaactatattaaggtcatggtcacatgaacgcatgtgactaccgacactgtgaaatttgaccccttcgtgcgagagagcccaacctaagtttctaagaagtggcccatttcatcacgtggcctcacgtgttgcttcactaaaccttgaatatttatttttatttttgacagctatcaaatttagcattaagagacaaaaaaaatccaagcatccatcagaattttctaaagagacagtttctttcatacattcgtaaaaagtttattatcgcacgttcaacaatggtttgagaatctaaatattattcttaggtgatttatagtcacaaaacaaaacaaatttattttttaaagtatgaaagaggatacatgttttatgtttatatgtagcttctactcattttcctgctactttctttaaaagggtgagatggagatctcaagagattttgctcatgatctaaacatatttggtggtatgggtggtgtgatgggaaatttaactatatcactgattagatttaaagattacatcactaaaacgaactttttagtggtgtgagttttcgatgatcccatatgtcttatgtttacttgatggaggtgatgtgttgttcttctcatgctttcttttatgcatatgaagtttttcttaattaggcctctctttatagcaattgaaataccaaacaaaacaggtacataagattaagtttctcctcattgaccaataattttatatgtcgtgtaagcattcatctctaattataattatacatatatatatatatatatatatgcttgaatgttatatatatgaaaattgatcaactttctccatctttccgccacgttagcaatggaaagaatgctacttgtcatatcaacatattacatttattgtttaatttaatttatttaagaattttttaaatcatgcattaattcttatttaaataaaaatttgacatgttttaacttataattaaataatttcaatttcattagttacaaactatatccatctcatatataaattaacttatttaaatttagttgaataagttgtataaacttatgcataaacataaaatcataaaatcaacaaatttaatttaactattgattctattaaagtacaaaaaatgaataatatgatattagaatttatttcatgttttcatatactaatattttataaaatattagttgaaagcaaatataagatactaaatcagcactactttttttgtttatttaaaagataacaaaatatttttgtttttgtatctaaggtaagtaattgtaaataagtattaaacaatataataatgctcttcttctataaatactaactctattcttatcggggaaattatgctctgatgttctgagagttcgcgatctccttgttatcgttcttagagtgtgagtcagagatatcaacaatctaataaacaatgtcatatcatttaagctattactgaatatttctttcaattttgatgagtaaaatatttctcattaaaattgaaatccaagtctttatatatcacttcgtctcattttgtgtgggtcttttagcccaattcgtaatgtgagcacttttgtttttcgtctttgttcttcctcattttttgccatataaacatccactgaagaacaatacatcaaataattctgaccagaaactacataaatatgccccctggtatccattaaaaggaactcagtgctcacaaagtcgcaatggacagaacaaaaaaccaaactgttttatcgattttactcagaaaaacgttttattcagtttgctctcatccggtcaccggaatattcttgctccgactaaatcaatccttcttctgccaaatgtgaaacaaatattaaaacacaagcaactatctcttttttctttgcgaatattagctgaatgaaaaatgataacttacttagctcatcaaaagagattttgctaatgctttcaccatatttgatcatccgaatcttacctaaaacaaagcaagagaatcgtaactcagcaacaaattgatgttccggatcaacaatatgaacatacataccatcacgacgaacgcaaatctcagggatactcttcacttcactgctgatgctatcattatacactctagtctcaatatcaccttccacataaaccgacgagctgtaacaaagcaccagcaaagaagtttagatgaaaacctacacctttcacttcctatttagacattgctaccagcattacatagagcgactaaagacgaaacagagagattgaagacagataatgtagaagatattattcaacttaagagtttctgtgtacacttttacacattcacacacatatgagctgattatatcttaaccaacggatttatcacttagttaatctgaaattataactcttaaactattgttaatactcttctttgttcaagatagttaagcatataataaaacttactttttagcgagtttttggacagcgtaagagccaagcacttcgttgtgcacagcgattctatgccactgagctggttttggctgattagtagctcctacaagcctctgatcaaacatcccacctgttcctactgtaaagatcgttactgtccgcccgttccttaagatcttctgtaacggtgcttgccctactttcccacaaataatcgcctgaatgaatcaaaggaaaccaacaatgacataaaaccgcaagaacgccattgaaaagctgataagtatatgaaatgatattgcaacaagataactcaaatcatcgaaatctagttccaaactcttattcaaggcacatacataaaaaccgttccttttcaatcgggttttttgctatagctaagcctaatttgattctgatattcttcagctaagaatgcataacttttaagtgttaaagatcaaatctttttaccctatgaacaccgcgaaatccccaacctttacgaggatcaactccatgaggttgaagctcaggcctttctgtaacattttcttcaaaatcttcttctacaccttcatcgataggaccagtagagaaccacgacttagagcctctctcagcacttattgctacacatcaaagtaacacaagaagaaacaaatgatagtcttctgagaaaaaggcagaagatttaggtgataagaaagaagaattacctaaaggagatattgaagaggatctgagaaccttggagactctaatggcgagtgagttcattctgggacgactctaaggatgtgatgtctgcaaaaatgagggaattgcaaatgattcctcgaaattagggttgtttacaacaaatttgaaccaattacgattaaatcacgacgaagctgagaaatgcgaaagcaggattccgatgtaagagggaaatggcttaccagtgagtttgtgaaagagggaacgcaacacagagaggaagaagaagaagagtaaaacgacgtcgttgaggtttgattcgttaaaccctgcgttgaagatttttagggttttggggacaaaacgaaaacgatgtgaacgggaaacatttcggaggtagaggacgacgacggcaaccttaggttgtgctatgtgatcttaccaaattacccttcgttaacgaattaatgaaatgagatgacatggcccgtataggatttaacttttcaattttttttaatgagaatattttcatttattaattttaactcatttgatattaatttgtatgatgtaagattaacttaagagattaccgtatatataaaaaatatatttttaacaatgtttagttttaaatatttttgtggatttttatttttttaattaagtattagccctaagcgttttggtattcgagtcaggttcaggtcggctattttgggtttgagtttagaagtttaggacccgtttgggtaatttaagatttcaggtcgggttagggttcgagtttatttatatattaaaatatcaaattttgtgtgcaaatctattaaattacttgaaaattttaaaatatttccaaaacaacacgagtagttttgcttgaatatatctaaaaataaacaaaaataattaaaatatccgaaaaaatcctaatattttctgtatacaagtataaatataactaatatatacttatatatgagatatgtttggatacctattcaggttcgggttttttgggttttgaagttcagaaccgctcgggtctttgaaaattttgggttcgggttcggatcggttcttagggttggggtattatgcctaggcctattaattatgttttgttaatttttaattatttttaatactaaataggatatagatttgatatgtcataaatattattttgatatgaaaatgttatcattcaatatgaagtgtgtagaatttaaatcgagtttattatgatgacatagatagttaaactgtattacaaaattgaatgtgtaagatataaatttattttttctttttcttttctagatattaaattaaatatagaatgatgatcggttactttttagaattcaaatatcattcataagattgagtgtgtataattaaaatagaatggataagactgaaattttgtttaaaccaataattattaaattaaatatcaagaaaaatatattgattattatacaaatttctatcgataaaacttaatttttgtatcttagacccgcctaaatagcagatgctgaatttaagagaataaaaaagttaaatttttgtatcttaatttttatataataagattctattttttttaagagaataaaaaaattaaattttgaatgacaaatgtaaacatctgatcgtttgacttgacacgtggcacgattctatgagttagtaacttaattagcatatgtaaatttgtttactttttaagattttctatttttttaagagaataaaaaagttaaattttaaatgacacatgtaaacatctgatcgtttgacttgacacgtggacacgatcctatgagttagaaactttgaaaaccatactttatataataagataagatttttaagactctaaatatttgtttatagtttaagtatacactaatgcatcacaatgtcacattaacgtatttaactttacacaacacgtaggtacgtggacttagtaatgaaaacggatatactttcaatatgttatagcaaaaactaatcttccaagtccattaagacaaaaaatcaactaatggcagtaaagttacagatcaatcatgagatatggaatttcagatggaacttcttttaatttgatacactttgagtctttgacgatggatggacttggtcagcagaaacctttttttacgatcttgtattgaattatgaatgtatgtgtcatctcacttttctctgtaatagtttatggttcatttcatacaatcatactgtaactttctaagatatcatggaattttgtttacatctttaaatgttagaaattaattagaatgtcaaaatacagttgaacttatttagttagctcatcctgattttgtactatattttataattgagatttggtatctaatatttgtgctataactgctagtctgctatgctatatatttcatatttaaatctggtagactatctgaagatgttgaacacaaacaaaataaatgatacaaaaacggttgtcgtcaatagaataacaagttatacaagaaatggtttgttgctaccaaaatagaaatcaatgtaatagtacattttgcagatagatattgaaaaagaaccttaacaaagttaatacttggaaaaggtacagtttatttctatcctaataatataattatttagtaaaccactagatttaaataactaatcaacttggttaaactaaaataaacccaaagttgatttggtcagcatttgacctatagtaaacaccaccacttatacactctgaaacgatatattcttaatgaagaccaaagactttctcaactttgaatctttttcctatttgtttaatagtttgctcacttggtcaaattttcaaacatatcttttaaaacctttaaattccaaaagaacacgcttcgttttagtacattctcatcattcaaataccaaaaatctcacatctttttcctaaaccacaatcacatgttcttaatctaaaccttactataaaaaagttaaaaagctatcacatctcttcaccttcaatgtcaaaagtttttccaaaaaattcataactatttcttccggtcaccgtaaaccggggttttaccgcctttcgaatttactcaagacactaaaagtaacatggaaatgatgaattgggagcggaggagtttgctaaacgagctaattcatggactaaaagcggccaagcagcttcagggttcgtcttctccatcgttgtcagcttcttcttcatatttgacgacggagataaaggagaatctcttacataacatagtttcttccttcaaaaaagctattttgatgctcaacggatccaccacacaacacaatccaacgatagagcttgcgcctgatcccctagctcatcccggaaaggttccaggatctccagcatcgatcaccggaaatccgagaagcgaagagtttttcaatgtaagatcgaaagaattcaacttaagttctaaaaagaggtaaaaatttgaacttaaattagcgttataaagaagagaaaagcttattaaaatttaataataataataataatattagaattcaaaaaaaatagccagattttttgaattagagatttgacaattaatgaaaatttgcaggaagatgttgccaaagtggacagagcaagtgagaattagcccagagagaggcttagaaggacctcatgacgatatcttcagctggagaaaatatggccagaaagacattttgggcgccaaattcccaaggtacatcatcatactctatcatcatcatcataatcatcatgtttacgaatagtacatttgttaaaagattggttaatagcagcggataaatgttgagtataattatatgagtaatatatacctaaaattactattcaaagtgtattctcatattaaaaactattttgcataatttaaatatcgaatatgtaatgaataattctgaatataatacaagataaattagatatttaaaattattatccgagtttgctatatgaaggtcggatttgtatataatcagatagttttttttggctaaatttacgtggctttaagaagaagaaaaaattagttttagttttactaatttaggactaatttgtgtttttattgcaggagttattacagatgcacatttcgtaacacacagtactgttgggctacgaaacaagtccaaagatcggacggtgatccaacgatcttcgaagtaacatacagaggaacacacacttgttcacaggggatcccacttccagagaaacgagaaaccaaaccaaaacacacagtagcagtaaattaccagaatctcagggccagtcttaccgtacgtaccggcggacttggaagcgaagctttctcattccccgtcacgtcgccgttatacacttacgagtccatcaacggtggtggaacgttttaccaccacgtgggaagttctggtccgtcggatttcactggattgatctcaacaaatacttccacaggaagttctccaatcttcgacgttaattttcaatttgatccaacggctgagattaacacaggcttccccacttttttccacaattcgatttaagtagtacagtattgaatattcttgagattaatataatcccgattagcgcctagcgatttaagtagcagagtcattttgcataagtagagatgttcaatatgagcaaacttgaacattctctaatttttctttctctacgacgaagtcttggtcttattgtactcttccacttctttcttgtaagcttccattaactcagcagctttgctattgtaaacttgtttctcctcttcaccaagttcctacaacaaaattgtaaccaaaaccaactcaatttcacaactaacagtgataaaatcttactcgttggattcgagtttcatgatttataatataccatccatttcaatgaaatgtgagcagtaacagttgagttgttgatcccaggatgttcttctaacacactctttcttgcgtctttgctgtaaaaagatttgagattataaaaccagtttagcatctgattgttttgtggattcagggttttaaagtatataccagaagagaaagtatgaagaagtaggctttttgggtttgttaggatcaacattctcgttctttttcttgttcttcgccgtctctttcgtcttctgcaagaaagaaaacatgtgttgtgttagttactgacttatatcccaaaatagctcaatgcactgtgagtttagtatattaacctttatgatattgtcggttttctccttcttcttgagaagttggagagcttcttgtttatggagtttcatgaattcttcttcttctttcttctggctcattgcttcttcttcctttgttcttttatatccttccatttcttgcagatatatctccttgttctttttcgccatctgttgttacacatacgttaagaacatccctttattaaacttcacttcttgacacatcaatgtctatgatgagtatggatgaactagacctgatcataaggagcctttttttcttccgacaagttcttccactcttctccagccatcttagcgacctataatcatcattcatcatcaacacacaccttagcttcaagagtttcaaatgacattgagaaaagacaactcctaattctttacttacctcaataacgcttttgttttctccttttaaagcagctctcctctcgtttgcatagatcaggtaagcagatattggttgtttaggcttcaggggatcctttatcttcctacaaaacaagaaattcattcagttttataacttatcattcaaaacaaaacagttctcgatttaaatacttgaatcagtatcattacttggcctttttcttgttgtcatgttcagcttcctgaacaaagtgaagatactgatcaagcaattccattgcagttttctgcttctgctcatcatcaagaagcttcattgcttccctctcacgcttctcctttgtaataacctgaagataagcttccttatccgcctgatacttctcctcataaggcttcttctcttcagcactaatccccttccacttagcacccagaatgttcgaagtctccttgaaatcagcttcaggattctgtttcttcacttcgttccaattatccttacaccacaaaatatatggtgttgatggtctctttgtttcagcacaatccttcttcttcttctttcccttcttttcttcttcagtttgtgccaaagattgactaaaagcaaaagtctgtggaagcaacaacaatactcccaaaatcaatcacaaaataaacattatcacaacatagaaatgatacatcaacgaaacatgaagtaatctatcgatttagcaccaaatttaacatctctatcttaaacagaagcatagaaatcaatctaacatctgtgaatgatgattagtctcaaatctaagcgaaacttccatcaatcatctttaatcaatttcacagaacctgaactagcttcaatcttcatcaataagcgaatcaacaatcaacaagctcctaaacgcataagattaatcagattttctgaatatatccatccccaaaatcatcatgaatcaatttcacataacatgaacttagcaacaaggtccatcaataagcgaatcaaccatcaacaagctccataacgcataagattaaccagattaaaatcatctcgaatcctttatcaaaaaacctaatctgcgaaatacaagtgaagaagaatcagagccagatctagaaaatcgtaccatgttaggcttgaattccttcatcttctgcagtttcttcagctccgtcttaagtttttcctgttcaacttccttcttcctcaagatctcgtccttctccttcaacaaatcctcagttttctccttctcgatcttcatcttctccaacatcgcttgcatctccatcagatctttctcaaacgacttcgtttctttccccttgtctgagaccggtgatgactcgacgatctcattcttttgctttaacgcttttctactgtttctcgatttcttcgcatgagcaggatctgaagaaactgtcgacattgtgaagagagattgagcgagagcgagagagaaatggagattttggaatttgggattttgacgattagtggagcctctgggtttattaaataaacaaaggcttaacggtcaacattttgaaattcaaaactgttccatttctggatttaaagaaaattttggcgtccgaagaagataagcagttatcaactttctctctaaaatcttaacgccttgccgcttttttgtttcgaccaaaagaaaaataaataagagtatctaaattaaaacgccttgccgttttatacgtacaatcaaatcttttgtgctgtttttaaattataaaaaagaaaaaacagtataccgtacatgtatttgtgttgcacaagataagtgtctttgtagaaactatggacaattctgctaaaagtggcccataacttttgtcttataccataaagatttaaatttgacataccataacaatatgggcttaaagttcaaggcccataaatgccttcccctaatttgactcaccgttcgtcctctctctataaatccaaaaccctaatacttttaatccaagtcagtctccaacgccgacaaaatttcatcttcttcctcttcatagtttttctactttccgtttagtgttttttgttttgtttttgagaatgtgattaagattgctttggaaaggcgttgcactctttcgtatcctaaagaagggtgtgtcaccgaaagcgtataatcaaatattaaatccgatcattaggactgcgaaattcggattcgttcgaatgaacaaaacctaagattcggtggtttttttgtcgccttcgtagatgagaaacttcgattattattgagaaattgatgggtttataattggaattgcttcataatggtgaactctcttagatataaaaaaagtgagagatgttcaagtttccggagcaaatattaaactggccagaatttaacagctctgtgtttaattttactattttcacagagttacctgtcttctggtatatatcatcttagtttgattcttcttatttatggataatttctgattattgtttcccaaatgttgaactcgcccaccaaaccaacttactaaaccggattggatcaccattttattgaccattaaactaaacaaaaccaaatccagaaaaatcagattttacataaattgatccataagaatggctacgtgaaccgaaccggttttcaattcatccaaggtgatctatccggttcattagaaactctagctgttaaccaaatctcttcatgtttaccaaaatttacatgacctatataccaaacctctgttttcaattcatccagtttttaagccattgactacatacaagcaaactggttatttaccggttcgaccattcactatgatctccaatatgacatcgttcaagtgatcaatcggaccaggcaagcaccaatgcagacaatcgttctgtaccgtagcgttcttatctttatcaaacggcctaaactctctatatggacccggatgaccatcgggtcgagtcagcaacatgccagcaaaatccagaagctttagattctcactctcctgacccatctccgtaaccactctctcgaattgattaatctcaacatctctcaatatcttgttcagaactttcatctcgactgcctcttcacccaccggttctgttttcttacaagtcccaccgttatgccattccccatcttcaaaatgatcaggtatcgaagtccggaaaaagatcatgcctttagttttagatttcgctatgaagtccataacatggcgcaacgacgtattgtaagcatagtcgaatcctaaatccgtcatgttcgaactctccgggcagccatggcatccaacgggattagcattctcgtggtataccgcagttttcaagaaccattcccctgaagagatgatcgcatagtcaaggctcgggaatagatcagtccatgtattgtcgagtttatctagatgaagctgaactgcagctgatgagacaccatttgagtcttcaaagatatcagcttgaacaagaaaaggtgaccaaatgttggataccgtaaagttatacgaaggaaaatgccaacgcttcgatctatagttctcatcgtgatacacttcaacaggtttttcaacctgaaacatggaaaaaacaaacaaaacttacaatcacaaatctcattatcctcaagtctgcaaatagctagcaagcaatagctaaaaaccttactgtagatagcatacaaagcaaagactcgacatggttacgagcaatggagtcaccgattatagcccaagatttattcctcataagctgcagaaatctcagagaatcaaaccgaggcaaggaacagtcattaggcttccatttccaattgagaaaaccagaatcaggtcgaccattagtgatgcaattctggtgagcatctacaacgataccacatgactcattcgtgtagattggtcccaaaggatctttaatccatttcccagtaaatagatcacacttctccacctcaatatctaatacaacaaaacagattcttatcatcacaaactaacagaagctaatgaaccatttaaaactcttctaaagttgtaaactatctttaagaaccctagatctcagaagtttccgtaaaaaacaaggttaacaaaattctacacagcgaaatcgttaatgttattgatataattgaaatcttaccgacgggaatttgatcttcgttatccgataagataacagacgtcggagaaatctgggaattggagtttccggtcaccgacacttgaactggggaaaattggccgaagcggaagacgaagaaacgaaaagcgagacaagttataagtgttgcagcgacgagttttatgagatatgtgttttgttgaagattagagattgattcccattttagcttcatcttcttcttcttccctcgcgctgagagatatacgattttttttttttggtcagaaagtggaatgtttttgattccgtacttattgcctaagcgataaaccaatgaataatagaatccaaaaagattagtgagtaatttaatgcttgtggggttaatgatatacagaaagttaataaatgaaacagagaatgattaatgaggattctaaacaaccgtaattattctctctctgattttaagtaatgtttaaggttttttacacatattacaaaagtttagtttaatttacctttttttgcataagtaactatatctaagtcaaccaataaaaaatatactatagaatattattggtcaaaaaatattaaatacatttaacttttatattgaaagttgaaagcatcatttaaaatcggaaaaaacattctctaaattatcatttttaatgatatgaaaccgtcatcaattgtgtcaatatcaataaaaacgatctcttcagtagagatgaaaaaaaattgtatcgcatatgtcacaactaatctaatcgtttatattatttaaagttttaatttctaaactcataatttttaccaattgtttcaaaattttcacatctgcaattttaactgcaaaagtctctatattttctacggtcaaattccttacaccaaaattttctacaaccaaaattgatatagttagaaataacacttgttaccaatcggtcctaacactttcagattatagatattgcggttaattagataaaaaagattcaaaaatatatttgatttctaaggacaaactaaaaaaatttaggagctttagaaaaattatgtttgatttccaattattctacgtggttttagtaaaagatgtgtttactataaaaaccttgattgtaattgtttataactcattactaaaagttgtgactgcagaaattacgaaactaaactactacaaaaaaatgtggagaaatgggttaaaaaaaacaaggaaaaaaattcaatgttaaatcaactgaaatttttttcatttaattattcagctaattttagggaagttatcatatcactatatatatatatatatataaataatacaaacaaacgatgcgtagaagaaaaaaaactgttgtccggttcactgtccagatcgggtttaaaaacattgattttcatattatattccgaattttgttttgccaaaaatccaattacttaaatttcaggtcaatttatgttaattttttaacataacccgatccaattcaaattgaaacaaatttatatttctcttttaatagtataggaatttgcacaaatgttatgtaaaaaacggaaaattggttttttcatatctttagtttgaactatgctgcatttatacacgtattataccacagttgatttaacctaaacttcaatttgatatttaaactttcatttttatacgaaaacatacattaatgttacaatgttagaatacctttaatttctgttgttaacctgaatgttagggctgggcaaaatattcgttcgatccgctttgattcggtatatgatttggtttgattcgaaaaatccgaatatccgtaagattttggaccaaagcaaataggaaaatgtagtattcgtaaaaaccgaatcaaataacaaattttaaaaaaaaaaaaccgaatatccgcttcgatccgtatctttttatatatatattagaaaatatagttatatctatatatatatcataatagtttgtgtattgttgctattttacgtttttatgttaaaatgtttgtttgatcatttttctcatgttatgttttgatcaacgacatcaaaaactatcgggttttagttttcggaattagtttgataacattttgtagactggtggtaccaacaagtatttagtttttattttgaaagcatgttaaataaaaactttgaatatctgatatagttatatagtatatagattttttttaatatttaaatatatcaaagcggatatccgcaaatatcacaaaaaattctggatattcgaaattccggatatccggaaattttcgaagcaaagcaaagcaaatcacaaaatcaagtattcgtttaaaacgaatcgaataacaaatatcacaatttttccggatatccgtttcgtacccagacctactgaatgccatatataaaacggtaaaaacagaaaattaaagttctagtaaaaaaaacatcgcatcagttacaaggtttggattaaattaaaaaaaggtttgggttaaattagcttaagaatgaacaatttattaattatttttttggtcacatggaataaacaattaattaatttgaataatattacttaaatacatacaaacattatctgtcatcttcgattacgttatcattaaccaacgtttaggaggactttgcttcttcgtcttcttctctctttaggttcttcaagttcgcaatcctggtaagattttctcgagaaaattccatttctttctatctgattctgtttacattgttgaatgcttgaaagaatctgagttttaaccacactctctcttccctgttactcaccattttctctctgaatcctccgaaacccatttcgatttccacaatctgagctcataaatctggtttaattctcatcttcgttgcatttcagtcataaagagaacataaagcttggatatttagggtttttgcagaatttttgattaagcttatgagtttggtaataatctgtagaaattggttgatgttgtttcaggtttgggtttaggacaaatcagagaagaagatgatgtttggtttagagaaaacgatgactttggagcatgaaattctgaaggagaatcatgagactctgttgaaagattatgagagtcttcaggagaggattaagcatgctgaggaagcttatgaggctattaagttgcatcatgagaacaaagctaaggagcttgaagtgagtaacaaacgcttgcttgaggaatgtatgaaagagagaagggagaaggctaaggttaggaagacttttgaggagatgaagaagacaatggagagtgagagaactgctattgttgatgagttgaagtcgaagaatcaggagcttttgttggggaagaagaaagaggaagaagagttagtgaagatggagaataagtatgttgagttagctgagaagtttgatgttgttgaaaaggaatgtgcttacttgaagtcactctatgatgcggaagtagtagcttcggttactcaaagtgctgtaatctcaggggttggagagactgataatcttattggtcaaggagagaacgaggctaatcagaatgtgaacaatgctgtgacaggtatacatagacatctctgtacccaagtgttgtttagtttacaatgacatttcttttgaatctatctttgtgtgcagatgcgataatgataagtgatgatgaaaatgataataatccacctattgagagtaacataagctctcatcggtctggtgatagaaaccaagaagaagaaggcaggaacagaggaaactcagcgactgagaaccgagcttcgggagaaacctttactccggtatctgctaatcatccaccgcctttttctccttcatcgtcatcttcatcatcatcatcttcagacggcgctgagattgtgcttaagctgcctcgtaattggcctgaatgggcaatcccgaaaggtcccgggaaggattccaacaagccttagaacatttcagatgcaacagagagccaaaagaagtaaatttgaagctgcactcttaagttaagctagttatggaaatcttcttacatattgctttctgtttttgtcaggagtttatttaacaatctctggaactacaacaaactattctatctactatcaaatcaattattcattcatgagtataataatagctgaaactttctgtgttacaacaatttcaccataactaaaattgcatttgcatttgaatactgcaaacgcaaattggctttgtatacgcatcttgtttatatatggattagttttttctacataattaatgaaagcttttgtaaactaactcttgagtactaactaataagaaagttccgtggcaaaataatttccgaatcatcggataatcatccatttacgaggttaagttccgggaactgctggtgttaaggttctggaagatctccggaagattggcattagtgagtttgattctcttgctgatctgttgtttgccatgccatgaatatgtgcaacagctcttctctgtgtagtgttcatcacacatgcttcaaactaagcttatgcagctccttctcgactagcttgtcgcttgagttgtctatgccgcggtatagaggtttaaagtcgtcataaacctgaatctgacccttgaaatcagcattagacagtccttaaacttttagagccagcaaatatgaaagacaatcctgaaaaatggataatcataagaccacaaaagtcttttgaaaccatttaagatcaggagccagtacactatccgtctatcagaatctggcaataaatattatcagaagcttattgattatgaagttaatacatcttaaatagaatcagttaagcgttttttgtaaatctaaatcacatgtgaaatttctttatgtcacgttttcatttgtgtaaaacaatatcttttgatttattaagcaaataatttgcagctaaagctctcaagattcaaataaattgaaatgtaagtagtgtaagtagtgatttcttatagaaatagttgaaatctaaaagtattaggacactgatgtaagtattgttaaactaaagagatctatcaggaaatcaaatcactatagttttttttttttttttaaattccttgagtttatcaaacaaaaaaatgtaaatgtccctagcaagtactgtaggttcattttttttgtttcaaaagagtatgttatttcttaaaaatcgccaaagatagataagattcgaaatttgcataaatgtggcaataaatattatcagaatctttttattgaataatgaagttaatacaccttaaatagagaattaagcgttatttagatctaaaaccacatgtgaaatttctttatgtcacgtttttgtttgtgtaaaacgatctctttgagttaatttgcaactgaaagctctcagcattttacattaattgcaatataaatagtgatttctcatagaattagttcaaatcttaaactattaggacagttacgtaaacattgttaaactaaagggaccaatatggaaacacaaatcactgtagttaatttttattattatcttgagtttatcgtctatcgtgttcgaattctctgtcgcttacttaaacacagtcaaattcattttctgccttagaaaagatttttatcgaaaatcgacgtttttgaaaaaactcaaattatcgtcgttttgttctcagatttcttctgctctcttcttcttctccttcttcttcgttccaccgcctctgttgctttatcttcttcttccttccttcgattgttgattacgtcggtggatctttgttctcctctgtgttgttttcattgctagatttcgtcaatgattggcttctcacgattcgatttttccggctcctgttcttaatttcctctgaggtagattagtaaaactctttgtctcgtaaacattgttcgatgatgaaattagaaagttctcactcttgtttgccaaatttgggatatttctggaattgaaaatgaatcgtcatttttttcaatttctgaggattttgttacaattgttttttatttatgttagaattgagattgtgtgatgaatatcagtaaccctagacaattgtgaaatcaaagctatgaaaatcttttgatgctatgtttcctatgatacagagaatgatggatgagggatcagtaggggatgtgagtaggattgatgaagctgatgttgctcaccttcaattcaagaatagtgagcagtcgtttaaaccggagaacattgaagtccgggaagtaaaagaagtgcaggttcagagagaagctggttctcctgattgttcttatggtgtaatagcagattttttagatggtaagaatggtggtgaccatgtggagcttatagggaatgaaccatgttctagccggcagaatacaaatgatgagggggatgttgtcgaggagttgactgttaaaacttgtgagggatcgagtatggctatagttggtagaccaagtagtagagctagattagagatgaatcgcagtcagtttctgcatcgttttccgctagacggtgatttaccgggtagtagttctatgagtaagaaggtaattgacaggggaacagtaagtatcttgagaaatgctgggaaaatgtctttgcctgagacttcaaatggacaactggctattattgctgttaatggagaagctaatgaacatttgacaaatgttgaacgaaatcctgtacctgtagaggcattgtctcatgaaggcatcaagacaaagatgttatcgcagtctgggttttctcagttttttgttagaaaaacattgaaagggaagggagttactttcagaggcccgccaaacaatagatctaaagcgaggaatatggatcagcaaactgtagctagttctggtagcgctttagtaatagctaatacttcagcaaagatttctagcagcatccctttggcggcttatgatggtttgccgtgcttaccttccaataccagtaaaccatcttcttgtgctaatccttcagatacacatagaggttgtggaggtgaaggtttaagtctgagagaatggttgaagtcggagcggcaggaagttaataaagcagaatgtatgtatatctttaggcagatcgtggatcatgtggactgttctcattctcaaggagttgttttatgtgacctgcgaccatcttcattcaaaattttcaaggaaaatgcagtaaagtatgtggtttcaggttctcaacgagagtcttttgacagcaacatgaacaaagagactttaagtcaactcgaaaaccctctggttagaagacggttaggagatacttctagtctctctatccctgcaaagaagcagaaatcaagtggaccaagctctagacagtggcctatgtttcaacgagctggtggcgtcaatatccaaactgaaaataatgatggcgcgatacaggagtttcatttcagatctagtcaacctcattgtagtacagttgcctgcccttttacttcagtgagtgagcagttggaagagaaatggtatgcgagccctgaggagctcaggggtgacatgcgttcagcctcttcaaacatctatagtttgggtattcttctttatgaggtatgccatcttaattgtagcttttgacctgcaattgtaagtatgtacatccatgagttgaaatgtgaatctgcaagcccttaatgttgacacacatatatatgttttcccgtgggattatgtctttaactgggacatatcgtgtgtgggtcatgtttgggtccagatagatttagatagtgtagcatgtttgttaatgagatggtaacagtgaagtttctcgttgaaagtacagttggctgcatggctcataggtttatgtatatattgattcgactgtttcttggtcaaaacataacattttcattgatatactaatttgtttttttccgtcagttgctgagccaatttcagtgtgaaagagctcgtgaggctgcaatgtctgatatccgacaccgcattcttcctcccaaatttctgtcggagaatccaaaggaagctgggttttgtctttggttacttcatccagaatcttcatgccgaccatcaaccaggcaatgcaaaatctttagctactataattctcaaatgatataaagcgtgttattgaacttttgtatgcttgtttctgttgatagtttaaggccatgaatccctagtgggtctattggaagataatcttgttgtatatctagaaatgtacatatgcaccaaatgtggaagttttgttctcctggctgtaaacgggaggacgattgtctcgtcaacagtttcacataggattgttaggttctactctgaaaaataattagtctttgtactaactgagctccctttatgtgttgatagtctccttcctgtcataatttatctgtcaagaatgtgagttggcttaatctctaaataagtttgatgttgttctgtattagggacatcttacaatctgaagtagttaatggaatcccggatttgtatgctgaaggcttatctttatccattgaacaagaggacacagagtctgaactcttgcagcatttccttttcttgtcccaagagaaaaggcagaagcatgctggaaatttgatggaagaaattgcgtccgtagaagcagatatcgaggaaattgtcaagagacgttgtgccatagggcctccgtccctggaagaagcttctagctcatctcctgcttctagtgtacctgaaatgagactgatcaggaacattaatcagcttgaaagcgcttatttcgctgcaaggatagacgcacatctccctgaagcacgttataggttacgcccagatagagatctgctaagaaatagtgataatactgtagcagaagtagaaaacagtgagacttggagctcagatgatcgtgttggagcgttctttgatgggttatgcaaatatgctcgatatagtaagtttgaaactcggggtgtgctgaggaccagtgagttgaacaacacttcaaatgtgatttgttctctgggttttgatcgggacgaggattattttgccacagctggtgtgtcgaaaaaaattaagatatatgagttcaattcccttttcaacgaatctgttgacattcattatccagccatagaaatgccaaatagatcaaagcttagcggcgtttgctggaacaactacattaggaactacctagcttcctctgattatgatggtattgtcaaggtatttgaacctttgaagttttacgtagattgtttatcacttgattacccctttatttccttcggtctaatgaatacaaacgtatttatgatgaatccagttatgggatgtgacaacaggacaggccatttcacatttcatagagcatgagaagagggcttggtctgttgacttctctgaagcttgtccgacaaaattagccagtggaagcgatgattgttctgtgaagctatggaacatcaatgaggcatgctcttctatactggattttgtcgttttaatagctactcctactgagatatctggcatatatacatatgaatatatcaatagcactttggattattctgtcaatgttgtcatgctcgtattttcagccttgtagctaatagacaatcttcttgtttgactgtgcagaggaactgcttaggaacaatcaggaacattgcaaacgtttgttgtgtgcaattttctccacagtcctctcacttgctagcctttggatcatcagacttcagaacctactgctatgatctaaggaatttaagaactccttggtgcatactgtcaggacacaacaaagcagttagctatgcgaagttcttggataatgaaactcttgtaacagcatcaactgataacacgttaaagctttgggatcttaagaaaaccactcacggtggcctctcaacaaatgcttgcagcttaacttttggcggccatacaaatgagaaggtagctaatgctgaaacgtaattttgagttaatctatataatgatgtttctctttttccttcgtggttgatttgtcttttcctgcctttttcagaactttgttggtttgtctacttctgatggatatatagcttgtggctctgagacaaatgaggtatgcccctacaaacctgggaactctttgatattcctataactttgtgtatggaatctccttttctataatcctttaacaagcattgccacagattgatagtttgattctcaacttaactagaagctccagagtttatttcatgtgatggaaaaaatcacagttccatgtgaattccgtctatttatacgcgatggaggaacttatccattgatactaacaattagtaaaataactggcgtagggtcaaaaaagaactaatctggtagtattgttgtttaagtgatctctctgattgagaaatatgctgtttcttgttttgttcaggtttatgcctatcaccggtctcttcccatgccaattacctcgtacaagtttggttctattgatccaatatcaggtaaggagatagaggaggacaacaacctgttcgtttcaagcgtttgctggagaaaaagatcgaatatggttgtttcagctagctcaaatgggtcaatcaaagttctacagttggtctgaaataaatacatacatacagaagaagctgaggtaattctacacctagagccctcttggtttatggtaaaacaaaaaccccatcaatccaagaatcaggcaaaacaacggagataacgaacaagctttcaacacacagatatgagatagttttatctatctgttgctaaagttttcctcaaatggggtgaaggaatgagagtgagtagaactatagttgttcaatagttgcggtttgatcagcgcggtaagggtttataccgctgatgggtatacatagtaaggtaaaagaccttctcttttgtggtgttctaaggtgtttatttttttattttttattttggctcttacaataagattcctctttgtgatatgtaaatttgctccgatagttctaaggtaaaagagcatactctgatgtatatatagttgaaatgagctttttagttctacggatgaatctcctccaccaagaaaagaaaaatcttcgtttttctttttaaaaactttaaatgcatcgttttttgttgaatgttcacaaaagtaatctttgaaatgctttatcattgtacatagcttaggactgaatcagcgtaataacgttatcaaggtttcttgctcaatcaagctgctccaacttgtttatggtcttcttcacttggtactgaaaacttttttactttctgagacaaacaacaacagaagatgaatcaaggccttgctcaatctaagatcaagctgtcttacatctatgagaaagacttaagaatcacaaagaagaattcatagtgaactagtgaagcatgccatatggaaaaacaattgttcaaaaactccaattgaggaaatgttggaaaaagaaaagaacaaaccttagatagaacacattctcagagagattgcagtagaattagacatttctcttgatcgaatttcgattccgaaacacaattgagaagattcacagcttcttgtcgtcaaattggtaggggaagctttttctccattatcataaaccctaaactaaaagtttctgcaaaaacaactattttatcgaactcttaatgggccatcaatgggcccatacttataaacttaaacccttttccaatttcagtcgtattttacaaaaaccatcaccgtcgttatcacagtaaccaaacaactttcatcgccgggtaagctccattcccaagctatttcgatctcgtttcacgtcgatctatttctagtcaagttaatctcttcttttagggtttaattagttaagacttgcgtttgattatctcaagttcagaatttgtttcttgatgatctaaaggaaggaattttatacttatcaaattgaggatttttgtttttggatgcagagaactgattaacatataagaaaatggcgtttgctagagcagtgagaagaccaattggagtcttttattatagtgttagtagtagatttagttctggaaatgagtattctactgtggcaagcaaattcgaaactttgtctcagtacaaaagctctgtaccgtctggttacacaagccttgttcgtggttttgggaatttcatacggagttttagttcggaagctcctcctgctgtatctgaccaaatgagtcttattaagcaacttagggaaagaactagtgctcctattaaagatgttaaggcttctttagttgaatgcaattgggatcttggtaagaatttggtttaggttttttgttttggtgaaggttgtgtatgttttgttgtgttttgaagtgggtttttttggatttgacacagaggctgctcagaaggatttgagaaagagagggaaagttttggcttcgaaaaagtcgtcacggactgctgcagaaggaatgcttgccgttgctcaaaatgaagggaaagttgctgttattgaacttaactgtgagactgattttgttgctaggaatgagattttccagtacttggttagtcccatagcaatttcacattggttgttgctgaatgatgggctttttgtttattttactgttccttgtcttctaaaattgacatgtcttgcaggctttagctatggcaaaacatgctttgctggttgagagtagttcgcagcaagtttctggtgtcttcccctttgggccggagctttttgaggtcagttttttatgtactcgcttgtttccttttttgttatttaaatttatggatttatgttgtttcctttgcactgtctgagatattgatatcaacttttcatttctaatcactctaatggatgctatcaggagttcaagcttaacctcgatcatccaaaagttaatggtgaaacaacggtttcaaacgctgttacagaagtagctgcaatcatgggagagaatgtaaaatttaggagaggtttcttgatgtcaaaatcttcagcaggcgtcctttctgcatatcttcacacaagtcctcaaccaggtacaatttgttcaatatacttcccattgtttctaatctctttttttatgatatttctgtgcatttctaactttaaaaaaaaaaatgagaatagggttgggtcgtatagctgggattgtatctctcgaagtagaaggtgaaaatactcaactagaggctattcagcgtgtaggctcagaactggctatgcatgttgtagcagcaaagcctttgtttttaagcaaagaccttgtttcttctgaagcaatggcaaatgaacgcgagattctaaagtctcaggttagtgtcactttatgttatgaaattgaactgtaatttgtaaaaagtacacaacctgcgttagaaaagtttgcttatcaaatgttgtatatgacaggcagaaagtacaggcaagaatcagatggcgatagagaagattgtggaagggcgtctccgtaagtattttgaagaagttgctctaatggagcaaaagtttattgtgaacgatgctataaacattaaggtatgtgggtcttagcttaaaacacctagtttaccgttttattacctctgcatcgcttgttgaattcaactcttgggctcctattccacagacactggtggataatttgtccaaggaggtaggttctccagtgaaggttaccgattttcttagagtcgaggttggggaaggaatcgaaaggtaaactaaccgtcacccgtatgtccagtacggcttatcattgttgtaagattagtcgcttatgaattttgttttttttgaaggcttgaagcatctgatgaaccagttgctcaaactgcttgaagacaaagaatcaacgacatggttttagatttacagaactctttccttctttggttcctttagagttcatggcttcaacgccttcttgagattatagaatctttctcatgattttgtttctcacacaatatggcaataagagtgattgtgcctaggaagctatgaccagaaaaaaaaaacatgtttgtgttctcctactcctactaagatcattatacaaaaaccttcacttatgtgtttgattttaaggtactcaagtatttgaataagcagatagtgagttcttggctcctccggttaccaacggtcgaaattgacggtttaatataattcatagacaaaaccggtcaactttatattatccacaatcaacgatcaagatcaacgagaactaatcttacggttgatatcatacatctgtattgagttacagtacaccacaaaacactcaataaacactaagcactcttcttctaccttttgattttcgaaaaacgcaaactttctgaaaaagcaaaaacttctgattctctcgagaatcatttactcttcacactgtccccgtctctctttctcttgggttaatcatggtgtcagagacgacgacgaaccgatcaacggttaaaatctcaaacgttcctcaaaccatagtcgccgacgaactcctccggttcttagaactccacctcggcgaagatactgtattcgcactcgaaatcccaacaactcgtgacaattggaagccaagagacttcgctcgagtacaattcactaccctcgaagtcaaatctcgagcccagcttctctcttctcaaagcaagctccttttcaaaacccataacctaagactctctgaagcttatgatgatatcatccctcgtcctgtagatccaaggaaaaggctagacgacatcgttttgactgttgggtttcctgagtctgatgaaaaaaggttttgtgccctagaaaaatgggatggtgtgaggtgttggattttgactgagaagagaagagttgagttttgggtttgggaaagtggtgattgttataagattgaagttaggtttgaggatattattgaaactcttagttgttgtgttaatggtgacgcttctgagattgatgcatttcttctcaaggtaaatttgttagtcctaatgtgttttgcgacaatgtgagtctgtgttgagtttatttaggagttcaggttctgtgaaaatgattcaagattgagttttttggttagtcatatgtttatgcatgtattggttctttgaatcctctgtgacagctttatggtttgatgaacgtgcatgagattgagattggattgatttgtatgcttgtgttttatcttggtctcttctgatttcttttagcttacatgttgttttatgttgcagctgaaatatggaccgaaggtatttaaaagagtaacagttcacatagccacaaagtttaagtctgatcggtacagattctgcaaggaggattttgatttcatgtggattcggacaactgatttctctggttcgaaatcaattggtacatcaacttgcttttgtttggaagtccacaatggctcaacgatgttagacattttctcgggcttaccttactaccgagaagacactttgagtctaacttatgtggatgggaagacctttgcttctgcagctcaaattgttcccctcttgaatgccgccattttggggttagagtttccatatgagatccttttccaactcaatgcgcttgttcatgcgcagaaaatcagtctttttgctgcgtcagatatggaactgatcaaaatccttcgtggtatgagtttggaaaccgcattggtgatcctcaagaaacttcaccagcaaagttctatatgttatgatcctgtcttctttgtcaagactcagatgcaatctgtggttaagaagatgaagcattcccctgcatcagcttataaaagattgaccgagcagaacatcatgagttgtcagagagcttacgttacaccctcaaagatctatctgttgggtccagagcttgagactgcaaattatgttgtgaagaactttgcagagcatgtctcggatttcatgagagttacttttgtggaagaagattggagcaagcttcccgcaaatgctctctctgtgaactccaaggaaggctattttgtgaagccctctagaaccaacatttataacagggtgttgtcaatccttggagaagggattaccgttgggcctaagaggtttgagttcttggctttttcagcgagccaactgcgaggaaattcggtctggatgtttgcttctaacgagaaagtaaaagcggaagatataagagaatggatgggttgtttccgtaaaatccgaagcatttccaaatgtgctgctaggatgggtcagttgttcagtgcttcgcggcaaacacttattgtccgtgcacaagatgtggagcagattcccgacatcgaagtgacaactgatggtgctgattactgcttctcggatggcattgggaaaatttcacttgcatttgccaagcaagttgcacagaagtgtggattgagtcatgtcccttctgcctttcaaattcgatacggtggctacaaaggtgtgattgctgttgaccgcagttccttccgaaagttgtctctgcgtgatagtatgcttaaatttgactcgaacaacaggatgctgaacgttaccaggtggacagagtcgatgccttgcttcttaaaccgggagatcatttgccttttgtcgacccttggaatagaagatgcaatgtttgaggcgatgcaagcggtgcatttatctatgcttgggaatatgcttgaagaccgcgatgcagcacttaatgttctgcagaaattgagcggagaaaattccaagaatttgctagttaagatgctgcttcaaggatatgcaccgagttcagaaccttacctctcaatgatgcttcgtgtgcaccacgagagccagctttctgaactaaagagcagatgcaggatacttgtaccgaaaggacggatcttgatcggttgcatggatgaaatgggtatcctggagtatggccaagtgtatgttcgtgtaaccctgactaaagcggaactgaaatctcgcgatcagagctactttcgcaagattgatgaggaaacatctgtggttattgggaaagtggtcgtgacgaaaaacccatgtcttcaccctggagatattagagttcttgatgctatatatgaggtccatttcgaagaaaagggatatctcgactgcatcatctttcctcagaagggagaaaggtacaataaatcaatcctttagagttatgcaccataagataaaccatatgcttctgattcttagtcccaacttagttgatggtttgtttctccttggtttttgttgactccacagaccacatccaaatgaatgttctggtggcgatctcgacggagaccagttttttgttagctgggatgagaagattatacctagcgaaatggaccctccaatggactatgctggaagcaggcctcgtctaatggatcatgacgtcacgttagaggtttgtttcttgaaaaggctttcatgatgtgaaagtttcctaatctttggagctaagctgattctctttctttcactctgctttgtaggaaatccacaaattttttgtggattatatgataagcgacacgcttggggtgatctcaactgcacatttggttcacgcagaccgtgaccctgaaaaagcccggagccagaagtgtctagagttagcaaatcttcactctagggctgttgattttgcaaaaactggagctccagctgagatgccttatgccttaaagcccagagagttccctgattttctggaacggtttgagaaaccaacatacatctctgagtctgtgtttgggaaactataccgtgctgtgaagagctctctagcacagagaaagccagaagctgagagcgaggacacggtagcttatgatgtgacacttgaagaagctggctttgagagctttatagagacagcgaaagcccatagagacatgtatggtgagaaactgacctcgttgatgatatactatggagctgctaacgaagaggagattctcacaggcattttgaaaaccaaggagatgtatctggcgagagataaccggaggtatggtgatatgaaggatagaattacgctttccgtgaaagatttgcataaagaggccatgggatggttcgagaaaagctgcgaggacgaacaacagaagaagaagctagcatcggcgtggtactatgtaacatacaatccaaaccatcgcgatgagaagttgacattcttgagtttcccatggatcgtaggtgacgttttgcttgatataaaggctgaaaatgcacagagacagagcgttgaagagaaaacaagtggacttgtatccatttgattgccctatataacacttggtgtagtagaattgctagttaaaggactataacgtcgcttgtatatgtgtcaaaattatatatgatatattaacaagacttgtgactttatattatgtgtcattttgtaattttgaatgtgaaaattatcaaaatgggagattaaattggtaaattaccagatgatttattggtacagttgacaaagatattgttgatgcaaaattagataaatggagtgctggcgttgacactaattctattagtccatgagaaaccgattgtgctatatctctagcagtttgatgtcagcttatggatttgataatattagtgaaattcttggaagatgaaaatagtaaataggtacacttcataccttaacatatattccattttttttttccgactgaatgatttcattatattatacgaaagtagaatgcatttttgaagtacaacgacgacaagagacgaactctgtcgggaactaagccggcggaatacatcaatatccccggaaacctaagcccaaaagagggaagcaaactataagcataaaagtacaagaaggtaagcttaaaagaaacttaagatctaaatctgaaactcaaaacatcaaaacctgcaaccaatcccaaagtaacagttggcgtcgggccgaaaccaagaaacatgagccacaagaagaaccaaccaagcatgcaaactccaaaggacaggagatcccgaagaagaacgaaaccgaaggctcaaccagcaacaacccaacagaatagagagcaggatgtaacatatattccatttattagatacatcatttattatttagtttgttatttaagttctaagacacaattaagtcataattttaaatttgttgatgtgtcatgattttaaaatcctcttatttgttgatgtggcctcaatgagcttctttttattagtagtatttatttctacatgttatggttcttctgaagagctttctatctcactaggaaaaaataatttgtgagtttggatttaattagcgaaccatatttctacatttttgataggtgcttgtgcttagtgcttgtaatatgtgtcaaggcagaggaggagaaaaaggataatgagctttcaaagattgagggtgttaacggcatggaagaagattagacgttggaaaagattaccataccaatgaacaaattagcccaagaacgaactacatatggagagggtcacatatgcgtttgaaggagaatgcttaggatagtaagaagggtttggtgtatgggtaaattgcttcacatataatagttttagtcatttatgcgaataactataataatcgtgcaaggttttggtgaattaatatattctcaagttcaactattgtgtgttggtttggttttgttttcaatatgtcgtagttgacgattacatagtattaaggctaacattgagaggagataaagaaatgagaaagcaaagcaagtggcataaacgaataccgatacgaaagagagttgtgagtttgattaatatgtgccacatctgatatacctcgatttttactgatttttggtatgatttaggtatagcttttacattggtattattgtgcgagaaagacaattgttgattcatgtcctttttaattacatacggtggacaattgttgagcactcctaaaaatagttaatagtagggcatgtgacagaataccaattcttcacaatggaataattagctataatatcatttatgtttgatcgtttgtaaatcgtaaatcgagagaagcacgtctaaacaatcataacgattttggtgtcaaatgaagatgaaatgcatctttaggataacaaaaattgaaacttttccaatatttgtttactttttagcactaaataagaaagaaattgagtacttagtcgcacttgcaattatcccttccatgttaaataagtaattatatacttaataaataaacaaaacaagaacaaatgatacttctgtttgggacgttgatcattgtttttgatatattttagttttttttaccaatacaattatttgttatagatgattcttagacgctacattactttcggatatcatcaactcaaaatttaatgttggtgcttccttttatgaggcaatgaacatcacaaatacaagtttcacctgaaacaagcacaaaactaccacttttaataataatgtgatgcctcttaatcaatatgcctcgtcgatagagcaaaaggattaccagaatcttagtcaaataggattgcctacattagtgaacttggacccgaaaattagagaaagggcattatgtaatctttgtgaacaaaaaacatcaaaagctatatactaataagattatagagaactcgaaaaccataatacatcggaaaaaactcaatagtaagagaaaaaaaaatactaaggttattgcaaaaaaaagttgggaagcttgcttggatcgtgaaaccaaaaggtcagaaaaccgattttaggattttgatttttgatatggttgtcattgattattaggaaatgttcatgtaaactaacaaattgacctcaatgtcaaaaatattcaaccttacatgatttatgattaaaatactcagtgatgataggagcaagaaagaaagtaagaattgcgttgatcagaaaatcaagatatccaacttgtggaggttttgattcacgatgcaattctcaccttctttcatgccatgaccatcactcataattatctctcagttatatttgctttatgtttctttgtggtgtaaaaaaatagtcatgcacttgtgatcttatataggaagaatcaaggataagggataaggatgtgagaatccaaatattattaatttcaacaaatattagataagaaaaaaaatctaacaaaatcttaaaatccacacattctattttttctattaataccattaaaacaattttgaatattttgtttgaaaacttaatgaataaaataaggttattctatttttatacctctatgtttatcttcatgttttccacttttgtggctagttttcactttcactttcactttctatgttttgtaaatttcattttcacttaagagcatctcatccacaagttctaacaagggttatgaccaataaaaaaataaaaatagatactaaattatgagtgagtttgagaaacctttctcaactgagagaccataaaaacgtaccttaacacatgccttgttataattgggtaaattgttcttttatactttaatctttataaataataatattatactacaataatttattttgagaaaataatagcgtttctattgcagtgattctcttatacctttgtcaaaacctaaaagcttttatggccgtgttcgggaaagtataaacccaaactctttctttgtttgaatctctctcgccaccttcatcttcttccatgtatatttcttgtcggccacaagtctctacttgtgtgccgttgctgtttggtcctcttaaagatatatatctatcgcttgtattcctctttaatttgttacttggaattgtagctcttcatctttccctctatacatatctcattttaacatcatccataaaagttatattctagaatgagttcgtaaagtaaaagaacttatgtatgatcaatctttagaactcttcaatttccattatgctttacttttatttggattgcgcctatttaacaagacttatttgtctagaaagcctaacaaacttcaaaaattataagatcatgtactttcttaatgacttacgaaatcaggtcgttttacttatttaaaatgacgtttttaccctcacatgaatgtaaacaataacccaaatgaacatctattcacgttcttcagtgattaaaaatttaaaaacacaataaaactaagactgaataaccataatttctatcacaaaattcatgaaattggttgcttgggttccctttttccatcattagggtttagttttcactaatgaaaaactatttgaattttatggagaaatgatttctatcacaaaatttcatgaaattggttgcttgggttcctttatcccataattaagttttagttttcattaactaaaaacaatttgaattttatagagaaatgataaaaaggaagaaatcatgaaaaaaaaagaacgatgaagatgagcgaagaagaagaagaaagaagaaagaaagcaggggtaaaaatgtcaattccaagttcttaaagtactatttttcaaagcctaaatggaaagatcctaaaatcaaagtttttggcaaaaaaagccttattttgacaataaccccatttaacaatgttttgtattctcttcagagaatttaatgcataagaataaaaaatggttatgtgtataaaactaggtttaagaaaaatcagactagctttaggtctagtgagaatcatcacttccatgtacacgtcttcgaaacggaaattttatcaaggaaatatgtcacatagcacagaacatctactaaatgaggcagaaactagcactgcaaatctatgctaggtttgtacttttgtgcttcttgttgtgactaagagtcatggtattaataagaaggaaagtagttataatagcatcaaagttttacataaatcttttgtaaacaagatttcaatgttagttggatatactttttagtattattattggattttataatccaaaaccttaatcttaatgtccaattaagttttttaggatttgatttcctaactaggtaaatcagttctctctttacagttttcattttatttggatgttatcaatgtcaaccaatattcttgatttgttttaaaatatttgtcacttactaaacttaagatataacatagtgaaaacatctagcaaaaatagatatcttgtgcatgcttggatttttaggtctgattaggatttttatttatgcttctttaaagcttacagagtaaaaacatttgtattattatataaggtagacaattgtagagagtcatgttcattttgcatatggtaggcaactattgaacactcttttaaaaagaaaacattaggggatcagacatggtactagttcattataatggattgcttagttgtaaaatcattttgtttgatgtttctagctcgtacaacaaaacaagcacgatgcaaataattctaaacgagttttgtgctaaaatgaatatgaaatgcgtatataggaaaactaaaagttgaaactcctcctatattgatttcctctttggcactaaatggtatatattacaataaatgtaaaactaataaaaataaaaaatgaagttgcacttgcagttatcgtctccatgttagtgaggccagccctgtggagatcaagacaaaacattttcttggggccctaaatcttaaagggtaatatgcatagttcatcagacttaaaaacatagaaattaataataataaataaataaataaataaagaattatatagatcatcgaccctcaaaatcgctaatgttttttaccccataaaactcaaaatcacctcagcctattaggtaaccaattttattattaaaaaaatgatattttgtgtgggataatgatcattgaacatttcttttttcttttttctctctttttagtatgttttagttattttttattattgaatgaatacctttatttgttatagatgattccaatatagcaactcaagttgaaaacctttagcccaataatatggttagctagtcaaatacagtaaaatctctataaattaataatgttgggactgcacaattttattaatttagagaggttttaatttatcgataaattaatcaatattaatttatagagagaatttccaaatttagtaacttttaaaaaattatataagattttttaattataaaaaatatctttctagaattaattacaagtaaaaaaataatatcatgtctaggaaacaaaaccagaaaaatttaatatagtaattataactaaatttcaaataggaatcaatacaaatttaagcaaaaacaaatattagaaatatatttcaaaaacaattcttacatataatgtatatatataattgatatatctatgcaattattaatttataatattgatgggaccatatatatatttacatagaactttcaaaaaagttattatcttattaattttttgatttgtgtcactttttacactggtcccgaatcgggaccagaaaaatttattaatttataaagattattaatttatcgagtattaatttatagaggttttactgtactgcgtccttttaattaagtcatttattagtaaaaatatctttgtttgaataagggaaatatttgttgaataagtttaatagatttactttttgtgatgatcattatttataaacgtagtcgttatacgttctaactgtttcactctaggcttcataaatttaatcttttagttgtcactagtcaaagtctcagttgtaattccacacttgttgagaatacttattaaaaagaattaaaaataacaatttaactgtgacacaaatatatataaaatgaacatacaagtttaccactacattaaaagatatttattaataagattatacaaaactcaaaaaacctaatacatggagtgagaaaaaaaactcaatggtaagagattaaaatattaaaatatcaagtgaaggtcattgcaaacaaaaaaagatgaagcttgattggatcacgaaccaaaaggtcagttcccaattttagggttttgatttttgatccaaggaaactttatctcccttgtgacatgattgtcattattataaattttcgtaaaataacaaattgacctctatgtaaaaactattaaatagtacaagatctaagatttaatactcagtgattatcatggctaggaaaaaggtacgacttgcagtgataatcatggaggttttgattcacgattcatgcaagtctcaccttcttccatgccatggccatcactcataattatctctcacttagatttgctttattttctttatggtgtaaaaagagagtcatgcccttattatcttatatagaaagaatcaaggataagagataaggatgtgagaatccaaaatattatgaattttaacaaatattagataagtagaaaatctaacaaaatccgaaaatctacatatactattttcttatgttaataccattttagacttaaaatttgtttgaatggattttgttggaaacttaattaaaaaatatatattattctattttataccattatatttatcttcatctttccaacttgtgactcatttttactttcactttctaggtatcttaatctttccaacttgtgattcatttttactttcactttcactttttaggtttgtaaatttcattacacttatacagctatcgacacctaaaagaatttacagtcgtgttcagaaaagtacaaaccccaactctttctacgtttgaatttctctccctatgcacttcgtcttcttccatgtatatttctttgtcagttttaagttcatgtttgcgtatcgtttttgtttgatcctcctataaataaatatatatctccttatatacacttcaaaaaaaacaattattattaccgtctgaaaacactatcatttaatacaatagcggttttagaaacgctctgtcatcggccacaagatttattcttctttgtcccttcaaactctaggtcatctttctctctggatatatcttagtttcacattatctataaaattaatactgtagaatgagtatataaaatacgtattgcacatgaccaatttttataactcttcaatttccattacgcatcttcttttgatagggcctatacaataacattttgtgtttttttttttgcatgagtacattaatgcataagaatgacaaatggacataggtatgaaactggatttaatttttttcatactgaagatgaaactagctctgcaaatatatgctaagtttgtgctattgtgtttctggttttggactaggaatattggcttatgtatctggtttttatgctggcatttaagaaaaagttggtatcataggatcaaagatttacataaatattttgtaagcagatttcgttgttagttggatatagttttttagaattattattgcttttataatccgaaaacccaatcacatcgtccaattaagtattttaggatattttttcctacctaggtaaacaaattctctctttacgatttccattttatttggatttgatcaatgtcaaacgattattttgattttttaaaaatgtttatcacttactaaacttaaggtatgacgaaatggaaacatttgtgttttaaatcagagcaaaaatatatattttgtgcatgcctacaaggattttgatttatacatacttaaaacatgtgtattattaaatcgaaatataaatcacattttagataacacattggtgttattatatgagctagataattgcagagactcttgtcctatttgtagctcctccttcatttcattgaccagagattcaaaactctctaaaaacaattatttttaataggacattttagccgtttttgtttgctcctcctacatactgttcaaaactcttgaaaacctttttttccaaacggacaatggaccatgggcttacaaagacttcacgtttactacaatacaaacgtacgtgagtagattaaattttatactttggacttgtcacttgtaaaactaaaaaccagactaaacggtcctagctggtccacatcactgccaccaacaatccaacatgtcaacacaatcccataaaaatgaatgtcgtgctctcttatgggccttaccatttgtgtgggttttgcagctctcaaatcacacttgaaaaagacgctcaacttcaactagaaccttttctccctttttgaaattaacactgacaatgatcgaaatccctttaactttggtccaatatctctatatgataagtcacaatgttacgatgaaatcttcagtcttcggacaataagttgattaatgtttcaaggtttctaatactagctaggtaagaaaaaaataaataacaagtgaagtgcataggaatgacacgagaagtgtacgtgaagagtgaaaacattcaataaatttgtgagtgaggataaatataagattctatctatctatctcgtgtatttaatgagcactgcaacatttcatgagacctattgttatactagtcgtcctctacgtatacactacgcatatcttgtttaccatttgaacatttatgatttttacctcatcattagtaatttattagactattgcggtagttattacaatgtctcacattgtttgggattaaaaattttgggcattacataaagaatgtaacaatcattaattctttaagtagtgttttggttaagttatatcacattcctaatatagtatcagagcctatgattggcccaacagacaaattccgacaaaaatggttttccacttatatagtccatacaagtagtatgtcttgttgtatttccgagatgttggacttggactgtttttcgttggaccgtttcccatctatatttcaaaaacgcgtattagaatatcctacatcgcttcagattaaaatcttagacataatataaaagatatagcaatctttgacttttgagctagcttttggattagttagatcacatttctaataatggttattcctcgactagaccgacttgattttaatttgttcgtatataggaatgtatgctctatgaaaatagaaattgtcaataaaaaagctgcccattataagacatgtcacaggtatagagacttaaaacggaaatagaaaaagttactatagagttaaaaaagaacaaaagttaaagtactactgtattatagaagtttttccacacatgtagctttcttaaagttcaaaataatatgagttggtatgaatcaaattcatttttttgcatagacacttgccaggattcgattctcccccacgtgtaattctaaaacatttgctccaaaagtagaacaattatggtttgctaatattgctatttgtcaaataaacccaataaaaagaaagattaaccaaagcttttcacaaattcggtgattcctcgtcacgtgagacaacacgtgatacgtcaaaagaccaaaagaagaaagaaaagtagtaaagcgtgaagaaactcgtgcgtgttttgcctccacgccgttcatatacagacgttacttaacggctaacgccaaaaagttcaccatttaccattagttttatttaaaaataaaatcaccattaattaagttacaaaaaagtttaatatatttaacaaatcttcattcaaaaaataaatcgccgtttttttttaatcctcgccgtcgccggtaacaaaacttcactaaacgccgttaaacggccagttatttcttaaacagttaagacaggatccgacccgaataaatccccaatatcttgaaaatggtcctcaacgtgccagctggagaatccagacccagacccgaatccaaacccggatccaaaactcatatccgcaaaaagattatctccaaataaatcgccgccgaaactttcactcatcgacgtcgagaaaccaaaaacgtcgtcgtccgagaacaacggcgccgagaaatctgaaccgttaaaagacggctcctttttaaccacaatctccgccgtcgatacaccgacaaactcctctttaaccgcagtagactcgccggagaacggagattcgagaacagaaaccggcgaacgaagacattctccaccgccaatgataaaatccgaaactcctttcacctccgtcgaagcttcttcaacattctccgtcaccggaggaggagggaagttaagctctgcgttaggaccacgtagctgaatagctgcgttatcgtaaacaatggcagcttcctccgccgtgtcaaaagtacctaaccaaaccctaacacgtctactcggatctctaatctccgccgcccattttccccacggtctttgcctcactccacgaaacttcctcgtcgccgtcgtaacaaccactggaacagtaacaacgcgcttctttctcttcttcttcatcggcttctctttatcagaaaccaccgaatcaagcaccacttccttcacgtacttcttaacacgacgtcgttttgtagataatgcatcaaaatcaacttcttcttcttcgtcgcttgacgaatctgttgcgtaaggatcagtaacagagattcgtaagattcttgggagagaaactttcttctctgtctccattttttaaatctctctctttaaaactgttgtaatagttttaacttatgtgtgttcttctttgtgtcgtgtgtttatatataaagaccaaagttaggaaaagtaaagggcaaaaaaggaataaagagagaaaattggtaaaacaagagattgatgctttgtaacaagaagattttcccgggaaagttgaagaaagcagagagcttttttaatatatgcttatggaatcaagagtttggtgaaggaggacactaaagaaggagatgcttttttcttatttagggatgaaatttcttttaagaaatattcctgggaatttttttttgcagcgaaaagaaaaagtttagagcagaagaaaagagtgacaaaagatgaagaagaagataaagagagaagcagagcaaaacatgtaagtgaagagagtgactctgaatagaacagagacttttataggatattgaaacggcggttgcggcgttttacaatccttttttttgtcattaagggaaacaaaatttgtatttaatgaccttggaggatgcggttttagtctaacctttgaccttaagaatttaaataaatagcagtaatcaagggtggttaataaatctaattaaattcttaaaacctttctacgaagaatcgctctttttcgttcaacgacaggggtgttttggtcatttgctaactaagtaaaaacaaattagaccgttgcggtgtgcaggttttttttttacttttttacctttttagcagtctctggtctttttctacagcaggtttctgacgtggcagagacgacaacataggatgttacgtcaaaaaaaaactaactccattcgacttgtgtgtctttttaacgtttttttggagtattgattaaatttctcttgtttttgacatgaatattaattaaaatttattttattaaagtatatttttgtcctttttaacactctttatagaaaaactctctttttcactgcatattttcacgtgagtgttaaaccagagaagaaacaaaggcctttaatatattggttcttttaacgtggaccgtgtttggcttttttcaagatacgtttttctacaaacaaaatattaaagtgttgatttggccaaaattacagaacacagtaatatatgtgaagtgaaatggtaaactcaaaaaaaaaaaaaaaaaaaaaaaaaaaagaaatggtaaactcattaagccacaattataacttccgaatcaaaattatcaagaaaatacaatccgcaaaaaaaaattcgtgatgttatatacttatatctaatcacttcattttttttaatcaaaacaactaagaaagtaaaataatattttattaattctagatttagagagatattttttaaaagaaaataaacgctattattcggtgttactacaaacaaatgatacttaatagtgatacacatttatttatttgtctcatttttactggaaagtaatttgctttataagaatgaagtatttgccttataccctaaggcctaagcaatatatggatgtgattagtaacatatatgttatgattgatttaatttgaggtatggatgttatattcatagttagcttaaaaatattgctaagtaagaattcatttaaactttagagttcgcgttttgttgagtattaatggttgagttacaagttttagttatcacttctggaaactttatcttactatatagtattgtgtaagaaagctcatcttctgtatacattggatgatatacttattcatgctaagcaagaactaagaaaataatttacacagcaaaaaataatattacaatttataactatgttgatagcggcaaaagctgaaatctttgtaattcatcaccttcacggggtacacacgactctactaaaataattcatgtaaaatcttgagtcaccgatatccacacgtgtcccttatgtttaaattttaaaatgtggatattgcttttcctaaatttggttagtatctctgactagtgactatataaacttttagttacttatcttagccgattggataaatttggctgacaagtttataataaaaaaaaaaccacttcgttttagtttgttatcttgatgttattacatagacaaattgaggttttggcctaaaatcatgttaaaaaagacatcaaataaaacatcaaaccccatttttgaaaacaagttagctacccaatcatttgagagtccaataaaagtggtagtaatagaaactaggttttcaaagtttcttcgtgagaataaatagcatatgattaaaggtaatgatgagccttcttcatgacacgaaaataaaacaaaataagtaatgatgtgcccttggtccatgtaatattatgattatgacaaaatcatagagaaagtttttttaatagcggtaaattacgataatcgtaataatgtatacttaggttttgaataatgactcaaccgcacattaccgtgcgttttaagtagtaacaacttttttttaatatatatatatatatattttttttattactatttaaaccacaccagattttatctgcagttgaaccgtacattttcatcgaagccttaaaacatattagctcacgttattgggagatgtagctatcgatatggattaatggcttaggaagtaagagtttgattaattttgaaccaagtataagaaaaaaaagagaccgtacggataaatgtcgaagaatataaggacaagagttggacgttagctagtaggaagtgggcctcacttaccgctcgcaccgttagtcccgcaaacggcgccgttctctcgtttcgagccatcatcccacttgtttgttgtttcatgtgacttcttcgtctcgaggcaaacttgactcttcttcactttcgcttaattacccatttgtctgccaacatctcttttggctatatactcatgaaactttaaaaaatcttcttatttgtatgttcgaaactccctgaaagtttcagtcttcttatgtatgacaagaatcgcgagagactatgcaatgaacctaatcaaatataactcttctcaagaaatgatatgaaaaagattcatgaacataagagttggtccttggaaagcgacctcttcaagtcttcattaattagacattgattcaggtgcttaggagttaggacaatgtaaattaataaacaaaggtggtgcttaaggcggtccatgacgttgtagaaagtatttttttttcgtataagccgactatatacatatgtgtttttcatttacttatcgcaaataagaaacacacactaatcaactatttgtaaattcaaattcaccaaaattatttatgttatatgttgaacctacgaaactcatagacacagaataaaacataagtgaaaagactgaattaaacacttacttataagtgaaaagactgaattaaaataacaaagaattatcaatagtatttttaataaaattaaacatttaaaaaataaacttatttgaggacgtaacctaaaaatctctatatagttgtttttgacgaatatgagttttattataagactaatttttccaagagataaatttataaaaaatattaaatacgtaatattttttaactccaataaaatattgtaatttcaaaccaaatatttattaattaaaatgtgtaatgagatacttacatatcatctagacaagttgagattttctttatagggttttgtaaaaatttgatgatttttaacaagaagaaatccataggaactaataataaaaaatacaatgcaatgatatttaaaaaaacaacaactgcattgcagtgaatttcatcaaaatccattaaaacatttccaaactcaaatagaaacaacttcaaaaccttaatccaaaatgttatagatagatatgcaatagctcttaggcctagtacatagctagatcttgtaactcgtgaaggcaaatgattgggacgttggttcggttctagtggtcgggctcagcctggcggaaaaaattgttatgggtctaaggcccataaagtggcccagaaataaactcgtcgtatttacacacgttgtcgtttctcttatcttctagaaaactgtatcccgtttttgttcttgtactctacacaaacagacaacttcaaattactcaacaccacgtcgtgaaaatccgatctacgtctctgtctctctccaatctctctgcgccacagaattgtgcgatttacgaaaatctctgaaacctccgatcgttaacggcgaccgccgattttcccggtaaaaatgaacgacggagatgtatcgaggcagatccagcagatggtgagatttatccgccaagaagcggaagagaaagcaaacgagatctcggtttctgctgaagaagtatgatctttagtgtttctgtttccatttatcagatcttatgatatgaatctctaattcaatcgtaagcggtttatctgattgttatcgatttggtttatttgaataatcgtaggaattcaacattgagaaactccagcttgttgaggcggagaagaagaagatcaggcaagattatgagaagaaggagaagcaagctgatgttcgcaagaagatgtgagttttctgatttcaatttttttgatcttggttaagttttaagttagatcgcttgttctggattacaatatctctgaactttgaaaaaattagaagtttatgatttatagatttgaagttttgacttgattgatttcaaacttgtaattttcttcattgatgaataagaaacatagtctggtttagtctaatcggcaaaactgaagactaatttagcaattagtctgatgtaagattatggtgtagtagtgtactgtgttgatctagctttcaaattctctaatattgttagttctctgtgaaaattatgttgatcttgttcatttactgtgttatcgtgtattactttgccagaaaataactgtcatacatgttttttcagtgattactctatgcagctaaatgcatcaaggatcaaagttcttcaagcgcaagacgatattgtcaatgccatgaaagaccaagcagctaaggatcttctgaacgttagtcgcgatgagtatgcctacaaacagctcctcaaggatctaattgttcaggttggtacttaaaacaaatccctgatgcattcaaataaatatttgatatttggaacttttttttgtatatcctactggagattatgtaatcgtgtcggatggcaatctttttttgtgtgttttgatccgttctgctgatgtcattttgcatttcgaataccttttggtctgttaaagattctctcttgaattgttgcagtgtttgcttcggttgaaagaaccttctgtgttgttgcgttgtcgtgaagaggacttgggtttagtggaagctgtacttgatgacgcaaaggaggaatatgctggtaaagcaaaggttcatgccccagaggttgctgttgacacaaaaatattccttccccctcctcctaaatctaatgatcctcatggtctccactggtaaaatttcatgtttctcatcattactttacatttaaatttttataaaagaacattatcagtgtttagatccggtttgatagtgtattttgaacatgtaatagctctggaggtgttgtgttagcttctcgtgatgggaaaatcgtgtgcgagaacacacttgatgcgcgtcttgatgtggcattccgtatgaaactcccagtggtatgaaaaacaaattctctaccgcatagattacttgttatgatccatcactcactgtctaggtttacttttttactttggttctctgattcactcattgttgttaacagatccgtaagtcgttgttcggccaagttactgcctgatgaaagaaaggaaaagagaaaagagattattcaaaccggtttgcgtttggttatttacctattttgggagagatttctctttgttgtgattctttgtattttgcaaaatcttactttggtgccaaacccatcgaacgcttctttttttcgaattcctttttttcattcctcctcgaatgtgtgttatcatggctatacaaataaataaaatgaaagacttcttttctttttcttcactttttctattcaatgtctatgctttatactagtggtttttcgtcatcatagataaacacttaattcataaaaagacccttgaatttttattataaggttagcaatttatccaacacgatcctgaaaatcgtccatcctagtatttttttcgtctaaacacctttaattgcggagttttgataagtttttaacagaaaaaaactcgaataagatatttttttggtttgggctaaaattgttatagacttggcccttgggttttatcccaaatacattttaggtatcacaaacaagaaaaacatagaagtaaaaaactagaagttttttgcgcttttgatctttgtccttttttctacaagttttttctccagactaatctcctcacgattgtctgaagacaagagtctacaagaccggagattcaccgttcgacaataatttccgtacctttcaaggttagatgttcttgcgcttaatttgacttgtgttctttttgtgaattttggatgcgcgcacaaggtgtttgttcatttgcctagacaaagtaaaattgatttagttattcttctcattcatcttctatagtatttgtacttgagccaatcattattcatctttggtgcaatctgaatctgacccatttgagctgttttgtctccttgttcaaattttgtgtgaatgtgtgtaaagaacgcagaatctaatagaagcttctctttagggtttgggttgttaggacatgcgtttcatcctctcaaattttgattttgtttcttttaatgaactcaagggttagtttgatgcttatcaaattgagggtttttgttttggatgcagagactgatttgacatatgaatgacgtcgaggcacttaggcaagaaggtgctctttttatactctttaccttttttttttagtgaatttcgtcgagtgtttctgaagaatttcagcgaaaagtttgtagctttagcttccatttcgttactattttctggtatttttcccaagatatgcatagctttaatgcaaattcttggtgtatttatgtttgctggtttgattagaagttatggatgatggatgattattaaatgttgtattcttagttctcatgctgtttatttattggggtttaggcctttagcttggatttaaaagtctatctgacattttatagtgaagcaaatttgcatatgtatgaatgtgactagacatacgagtatgcgtttatcattgtctaagctattggtattttaaattcttgatgtgaaatattactatttcggctgtctttcgaattgttgattctaaaaatcgttagacgctactctgccggtgaagtagcgcttagcgcctagacggtcgaaacggggattaatcggggcctaggcgttaaagtaaactataatgaatttatattgttttataagaaattttatgaaatttattatattataagtgaagttgtgatgtgaagttatgttggtcctgtggctttctgctcaaattttattgctacagcccttggttcgatacttttcacgctaaaaaaatcgaatttcccccacttaaatgataggggcaaaattgtaatttaaaaatgttggggtcatcttcttcctcaaaaccctattcgcttgtttgatcgttttttcgcttatactcaatttttttcgtttttatccgcttgtttgatcgttttctcacgtaatcaaaccaaaataacacagatctaccactaaaatacatattcatgatcaaaaagaagataattaagtagattctcatgaacgccgatttgttcaccgattgagccaaaatcgcggcggtccacgcagaaatagcgcttttttcgacgcctagtcgaccgattagtccgatgtttagaagcgtttgttttagagaataattatgccttcatttttgtcaagtttgtttggtttggtgagtagtagttacacaatgttcttattgctttgcatatgtttatggatgtctcaagaaactttatgaaatttgcagggcattcaagcctcttttagaataggtttggttcttcctcgagtagtagcatctacagagagacagatttcctctacggttttaaaaagagcttctgaaagtgtctctttttcattcgctccgtacataaatggtaagtgtcactcacaggcgattacaatttttcttagattgttagaaaatgaattagaataacgagtaatctcacccttttgttcatgtttagggtttggttttagttcgttatcaaattggtctcgtagttatgaatctttccctactgaaacatccataaggtaaaccattcgcctagacttttctgtcatttctctcttaaatttcatcctcagagcactcactatgtgaatgtttgctggcttgggttgtgtttcttcttgaacaggtattttcatgcgagtcgagaaacattggcgaaaagaaaagaggatgctgatcgactgctgagtcatcgtgaacgcaagaaacagactgtgaaaacgaaaggaaagttctcaaaacgggagaaaaaaacagataagccacctgttgaagctccttatgtgcctcctaggctgaaaagattggcaaagggattgcctgggaagactgtcgacatatttgaagggatgacactacttgagctctccaagcgtactggtgagtctgtggcggttttgcagagcattctcattaatgttggggaaacttttagttcagaattcgacacaatcagtgttgatgtcgccgagcttcttgctatggtaaggtgattctacctctagtccaagataatagatttcacaggtcaattaactcatcctttgcaggaaatcgggatcaacgtaaggaggcaacattctacagaaggatctgagattcttccacggcctccagttgtaaccgtaatgggccatgtcgatcatggaaaaacctcgttgctggatgctttaagaaacacctctgttgcagcaagagaagctggtggaatcactcagcacgtgggtgctttcgtggtaggcatgccggattctggcacttcaatcacattcctcgacacacctggccatgccgctttcagcgagatgcgagctcggggagctgctgtgactgatatagtcgtcttggtggttgctgctgatgatggggtaatgccgcagacactcgaggctattgcgcacgctagatcagcgaatgttccggttgtggttgcgatcaataaatgcgataaacctggagctaatccggaaaaagttaagtaccagctcacgtctgaggggatagagcttgaggatattggaggaaatgttcaggtgaaagataatccgggttggttcggtttaatatggtttttgttgcaatttggacttggtttgttaatatgatttgacttgttgtttcaggctgttgaggtatctgcagcgaagagtacagggctagacaaattagaagaagctctgcttctccaagctgtggatatggacctgaaagcacgtgtggatggaccagctcaagcatatgtggtggaggctcggcttgacaaaggccgtggaccgttagccaccattattgtaaaagccggaactttggttaggggtcagcatgtagtcattgggtgtcagtggggaagactcagggctattcgggacatgatcggtaagacaacagaccgagcaacaccagcgatgcccgtcgagattgaagggcttaaaggtcttccaatggctggcgacgatgtgattgtggtggaatcagaggaacgcgcaagaatgctgagcgaagggaggaaaagaaaatatgagaaagatcggttgttgaaagcagaggaagcgagattagaggaagcagcagcgagattggaaacagagtctgaagaagggtttgttcgggttgaattaccgatagtagtgaaatcagatgtgcaagggactgcacaggctgttgctgatgcgttaagaacattaaatagcccacaggtacgtaaaacggaaatattggtttatggtgattgtggcttattgttttgtgaatttgcctattgtttatattgtggataggtgtctgtgaacattgttcatagcggagtgggagcaatatctcactctgatttggacttggcacaagcttgcggtgcgtgtattgttgggtttaacgttaagggtggaagtactggtaatctttctgcggctcaaggcagcgtcaaggtatgccgttctgttataaagaattcatacgtatatagctttgataatttccattgccaacttgtgcgttggcgttcacattcatatcatggagatagcgtttaacattgtaaccgatggtaatctcttattaggtattccatcaccgtgtgatataccatttactcgaagacatcgggaacttgatcgtagaaaaagcaccaggagtttcggagatggaggtgtctggtgaagccgaggtacttagcatattcaagatcttaggaaagagaagaaccgaagaagatggagtaaacatcgcaggttgcaaagtgatggatggtcgggtatgtagaagcggactcatgaggctgttacgaagcggagaagtggtcttcgaaggctcgtgtgcgtcgctgaaacgggagaaacaagacgtggaacaggtcgggaaagggaacgagtgtgggcttgtgtttggagattggaatgattttagagtgggagatgtgattcaatgcatggaaccagtcattagaaaacctaaattcatatcctctgagagtggagctgtgagaattgaatgctgagagagctactaaaccgtaaaactcctaaatcaattaaatctgattgtttaggatattgatttttggtcttacgctgatgattatttcttttgttatactagaaaactgtcttattatcaaaagaaattcataggtaataaaagtttggtaactttgttaaaatgccttctttgtttcaagatcaataagaacagacttcccacggttgtgctatgtaggtcaccgtgatgttaaacccacggatgtctttggttaggtctctataatagtcaagtcttgtatatcaaaaaaagtaaagaaaaacaaaatgtagcatgtctacaaagtctttttagagtctatgaaacttttgaaattttaaaacatgatatcactttgaataattctttttgttcttacattttgttgttgttgttgaaactcgataaaaaaacaaatggtagacttcaaaagtctatgaaacttttgagcttttcaaaatatgataaaactttgaattattctttttggtcttacatttgtgttttattgaaactcgataaacaaaaaaactgtagacttttgaaattttcaaacatgttaaaattttgaatttttctttttgttcttacatttattttttattttttatttatttattgaaactcgataaagaaaacaaagtgaagtagtcgaccaaccctttctcagatggaatggttttgagaataacttaatgatgatataaatatgtatatgtgattcatatattgtagtgaatttttattccacttgtaaactaagggtgtgactgagagtaattagaagaaaagggaagaaaaggaatgagaagagttcagaagaaaagaaaagtgaaagtgagaagaaaaatttatatcatgtatatatgggtgaattttttaacttgtttctactaaaagtagaagaattgagaagaatttggtggacaataaattctttctagtaactgggaatatttggttttcttctcgtttcttttcctctatacaagctttccagtcacaccctaaatctacaatagcaaagtcaaccaaccctttctcagatggaatggttttgacagtaatataatgatatatatatatatatgatttatatattctagttaatttttattctacttgtaaactaaatctacaataacaaagtcaaccaaccctttcatagttggaacttggaatagtttttaaaaactccgcctagcctgattatttcccgtttaatcgataggcctactctatccacatagattaatgattaatcctttaaaaaatcagttattttattactttccgtttaatctgatttctttctgattaatcttcgtctaatcttacatatcctaactacttttagattgcaagtataaaacaatttttctttttgctatttagtcatttaattagaaagtttttgatgttttacaataacttaagttcaaaattttaataaaaatcataaattttgtcttaaatctatagttttatgtatctatattattaattgggaagcattgtgtgaactataaaattgtaagggtagtttaaaattaactaaatgaatttttgcatgggtaatttagtaaattaacaactagtacaactaaataaatatcttggattttgttcttttaaaaaattaaatttaaaatcaataaatttgtaactacccaatattttcagaaatcatttaaaaacgtttccataacatatcagactattttaattcgaattgtatatatgtaaatttatttattttggtaatatgttattagataattcaaaaatttcaatctaatttaataacaaataatcatttagtttagattttaaacaatttccttaacaaaactatgttaattgtttctcattagtacacttaaaaagaagattttaaattatgatttagcatattcaaaagataatttttggattttagatttgtaaatatctagaagatattatgagtatagattaaaatatttaacattttaattagaatttaaatcatataaacttttcaagtatttttttaaacatgtaattttcattatttttaaacaagtaattttcattatttttaatgctatgcatatattcacattgcctcacaatcaatctagaatatcgattctttaaaacaatagatagagattcataagtaaattacttcatgttctaatgagtttatctcctaatattactatctatttatgcgtattcttatggatttttctttcaggctaaacactagattacaagaaactagattatagttatacaatcttaaacaataaacaaaacaaatataacttaatttaattttttatttttaactaaaatcaacaaatttattagtttataaaaaaccaaaaactattactcaaccatataaaaaccaaatactattatactttaattataagaactacatcttatggaaaggtatacactaaaaatcggttttatatactagaatatcataaatatataaatcacaaattatttttaaatatattaatctaacatgtaccacatgtcaacccctcgatttttttatatattacaataacaatatttaaaaataacaaaatagtttttcattttacggaataaagttatatggtggaactagtttgggttgatattaatacgggacaataatctacaagtgaaatcttagaattaataattataacataattatacaatcttaaacactaaacaaaataaacaatatttacaaaacaactatatcttaaaatttgagtttttagttacaaacaaatcgaccaacggtgtaccgcggagtaaattttacattatatcatctaattgatcaaaaatttcaaacaaaaataatcaatttatatatacatcaaactaacaaaaatacacaaattttccaaatatctctatattattccgcaactcgaaacaaatataacaatctatttactatgctaaatacaaataaaatataaataatataaattaattaaaaaaattagctattttatcataaataacactatacactttctatgcatattataatttgtacactataatatctttcactaaaaatgtattccaatacatttcttaaaatatgaaaccccgcacgtatgtgcgggtcagaatctagtttactataattttgaaaacaatactagattaatatgtttttaaaacattaatataatcctaaaactaatctcgtttaatctccgattttaatctccgattttaatccgatttatcgattaatagctagtcccataccgagcgcccgattaacgcctaacgcgattttttaacaataatgatatatatatatatataaatgtatatatgatttatatattctagtgaattttacttgtaaactaaatctacaatttaaaagttaattaataaagtagtttagaagaagaagaagaaattgggttgtcttccctaaagattttttctacatatgttcgtagagaactattttttctaatgacaaaaaaatatttatatttaatatttttaatataggtttcaaaatgtatcattcataaactgcaatactaaatttaactaaaatgaatgaatttttaatttcatgctcaagtctaccgaaaaagataaacaaaccacaaaaaataaaagaatattatgggggtgattggggaggaggactttgaaaactgtaaattctattaacaatttttacagttttaatttatccgatcacacttttttgcttttaataatttaaaaattctcacaaccttttttctcattttgttctttgatttcatgtttttgtttaaatcgcataaatctggctttaaaatgataataaacaaaagtcaatagtttttccttttcgttcttctccatatttatgaaaactcccatagatgaattattcctttttaatttttttttacgtttatttacaattgaagtctttttcttgttttattaagttccatattttcaataattatttaaaatcataatttatgttgtcacaacctatagtatatagttatagtttttaaaatattaaaaattttatagcaaaaatttatgcagcaaaagtctttacagccaaaagtaactttcgagatgcatgttttaatttgtcttatttacttgatgatatacaaaagtcagcctaggcgacctttaatgagatgcatgttttgttgtctacaagggtctagttgcaatataataataaaaatgaaattaccatgtcatttcctagaaaatctcatattacaactttgacacgcaaaggcattccatagattctataaattgctctcccaaaacactccaaacaagtcaatataacaaatttttatcttcaatcctctccccatggcatcttcttcttcaaactcttggagatacgacgtctttcctagtttcagaggggaagatgtccgtaataactttctcagccacttgctcaaagaatttgaaagcaaaggaatagtgacattcagagatgaccatatcaaaagaagccacacgatcggtcatgagcttagagcagccattagagaatctaagatctcagtagtcttgttctcagagaactatgcttcttcaagctggtgtttggacgagctgattgagatcatgaagtgtaaggaagaacaaggactgaaagtgatgccggttttctacaaagtggatccatctgatataagaaaacagaccggaaagtttggaatgagtttcttggaaacttgttgtggtaagacggaggagcgacaacataactggaggcgggcgttgactgatgctgccaatattcttggagatcatcctcaaaattggtgagtttttatatattttattttcgtttggttagattctgtatgataaaccaaaccaagatagatttgtggtctaatgggctcaatgagtttttttgtgcaaaaaaaaagtaaaagaagaaaatatttagattatcaccaaaaacacaatggttttagatttgattttctaataagggaaagaggagagtaactcaaagtggcaactcgctagattgccttacaaatttatatgaatttctacttgctaaaactttagttatatgtgctaatagacactatcttagtcttcttatggatcttctaatagattactcatgactaattactgaaggaaacctttatttttcataagaacaattccctgatgcactaaaccacctactggacatgtttgaattgttttatgttaaaattgtcccacattagagattgagatgaaaagtagtactgtattatatgataagttgggctaggcggccgtgacgatttttgaataaaacgatatatatttatttttaaaaatttgctaatttccagctttttataatgttttttttcaacatttcatgtagtagtatataaatatatcgttttatgcatgccaaaaaaatatatatcgtttcattctaaaaccttttaaaccgcctaaaattgtatagtccccgactacgtgttttaggcgctaggcggagggtcaccacccacttaccgtctagcgctttcttgaacactgattatatgtaaattaaacaaattaattaaaggaatgaacactcaagagtttcacgagttggaatgatggtgtaatagtcagtaaatctcaccagaaatcattttgaaccgcatttcatgaagcttacaaatatatttatatattgtatttcaaagtttcatttataaatgtgccttaggatttgtaattttgtaacttgttattcacatgatgattgcaaatggtaactctagaggttttaagattttcctttcaaaatatatattcctttttttgttttttttttgtttttatggtcttaaaagttaatctaggtttttactggaattgacaacggctatgattttacgtttctttcgagttataaatgttttttgggtgttcaagtcctagagcatatgcattggtgagtctttcaccaaaatctcttatgaaagtctctaaaaaaaagttgagagagtgagagactactagaaactctctcaactttctttagaaactcttacaattaagggtttaatgcaaaacaaaatctttaaagttgttagtatttgcaatattatcctctattttcaaattaaaatgtagaataataaaataaaaaataatacgcaatatggtcctacatattttggagataaatggtatagttgcaaaaattagtagctttgagaatattttttatcaaaaataaactataatatttattattttgttttcttttgtagatgagagattttggtgagaaactgtcattgcacgtgctcgcatactaaaattccacattataaagctttttacaccaactgtttaagagctagacacttaatgatcttatttttaatcaccagggacaatgaagcatataagatcacaacaatttccaaggatgtattagaaaaattaaatgcaacgccatcaagagatttcaatgacttggttggaatggaagctcacattgcaaagatggaatcattgttatgccttgagtctcaaggagtgaggatagtagggatatggggtcctgcaggcgttggtaagactaccatagctagagctttatataaccaatatcatgaaaacttcaatctttctatatttatggagaatgttagagaaagttatggtgaagcaggcctcgatgactatggtttgaagctgcatttacaacaaagatttttatccaaacttcttgatcaaaaggatttgagagtacgtcatttaggcgcaatagaagaaaggctaaagagccaaaaagttctaattattcttgatgatgtggacaatattgagcaactcaaagccttggcaaaggaaaatcaatggtttggtaacaagagcagaattgtcgtgacaacccaaaacaaacaacttttggtttctcatgatatcaaccatatgtaccaggtggcttatccttcaaaacaagaagctcttactatattttgccagcatgcttttaagcaaagttccccatcagatgatttaaagcaccttgcaattgaatttacaactcttgctggtcatcttccgctggctctacgggttcttggttcgtttatgcgtggaaagggtaaggaagagtgggaattttccctgcctacgctaaaaagtcgacttgatggagaggtagagaaagtattaaaagtcgggtatgatggcttgcatgaccatgaaaaagatttatttcttcatattgcatgtatttttagcggtcaacacgaaaactatttgaaacagatgatcatagctaacaatgacacatatgttagtttcggacttcaagtcctggctgataaatctctcatacaaaaatttgagaatggtagaatcgagatgcactccttactacgacaattaggcaaagaagttgttcgaaagcaatctatttacgagccaggaaaacgtcaattcttgatgaatgctaaggaaacgtgtggcgtcctttcaaacaatactgtaagttcttcttcttttctttttgcgaaatctgaaaactgcattcttaactaagcaccaaagtaacaattaaagtttttgaatttgacatgtataataacattattctagatgtattattatagaactaaataacatatcatatcctcctaaaatcttgaaattgtaataacatatttcatgaactattacaatttcttaagtcaacatatactcgaatttatggtatcttttcgctctcacgatttgtggcattgttcatatctgaaactttttttgttttgtagggtacgggaactgtattaggtatatcgttagatatgtgtgagatcaaagaggagttatatataagtgagaaaacttttgaagagatgcggaacctcgtatatctaaaattctatatgagtagtcctatagatgataaaatgaaagtcaagttgcagttaccagaagaagggctaagctatctaccgcaattgaggttattacactgggatgcatatcctcttgagtttttcccttctagctttcgacccgaatgtcttgtcgaactcaacatgtctcatagcaagcttaagaagctatggagtggagttcaggtcagacatatataatgcttgcattttttttaattaacgaacatatttcaatgattgttttatctttttttagggaaattcctaaaaatagaattaaaacaagttttatggataataatagcactactatgaagtttttgctctaaaagtattgttactaatttattttttcaataataccataattttatattaaatctattcaaccaaaataaatttaaaacattatatttggattctctattttcaatttagggtataaattttaagaatttaaaagaaattttgattcattttaatattagtttatgatattatatttgggttctctattttcaattttgggtatatattttcaccatttaaaatatatttttcattttaaaattagtttgtgatagtataattgggttctctatttccaatttagagtatatatatttttactatttaaaaaataatctaattcaattttatattagattagtgttggctctcatttttatttggaggattaacaaaaaatatactaaaaaaactttatcatttaattaacttttagagggttaaaaactttatgtgttattttcgaaaactttaaaagaaaatatcatttttggaataataaagtgttttagtgtcgtgtcaattcctattttttttttaatccccacggctaccctatctctctctttttttttccgtgcatgttatatgagtactagttggcatattttttgagctttttgtgagttttgtgttctgtcttaagctttttgtgagttttgtgttctgtcttggaagcacattgagatgttctttctgcttgtgtttatgtgcagccgcttagaaatctcaggacaatgaatctaaatagctctcggaatctggaaatccttccaaatcttatggaagcaacaaagcttaacagattggatttgggttggtgtgagtctttggtggagcttccttcatctataaagaaccttcagcatctgattttgttagagatgtcttgttgcaaaaaattagagatcatcccaactaacatcaacttaccatctctagaggtcctccactttaggtattgcacacgattgcaaacctttccagagatttcaaccaatattcgtcttctcaatttaataggcactgcgatcactgaggtgcctccatcagtaaaatattggagtaaaattgatgaaatttgtatggagagggctaaggtcaagagattggttcatgttccttatgttttagaaaagctatgtttgagggaaaataaagaattggagactattccgcgatacctcaaatatctccctcggctgcagatgattgacatctcctattgcatcaatattatatcgctaccgaagcttccaggctcagtatccgccttaacagctgtaaactgcgagtcacttcaaatactacatggccactttcgaaacaaaagtatccacctgaatttcattaactgtttaaagctaggtcagagagcccaagaaaagatccaccggtcagtttacatccaccagtcctcatacatagctgatgtcttacctggtgaacatgtacctgcgtacttcagctaccgaagtaccggaagttccataatgatccattcaaataaggttgatctttcaaagtttaacaggtttaaggtatgccttgtgcttggagcgggaaaacgtttcgaaggttgtgacataaaattttacaaacaatttttctgtaaaccgagagagtattacgtgccaaagcatttggattcaccactacttaaaagtgatcatctttgcatgtgcgagtttgaattaatgccaccacatcctccaacggaatgggagcttctccacccaaacgaattcctggaggtttcctttgagagtcgcggcggcctttataagtgcgaagtaaaagaatgcggtttacagttcctggagcctcatgagacatctgagtttcggtatctgtcacctcatctgtacttgggtggtagttggattggaaatagtagtagtagtattgaagaaattatccatgtagaccaagaggaaagcagtagtgatagtgaagaaattatctatgcggaccaagaggaaagcagtagtggtattgaggaaattatccatgcagaaagagaaggaaccaacaggaggaaatctgttatgagatggattaaggttggagcaagaaaaatgggtcttagtttggagtgtctaaagccctggacaagataagataaaactgtcaatatatgatagttgatgaagaaggcttcgttccgtgaagaagacggcatactgtaactcataagccagcacattctaaatcagtagaattgtatgtagtgtatttgcggtcaaatttaatattgtagtagttgtgttattacgtatcgtcaatatgttccattttaattgaaaattaaatggcaagtgtaatgagtctagaaaatttaattaaaaaaaaaatgtgtctactaatatatatgtatataattgttttcgataaaaaagttaaattttatattttttaattagtgacagatgaatagcagagaaaattaaaaaagctacaaaattaaaaaaaaaaaaaaagaataaaaaacagaacataacaacaagcaaacatataaattaaaatcgaagaaaacaaaagattgacgagatggaataagaccaccataaagaaggacaaaaccaaaacgcaacatgaactcaaaattgccacgtcaatcatatatacagtagcatcctagttatcagtaattaacggttaactaattacactactaaaatcaatgttggtatttacataacatatattagttcatatttacattttgaatttgttatgagtttggattaatacattctaggattcaaagtttagactaaaaaaacccatataaaaatagtttggattaatacattctaggattcaaagttttagactaaaaaacccatctcatttcagtcataactgtttgttttttcgatattcggaatcaaccatgaaaattagtaactaacaagtgaatgttacatgtttaagtcactggcatcgatcttaaaaataggtttagagatgaaattaggtgtcattctctcattggttcttataaaacggtacaccgtgttcctaaacacaggaaatcatcccgattttattccaaagtttgggccaaaggctcaaagctgtggtcgtttcttcacaaagcaagtttttagggatttttgaagataagaagaagaagaaaaacaaaaaaatgcttcaactctgctccactttccgtcctcaacttcttcttccttgtcaattccgatttacaaatggcgttttgattccgtaagttctcaatttcacaccacttccgttataacttaattcgaattcgattcttccgttttcacgactttctctttgggtttcgatagcaatttcatgggttcgtgtccaaattcggtatttgtatccataattttatgaatttggtgtttcagaattcccaaattcggattggttagagtttcttttagcttatctgttttgttgtctttgtaacagccaaataaactatgttgcaagcaattcagttgtgaatatccggccaatgatacgatgccagagagcaagcggaggaagaggaggagctaatagaagcaaacctgctaagccgcaagttaaagaaggaagcaacaaaacagtaatcgaaggtttagtaaccgaatcgctacctaatggaatgtttcgagtcgatttggagaatggtgacaacattcttggttatatttgtggtaagattaggaagaatttcattcggatactccccggtgataaagtgaaagtcgaaatgagtgtttatgattctactaaaggtcgtatcattttcagaatgagtagtagagactaagaagtaagaaactgagatcctgtcaattctttttttaagtttaggcaagtttgattggaaacgaatcatgtaatcgtacagcggatttctataaggcttttctgggaagctcgttgtgttcttcttctcctataatcataactatattgagcatattggcatgtctgtatccatggtaagactatgcaccatgattaggtttatttatcggtaaaagaaagtctagtgttgttgtctttgcggtttcctaaccaggaaggcctcttgcgaaccgtttgtatgtaccgaaagctttgtttccgatctttttactttgatttttaagtcgcgatggctattgcgagatgaaattttggttgagttttctatcattgtctatgttttcacttctcatatatgttcttccacatgtcatattacttgtgaaggcagacttaattgtcttaatatgataaattagtttttaattcgagtgtaaacacatgccgaccttagctcagttggtagagcggaagactgtagtagttgctgaaatctttaggtcgctggttcgattccggcaggtcggatttttttttccctcaacacactattgattatttagttgttttttcgtcaaagatctatctttgttaattttctccacttctgggcttttactctttccgagttcagtcataacatgtgactagggcccaaaggtattaatattacggcccaaaaaactagaaatctagaataccaaaacaaaaagaaaaaagttttgtgttgtgtttagctcacactaatttagttgtcatacatgtaaaccaatagagataacaccattttatgggactggtaagttgtccattctttagttcttgtacttagtgttttctttatcaactaattggtgagtgtaatgtaggaaacaaagtattcattgttacttatatattcttaagaggcaacgaaatggcttcaagtaaataaaagtaatacgaatgatagttgaaccatcattaattatcgagtcctaaaatctaaaaattctttttaattcagggattttggcaatataagctggtaaaagaagacaaatgtcaacaaaccaattttgtgcgactcttaaacccatttattcacccaaaaaaatatacatatatatgaaatgtatgtataaataaaggtttccaaagtccttttaagtctttatattcacaaaatcaatactactcatttctacttaacactctaacaatgacaaatcaaatctacaaacaagtattttccttcttcttatccgttttacttctccaatctagtactgtctcatacgtcccaaagtcatttgacctaaagaaaccatgcaagcatttcgtcctctacctccataacatcgcctacgacggtgataacgcggcaaatgccacggcagcaacaatcgtgaaacctttgggactaggggatcatagttttggggagttaatcataattaacaaccctgtgacactggaccagaactatctctcgaaaccagtggctcgtgcccaaggcttctacttttacaacatgaagacaaattacaacgcttgggtcgcttggacattggtattcaattcgacaaagcacaaagggacatttaccataatggatgcaaatccttttggtttgcagccggccagagatctatcgatcgttggtgggactggtgacttcctcatgactcgtgggatcgctacattcaagaccaaactcactcaaggcagtaagtatttttgtgtggaaatgaatattaaactttatgaatgttactaatatgtgtcttgggattgatcttcgtgtgttggcagtttatttgctttctttgtttttagttgatgttgttccaaatttcaataaatggtattgaaatatgtttgtaacgagttaataattaataagacagtctttttttgtatagtttatataaacatgcgtttattagatatgtaataaactattgtcagattttatcagcaatactacaagagatttatttccacgaaaaaaaagttcaagtatcaataaaacatttaaactaaaccccttaaacttgaatccgtctaaagaaaataccctgaactgattaaatggaaagtataattttggttttaaacgacaaatcgtttggtctacatactctaggaagccgacactttccagtgttatcgattgaagaatacccaaatagtttttccgtccgtgttactaaaatgttatataaattcgtttaattatttctcatatatgtgaactagggttgcagaacccgagtgcttaagaaaaaaacgattgtctttcatcaaaaaaaaaagaagaaatttaaatggtatctaatatctataaccatcttcaaccaagagcgctgcataaacgttcacgaatgatttgcctaaacacatgtgtacaaaaatattagcaaaaaatgaacaaaactaaacagaccaagatcacaatcacgacaacaaagctagattatcgaaaacaaagatctttctaaaaaaaataaaaaataaaaaaatatgtgctttagttgtataacttatgagtaatttgggccaaaatattaatattgggttaaatcctttaaattactcagatgttcaaattgtgtccctatttatagctcagctctcttggttgggtggtgctaattagagattaagtttctcactgaaattctaaagtggattctttgtgatgaatctcatttttcaatctacaggctttcttcccttgaggtggattgaattctaaacaagaaatctagaaaacttagcatgaacagatttctgtcgttactaaaacatataaacttttgtgtagtcttttgctcacaccaaattaattgccttacatgtcaaacgataaagataatcattttatggggcgggtaagtgttcaattctttagctctagactttgttttatcttaaataaattattgttaagtgtaatgtatgaatcgaagtatcagttgttattgatatattcctaagaggaaattaaatggcttcgagttaataaaagagaagacaaatgctagttgagccatcggtaattatataaagtcttaaaactttgttttatttcaaattttttggaaatatagacaaatattcaacaaaccaattatctgcgttactcaaacccacttttatatcaaaataagaaaaaaaaattggattatgtattatgacttgtgatgttaactaggcctggacaaaatacctaaacccgaagaacccaacccaaaaatatatatccgaattcgaatccgaaattttaaaatattccaacggatcctaaacttcaaaactcaaaccgatccgaaccttaatccaatcaagtacctgaacatatcctaaatatgtatacataaaaatattttattagtaataatcatatttacaacaacctaagtgcctatttggtttttaagatattttgtgtattttggatactttacctacttttcgataaatttagatagaaaatactcaagtttttaagaaatttttgtgtattttcaagtaattagaatatatttagatacaaaattttgagttttggatatttcgggtaaacccaaatccgaacccgacccaaagtcttaaatatccgaacaggttttagatttttaaatccgaaaaacccgaagcctaaaaacctgatctgaatacctaaacgcccaagtctattgttaacttgtgcatagaattagaactcctaattaataaataagtatgtacaagagaaattgacacaattaaacctatttaagagaaaaacttaaatagagttagatgagttactcaaattaaactcatttattaaatagggtctcacacaaataaatgggtattcatttaagctcatttatattatgttgttgaaaacaatgttatatggatataaatgcatgtgtttaaatgggtaaaatatattttaaatggatttaaatggggaagataatttgggtattagagtaaataggatgggttagcctatattaacattcctaattgtgactataagtaaagattttcaaatccctcttcattatccacaacattactcattaatatatgtcttgggtttgatgtttgtgtgttgacattttattttccgttcttgtaattgatgttgttctaataagttcgaacaaatggtattgaaatatgtttgtaacgagtttataaaccagctaataatgaaagtggagagtatttgtctagcttgcatggaagcttcgtcagaagcatcaagcatgtttctcctgctacaagatccgaaaagaaatcagaaacatttggaaatcacttcgtagcatttccaaacaacttgcatgttgcaagtttaccgttcctttgtggaaataaataggaaacagtgtttttttttttgtcaggaaacggggttttaataatgaatatatatccaatcaacatatttaaaaaattttattctgcaaatttttatcatgcaaattttcattatgctgcttatatcataataccattatgcaatattaccaatcacagtcaatcgaaaaaaattagtcgcatcaattaatttgctttaaaaaattacatgatacttgcttaaaattatttatttaaaataaaattaagttgctgaaatttaaaagttatacacacaagggattcttgtccaaccactactgcatctagacagatataaacatatgaaatccaacttactccactcaggtttaaaataaaaaaataacatccatgtgaaatgtgcgatataagtatgattcattgtttaggttataaatacaaattaagcaaactatatagcttttttgttttattttcttgtcatattattattgtatgatattgaaatggtcagtaaatgccttgacttaaggttataataaattgtatgttattagatttttattttattttctttcacataaataaatttatttcaattatacatagaaaatgaatgtttcatttcttaatttatacatgtcaattaaagttttttgaatttaaagtctaatgataaattaaaaaaaaaatcaattaatagaatgagattatagatttgttgattccttaacgtaaaacctagaaaacttagtaatcaacagcttttgtcccctttttctcataaaaaacgtgttgtaaaacagtagagagaattactttatggagattaaaattaatcagattaaaaaaatattcatcaagcttaatatgtatatatactttctaattgtatgtatacctacaataatgaaactttacctgtggccttaaaaggaaaaaaaaaataaaatagaatcaatgaattgttaagtatagtgtagctagggagcaaatgattcgttgttacttaaaaatatctaaaaggaaatgatagaatttgagcaaatttacatataaggggtaaataaaagtaagaaatctgataattccaccactgaattctcatttgtatgattttttactttaatccaactttcagcccagctatttgcagtttagtatttttttgtcttcaatcttaatgataaattattagttatttttgataaaaaaaattagaaaaaattatgtctaaacatgcatattaaaaatataaaatagaatttaatcatctagtacatacaaatcgttttaaaaaatgttaatattatcctaattttataaagtttgtattatgggattttggaattaccccaaccaaggcacgtgaaaagatatggaaaccaaactaactccactccgtagtctctctgtaaagtattgactgtcataaacgaaaaaaacaatatagcatctgaaaaagtttaataatgggtgattttatatgggtgtcagctctttatacgtgggtcagctctttgattaattgagtttgcttaaagctggggttgttaggatttattacctaaacaaatccttatgttaccattattaatcgagaagcatcgttagtaactagcatttgtcttgaaagaatttttactaaaacctgccatatttgacatattgactaaaagttattctcttaggtattaaaatcatgtaagtcgtcgttttcatttagttgtaataaaatcatgcatgtgctgataattactatttgtttttaatttgggagttccgaaccttttgtatataatttctctcggtattagaaatttaatttaaaacattatgattataaaataaatttttcgtatgaaaaatagattaaaatccagaatgccaacctccttaatttatactactctttagttgtaactaaaaaaatagtatttcttccttttgtaatagcatgtgcttgataactacaaaagtttcaatacatagtttaagagtttagaactctacctgatatcaaatctttaagattctattttaattccctgattttggcagtaaagcttttaaaaacgacaaatatcaacaacccaaattaaaaggaggaataaaatcaaaatatttttaaaatatgagatttacaaaaaatggcgtttgtaacctttttaaaacaaacacaaactactttaatatgtgtatgaaatcttagaaatacttcataagtactgaataaaatccttacaaataccttataaacaccttgtaaaacgttttaaaacttatcaaaccttataaatatttgaatcgagttaacattaagaagtatcttataaactttataaacttttcagaattaatgagaggtaaatttgaaaataaacatctaaaagagacattttagaaaagagacacaccaaaatatgtatttctctaaaattctcattaaataacaattactgtacatgaatatatcaagatcatttttatacccccaaaaaaatatgtgccctcttcatatctaggaaaccaatttttattaccagaactgattctaatattttttcttatataaaaaatgttgatatcttatttaaaagtaaatacagtatgttttaggttttacaatcaaaacattctatgatattttcaaatagtcacatgaaaaaaaaaaatcgtggaaacattaatttttattttatctttttattagatagttatggatattattaccaatcaagaagcgttaacttcattttgcaaagagttttggattataaatctctattaatgtttcattctacatctgcttgagttcttcactcacccacagttagtaaaatcatttgttgcaaatctcactcgacagcgactattttttttttggacatctttagatcgacaagacccgatccataatcaacagcagctagttcatttgtttttttatttttattttttaaatatttttcttaaagcaagattttcttattgttattgtatgcagtaatttatttacatattataaatcatctagataagattaaatattaccaaaagatactagaacaaataacaaatgacgtaagaaatcaagatatattttgtttaaatttaatgtaaaagtgcatgatcattttatttttttaacgcgtataagtgcatgatcattattcttaataaaaacgtacataatcattattgatcacagatgaaaaatcaaaaaaaaaaaaaaatcaaattggtagttgaaccaagaataattgttgaatcatccaaagatcttattcttaatattctattatatataatgcaccaattttggcatattgacgtatatcaacaacccaattataggtgtctctcacccattttttaatatcaaaaaactctagcacgtgaattatgtctataaataaaggtttccaaagccctcttcctaattcactcataatctacttactcatttctactatacagtataatggcaaaccaaatctacataatctccttgatcttcttgtctgtgttactttatcaatccactaccgtcttatctttccgacaaccattcaacctagcgaaaccatgcaagcgtttcgtcttctacctccataatgttgcctacgacggtgataacacggataatgctacatcagcagcaattgttaaccctttaggtctaggagacttcagttttgggaagtttgtgatcatggacaaccctgtgacaatggaccagaacatgctctcggaacaggtggctcgtgttcaaggcttcttcttctatcacggtaagacgaaatacgacacttggctctcttggtcagtagtattcaattcaacacaacacaagggggcattgaacataatgggtgaaaacgcgtttatggagccgacaagagacctaccggtcgttggtgggactggtgatttcgtcatgactcgtgggatcgctacgttcatgactgatctcgttgaaggcagtaagtatttccgtgtcaaaatggatattaaactctatgaatgttactattagagttactaatacatgtcttgggtttgatgtttctatcttgatatttttgggtttgatgtttctttgttggcactttgttgcttttctctgttcgtagttgatgttgtaccaagtttccaataaatgttatattgaaaacgttcttttaaaaccttttttgtgtgttttgtatatatactaagttttaagcatgtacattttatgttgtagacaattatgtagaactatatcgtcaaggaaaaaagatcactggctacctgaactacacgagaatacatgactacacatacagactatacaaatggatattgagctacatgaactatatatatatcatggcgacatgtacagactatgtgacgtcatgtgttgtgcaccatagacatcaaatgtcgattaaccggtgcaaaaattgccggcgttgactcaacgttgactcatcagaacccatttcatttccggatctaagacttgttgacccgatcctatacccgttgacccgatccaacaactttgtaacattattgggctttttgaaataaaaagtcggtccactcatcttttatctctggaccactcatctctggatcccttctaatgccttccatgaacaactcaacaatgataggagtctttatattttcacaccttcctcttggatgacactgatgcttaggataataagtcttcaccatccaccttccaaccggattctccatagcacaatatattctccattcacagccttttccattacatctaacaccaagcctttccttttcccacctatcataaacaacatttcgtctggtcttcaacacatatttgaccacattcttcttaaaatcaatcccactacagaacacttgattcaaactcaacacaccatcaactaaaccccttctaaccaacctctctgcttgtacttcctcgtcgccagattcatcatcagttgtaggatattcttcgtcttcatatggaatttgttcctcataattccgaatgtcaaacacttgaatctcctccgccttaacattcacatcctcttcatcaacaatttcagcctcaagctctgagtctggggattcagataatcttgcgtctgagttttgatcatcactaacttcttcttcagcagctgcttctatcactgactttctttttttactagcgtttacagttgcagcttttttagtttcctttgaagcagctgctgtgtatgtggcttccttactagcaacttctctcacttctccattaatatcatattctattgccttctcaaagtatatatcaacctctcccatccagcgtgctttagcaaccaacttcttcttatttgcgtcaacattttcccacaaagccatcatgtctgatacctcctcatatggaagcttgaaccacatccgccaaacgttcttaatgtcttttgcaaccaaatgcatgagtacatcttcaaagattgtaaaagaatcgacctctaaaatctctactactccatcaccgtaggttaacacaccattctctgtcttgaattcgccagaatgatggcacttgacccgcactcttatcttctcactaccaaaataccaaaaaataaaattaagtgtcaataatgcaaaataaaagccgacacaaactcgacaagacaattcaatatcattttactcgatttcttcctcctctcgactcaaggaaatccagaaatcaaccctaaaagttcctgacaacatccaacttcccacatgctcagacccacaaccccacaacttgttgtcgacataaaccctagaaagttaccaaatgaaacgcaagcataaatttacctcattggaatgagaaacagttcgcgacttcgtctttttccttgattccaatcaacaattgcacacgattagtcttctcttctttcagtcgctatcaatctcacataaaccctaagttaaaagaggatttgattctccacaaatcgaaatcgagagaagtgaaatctcatattttttacttcgcgacgattcactttgtgtaaaatccattagggctctaacaaaatcgagtgggccgttttgtttatttttggcccattaataataagcccaataatgtttccataatgtttgctgggtcgggtcaacaagtctgagatccggaaatgaaatgggttccgatgagtcaacgttgagtcaacgccggtttttttgcactggttaatcgacatttgatgtctatggtgcacaacgcattcacatagtctgtacatgtagccatgatatatatatagttcatgtagtttagtatccatttgtatagtccgcatgtgtagtcatgtattcttgtgtagttcaggtagccagtgatcttttttcctatcgtcaatagtaatactaagactatcttcaacgtaattctctttttctttttactttaaaatagagttaagtttttctctaatatattattctatttcgtgtcctaaaataaagttattgtaaagaataaaataagataaaaataaaaaagagagtggaatatagagcaatcctatcatttattttattttagaatgaaatatagaatgaagttagctaaaatatttttctataatagattttagaaaaataatagaatcggagtggagatgccctaacgataagtttccgacaattcaactatcgaaataaagaaaaatgagaaaccagaagaatcataataactgtattgaagtaaatttattagcagaaaaaaaatcatactaaagaaatctaaaaggaacggaccgaaccaaacaaattgaaaagaaaataagctgaaaggtctcaccaaaaaccaaaaagtgataggaaacagaaaagcacattcaaatattaaccaaataaattacacaatatgaagaagaagtttgaataaattaaagaaaggaatgcgagctttgcattggtttctttttctttctttgtcgcgcgtattagttaataagagagccaatacaaaatgcaactatgcaagctctctttatttagttcactatcgctgaagatgaagaatgcaagctcttggatcataagtttgttactaattcattcttcttactatggccttgagtaaataaaagtaagacgaatggtagttgaacaaccattagtaattattgagtcctcaaatattatattataatttaattcaatggtttttttgcaatatattaacaagaaaaatgtgtgcgtctcaaactcattttatgccagaaaattaaagacaaatgaattatgtattgtatgtatatatatatatatatataaaggtttcgatcttcatatcaacgaaatcaacactactcatttctacggacctctctaaccatggcaaaaaagatcatcactttatggatcggagatctccttttaagtatacattacctgtaagcctataataatgaaacttttcacttttgcaggctttggaaagaaaaaagggattagatcaatgaattattaagtgtagtgtagcaaaaggaacaaattattcattatcacttaaatatatctaaaaggaaatgaaaggacgtgactcttgagaaaaaaaaaaaaaaatactcatccacatgacatataacaaatacaaaagacatatctcaaatttaaaaatatacaaccaactacacgaactaaatgtatcgcattcccatataaatcaactatataatgacatgtagtcaatatcatggccatcttggtacaccaatcgttgaaatctgacattcaccggcattaaccaacaaaaatattatttttttctttattttaatattataaacaaaaaaaaaattattttcttgaatcgtttatggtattctataatgaaagaacctttcaacataaatatattttctgtatatattttatacattgattagtaatagttatttagtgttttcaataataaagtaaactaaatgtgaaataaactaattaagttagcgaattgtttatttttacactgtcaataaaaaaattaacttcttatttgacaaatatttttgctaaaatcatattattaaaatttatatcttctatatatttagaagaaaaattgtgacttttgttgttgtttacgcggtattacgagaattttcttaatacttttaatacaagattatacataaaaaaacttttgactaaagagtgtaaaaatttctatatttttaaactatgtaatataaattttgattttaacaaaaaaaactttgtatttttttgtaccatgcaaactttagattaagtgtcatatactcaattttttgtgatgaaaataaaaaaaaaagttatttttatttcacttttagttgagttttgaaataaataactaattagaagaatcatacaaaatatatttatgttgaatataaaatgtgttttgtttttaattatacaacatcataaacgattcattcgaatattaaaaaaaaaaattgtggtcactgctggtcaacactgatcaatgatagatttaagtcattggtataccagaataagattgtcgtgatgtttaccacatatcgtcatgtaattggtaaatttgggcatacaatacattaagttcgtgtagttagctatacatatctatcatgtgtggccatgtaatctgttatactttgtgtagatgagtatatttttcccaaaaattatatgcaaggctgtaagcgatcttaacagctaagtaagaaatctgatcattccaccaaagatctctcatgtgtatgattattccatccaaatatttgcattaagattttcttgggttataaactaaaccaaatgtatttcagtttttggtatgctttgctttatattaggattcggctatgtagaactatttcatttttagaatgtttaacccatattgtcttcaatctaaacaatagacttctttacgcgggttcgatcctagtgtacattatggcagattcattttgtagtatgtaagtgatggcatacttatttaatattgtacagactaaactatatagagtatgatacctacacgcaggaaaatagctggagaaatcaagaaataggatgaaacaaaatcggcagaaaattccagcaactcttactcgatgaaccagcttgatctttgaataaaaaatgagttacttcgagaaacttacatatccgaaaaatctgatgtttagaagattaactcttataaaatttatgtctaaaaagttttgcatagtaaacatataaaatcgaatatgttatatataagtatctaattttaataacaataattttaataacatgtttagatgggtgagccacacaaaatcactttttatttttaattcaaaaataggaaagcatgtgaatcatgtctataaataaaggtttccaaagcctcatattcactcacaaaatcactactacttactcatttctacttaacattctaacgatggcaaaccaaatctacttattctccttgatctgcttgtctgttttactttgccaatcatatacggtctcatctttccaaaaatcactagacctagcgaaaccatgcaagcgtttcgtcctccacctccatgacattgcgtacgatggtgataacgcggctaatgcaacgtcagcagcaattgtgaatcctttaggactaggagacttcagttttgggaagtttgtgattatggacgaccctgtgacaatggaccagaactatctctcgaaacccgtggctcgtgttcaaggcttcttctgctaccacggtaaggcaacatacgacgcttggatcgcttggacagtggtattcaactcaacacaacacaaaggggcattcaccataatgggtgaaaatccgtttatggagccgactagagacctaccgatcgttggtgggactggtgacttcatcatgactcgagggatcgctacgttaacgaccgatcacattgacggcagtaagtatttccgcgtcaagcttgatattaagctctacgaatgttaccattagagttactaatacgttatacgtgcatgtcttgggtttgatgtttctgaattgatattttgggtttggttcttctttcttagcattttattgcttttatctgttcgtggttgatgttgttccaagttccaataaatggtgtattgaaaacgagctcctttgttctgtataccaagttttaaacctacatacacatctactaagcaactatcctatgtcgtagacaatatgtcgaacttttacccaaaaaataaatagaaaatgtcgaactatatatatcagctaatgattcttttataatttcccgacagttctaaacaaaaaaaaaaaaaaaattgagaaacaagaatcagaaccttactattgtagttgatatctggttataggatttataaattttatgacaattatattcacgttaaatgggtcacgaaaacccaaaaaagttcaagacaataaaatcaaaatataagatcaaagttttaatcaggtgacaaaaaaaaaatgatttcgatcttgagagcccattaaaaataatgatatatatatgtcacaaaagagtgaagaatatactgtttcctctttttcttcctttagagatcactatgtgttggacttcgtcttcttgattatatctccaaatgattaaacaaataaaaattaaaaagggagcaaacaaaagttacaaaagatgattataatttacaagtgagaagacaacaaacaaatatacaggaaactaaaacaaattaaacaattaaatagaattttctttccagagtgtaagatgaacgcacaacgaataaagttttagaaaactaatttcattaaagcagtgatatgtcacgaaacacatgtatctcatggtaattattataaactgatatacgaaagataatcttttgaattagagtttcataaaaatgattgtataattcttaataacaaaaaaaggtttcggaaacgatacattttgtaacctgatttatcctttaattatttctctttagatcaaggaagctgacaaaattccatatgatttttatgaaaactataataccatgataaattgataagagtaagaacacaaagcaacgaattgtaatatataaattccataagaataaaaagcaacgaattgtaatatataaattcccataagaataataatgtagcttatgaacatttaaagacaagctataaataaaaatgataatttgatttcatcaggttagtacataatcatttttttttgtagtggttaaataaaaatgacttgcgatgtttctatcacaaataaacaaataatcaattgataaacataagggaaacctaaagaacatagtccacgaaaataacaacgaaagaaaaaaccacacaaaaaaattcaaacgaaaccgaacataaactaaagacgtaatacagaaatagagcaaacaaaaatcgcacaaacgacgtatacaaaactcaaaataaaaaaaaaattaagaaatcagcttttacgtcacacaaaaatcgcgaggatgctgcttaaatgccggcgccgctaaaacacaagacgagggagaaaccccatttcaatgtttttagtagacttacaagaaaaccttgtcatttagtttcataaaatgggaaacatttttcaaaaataggatattggatggacattctccttgccaatgaacatgatatgattttgtggactaaaatataaaagaggaatcggctcatggtcttatgctttcttacagtaaaacatattttggtccatatacatatgtctagaggtgtcaaacgcattggtccgcaatagtattagtttctaatagactgcgatggccagtctgctaggaccatcagcaaaaagctttatatatattatttatttatttttattaaatttttgtaatccgtggactgatccgccaatttacatacaaaatacgtttaaattcgttatcaatttggattggtccgtaaaaccccctatttttagatatgtaatatgatatatttttaaatataatttaacattaaattaaaaaataactaactttttgtttttgtaaaataactaatagtaacattactttatgctttttacatgttctctataaatcatgtgtgacttggttggtggacatagagtaaggatttcgtggaaatattcaattttttgaatataaaattaattaaaaagaggaatggccaattgaaaatagacaaagcggcagcaaaattaaagagattggtcgtggacttggggtccctcgcacgcactctagacctttgattggtcttgcactctagatcagtaattgtaaatattcatttagtaaatcaaaagtgttttaatattatttgtgtattaccctccaatgattgtaaccggagcagtcgaatgtagagtgcgtggagcataattggtggcaatctattcaggggtactataagtcgagttgccaaaagaaggtgacaaagaaaacatgcttaagttctgatatggatttgagattcagaattcttgatcagaaaacttttaatatgatttattcatgaattcagaatttttaccgtatgtattagagtattagacaatgatatattaatatatcaacgaagatccgttattagagtcaaagatcaactaatgttattgtcttaatcaactaatgttataaccaagaagaccttaaaagttataaaaaaaagatcctttagttattttatgtaaatttctttattaacgaatggcattgaagtaaatatattttagtgtcagattctttctcttccaccatcaaaataattaagaaaaaaaacaatgctatatataaagtcaagaagtagaaagacaaactccctctctccccatttttagccatggaagcttcatcaatatctccctaaatatgaatcaaactcattagctctataaggttgaatccaaatttggggagcttgcgctgagcttccatggaagcttctaggtgcaccaaagggtttcaccatatagcttagaaatacaacaatgttcactccctgcactcatttaaccggccttgattatgatgatttcttaaaccgttccggttaaagcggtggggttgaaccggcaagtcatggaacggcggatgggctcgatcctcttcgaacctaccaaggtcttatatcggctccttctctactatctaggtttttgtttttctttttgtcattcatgttgttgtttatcaatttgattgtgtttgtttatggaatttaattcatgaatgtgatgattgccatatataaaaattaagaaacaaaaagcaaattaaatataatagatttttagctcattctttttggtattgttaaatttaacgaataaacttttatatttgtgcatgttttaattattgtcatgtgtgttggtgttggtgacttgtgtttgcgtaatttaattttgattcacgatttaatttacctaaacctaacaacaacatagccagaaaagaaagttaggtaaccaaaaaaagaagcgttgtttgtttggcgcaaagtcgcagtgacaacaagtggagacaaaaaaaagaagaagaag

SEQ ID NO: 568 - DNA, 98948 bp, Arabidopsis thaliana
gaattcgccagaatgatggcacttgacccgcactcttatcttctcactaccaaaataccaaaaaataaaattaagtgtcaataatgcaaaataaaagccgacacaaactcgacaagacaattcaatatcattttactcgatttcttcctcctctcgactcaaggaaatccagaaatcaaccctaaaagttcctgacaacatccaacttcccacatgctcagacccacaaccccacaacttgttgtcgacataaaccctagaaagttaccaaatgaaacgcaagcataaatttacctcattggaatgagaaacagttcgcgacttcgtctttttccttgattccaatcaacaattgcacacgattagtcttctcttctttcagtcgctatcaatctcacataaaccctaagttaaaagaggatttgattctccacaaatcgaaatcgagagaagtgaaatctcatattttttacttcgcgacgattcactttgtgtaaaatccattagggctctaacaaaatcgagtgggccgttttgtttatttttggcccattaataataagcccaataatgtttccataatgtttgctgggtcgggtcaacaagtctgagatccggaaatgaaatgggttccgatgagtcaacgttgagtcaacgccggtttttttgcactggttaatcgacatttgatgtctatggtgcacaacgcattcacatagtctgtacatgtagccatgatatatatatagttcatgtagtttagtatccatttgtatagtccgcatgtgtagtcatgtattcttgtgtagttcaggtagccagtgatcttttttcctatcgtcaatagtaatactaagactatcttcaacgtaattctctttttctttttactttaaaatagagttaagtttttctctaatatattattctatttcgtgtcctaaaataaagttattgtaaagaataaaataagataaaaataaaaaagagagtggaatatagagcaatcctatcatttattttattttagaatgaaatatagaatgaagttagctaaaatatttttctataatagattttagaaaaataatagaatcggagtggagatgccctaacgataagtttccgacaattcaactatcgaaataaagaaaaatgagaaaccagaagaatcataataactgtattgaagtaaatttattagcagaaaaaaaatcatactaaagaaatctaaaaggaacggaccgaaccaaacaaattgaaaagaaaataagctgaaaggtctcaccaaaaaccaaaaagtgataggaaacagaaaagcacattcaaatattaaccaaataaattacacaatatgaagaagaagtttgaataaattaaagaaaggaatgcgagctttgcattggtttctttttctttctttgtcgcgcgtattagttaataagagagccaatacaaaatgcaactatgcaagctctctttatttagttcactatcgctgaagatgaagaatgcaagctcttggatcataagtttgttactaattcattcttcttactatggccttgagtaaataaaagtaagacgaatggtagttgaacaaccattagtaattattgagtcctcaaatattatattataatttaattcaatggtttttttgcaatatattaacaagaaaaatgtgtgcgtctcaaactcattttatgccagaaaattaaagacaaatgaattatgtattgtatgtatatatatatatatatataaaggtttcgatcttcatatcaacgaaatcaacactactcatttctacggacctctctaaccatggcaaaaaagatcatcactttatggatcggagatctccttttaagtatacattacctgtaagcctataataatgaaacttttcacttttgcaggctttggaaagaaaaaagggattagatcaatgaattattaagtgtagtgtagcaaaaggaacaaattattcattatcacttaaatatatctaaaaggaaatgaaaggacgtgactcttgagaaaaaaaaaaaaaaatactcatccacatgacatataacaaatacaaaagacatatctcaaatttaaaaatatacaaccaactacacgaactaaatgtatcgcattcccatataaatcaactatataatgacatgtagtcaatatcatggccatcttggtacaccaatcgttgaaatctgacattcaccggcattaaccaacaaaaatattatttttttctttattttaatattataaacaaaaaaaaaattattttcttgaatcgtttatggtattctataatgaaagaacctttcaacataaatatattttctgtatatattttatacattgattagtaatagttatttagtgttttcaataataaagtaaactaaatgtgaaataaactaattaagttagcgaattgtttatttttacactgtcaataaaaaaattaacttcttatttgacaaatatttttgctaaaatcatattattaaaatttatatcttctatatatttagaagaaaaattgtgacttttgttgttgtttacgcggtattacgagaattttcttaatacttttaatacaagattatacataaaaaaacttttgactaaagagtgtaaaaatttctatatttttaaactatgtaatataaattttgattttaacaaaaaaaactttgtatttttttgtaccatgcaaactttagattaagtgtcatatactcaattttttgtgatgaaaataaaaaaaaaagttatttttatttcacttttagttgagttttgaaataaataactaattagaagaatcatacaaaatatatttatgttgaatataaaatgtgttttgtttttaattatacaacatcataaacgattcattcgaatattaaaaaaaaaaattgtggtcactgctggtcaacactgatcaatgatagatttaagtcattggtataccagaataagattgtcgtgatgtttaccacatatcgtcatgtaattggtaaatttgggcatacaatacattaagttcgtgtagttagctatacatatctatcatgtgtggccatgtaatctgttatactttgtgtagatgagtatatttttcccaaaaattatatgcaaggctgtaagcgatcttaacagctaagtaagaaatctgatcattccaccaaagatctctcatgtgtatgattattccatccaaatatttgcattaagattttcttgggttataaactaaaccaaatgtatttcagtttttggtatgctttgctttatattaggattcggctatgtagaactatttcatttttagaatgtttaacccatattgtcttcaatctaaacaatagacttctttacgcgggttcgatcctagtgtacattatggcagattcattttgtagtatgtaagtgatggcatacttatttaatattgtacagactaaactatatagagtatgatacctacacgcaggaaaatagctggagaaatcaagaaataggatgaaacaaaatcggcagaaaattccagcaactcttactcgatgaaccagcttgatctttgaataaaaaatgagttacttcgagaaacttacatatccgaaaaatctgatgtttagaagattaactcttataaaatttatgtctaaaaagttttgcatagtaaacatataaaatcgaatatgttatatataagtatctaattttaataacaataattttaataacatgtttagatgggtgagccacacaaaatcactttttatttttaattcaaaaataggaaagcatgtgaatcatgtctataaataaaggtttccaaagcctcatattcactcacaaaatcactactacttactcatttctacttaacattctaacgatggcaaaccaaatctacttattctccttgatctgcttgtctgttttactttgccaatcatatacggtctcatctttccaaaaatcactagacctagcgaaaccatgcaagcgtttcgtcctccacctccatgacattgcgtacgatggtgataacgcggctaatgcaacgtcagcagcaattgtgaatcctttaggactaggagacttcagttttgggaagtttgtgattatggacgaccctgtgacaatggaccagaactatctctcgaaacccgtggctcgtgttcaaggcttcttctgctaccacggtaaggcaacatacgacgcttggatcgcttggacagtggtattcaactcaacacaacacaaaggggcattcaccataatgggtgaaaatccgtttatggagccgactagagacctaccgatcgttggtgggactggtgacttcatcatgactcgagggatcgctacgttaacgaccgatcacattgacggcagtaagtatttccgcgtcaagcttgatattaagctctacgaatgttaccattagagttactaatacgttatacgtgcatgtcttgggtttgatgtttctgaattgatattttgggtttggttcttctttcttagcattttattgcttttatctgttcgtggttgatgttgttccaagttccaataaatggtgtattgaaaacgagctcctttgttctgtataccaagttttaaacctacatacacatctactaagcaactatcctatgtcgtagacaatatgtcgaacttttacccaaaaaataaatagaaaatgtcgaactatatatatcagctaatgattcttttataatttcccgacagttctaaacaaaaaaaaaaaaaaaattgagaaacaagaatcagaaccttactattgtagttgatatctggttataggatttataaattttatgacaattatattcacgttaaatgggtcacgaaaacccaaaaaagttcaagacaataaaatcaaaatataagatcaaagttttaatcaggtgacaaaaaaaaaatgatttcgatcttgagagcccattaaaaataatgatatatatatgtcacaaaagagtgaagaatatactgtttcctctttttcttcctttagagatcactatgtgttggacttcgtcttcttgattatatctccaaatgattaaacaaataaaaattaaaaagggagcaaacaaaagttacaaaagatgattataatttacaagtgagaagacaacaaacaaatatacaggaaactaaaacaaattaaacaattaaatagaattttctttccagagtgtaagatgaacgcacaacgaataaagttttagaaaactaatttcattaaagcagtgatatgtcacgaaacacatgtatctcatggtaattattataaactgatatacgaaagataatcttttgaattagagtttcataaaaatgattgtataattcttaataacaaaaaaaggtttcggaaacgatacattttgtaacctgatttatcctttaattatttctctttagatcaaggaagctgacaaaattccatatgatttttatgaaaactataataccatgataaattgataagagtaagaacacaaagcaacgaattgtaatatataaattccataagaataaaaagcaacgaattgtaatatataaattcccataagaataataatgtagcttatgaacatttaaagacaagctataaataaaaatgataatttgatttcatcaggttagtacataatcatttttttttgtagtggttaaataaaaatgacttgcgatgtttctatcacaaataaacaaataatcaattgataaacataagggaaacctaaagaacatagtccacgaaaataacaacgaaagaaaaaaccacacaaaaaaattcaaacgaaaccgaacataaactaaagacgtaatacagaaatagagcaaacaaaaatcgcacaaacgacgtatacaaaactcaaaataaaaaaaaaattaagaaatcagcttttacgtcacacaaaaatcgcgaggatgctgcttaaatgccggcgccgctaaaacacaagacgagggagaaaccccatttcaatgtttttagtagacttacaagaaaaccttgtcatttagtttcataaaatgggaaacatttttcaaaaataggatattggatggacattctccttgccaatgaacatgatatgattttgtggactaaaatataaaagaggaatcggctcatggtcttatgctttcttacagtaaaacatattttggtccatatacatatgtctagaggtgtcaaacgcattggtccgcaatagtattagtttctaatagactgcgatggccagtctgctaggaccatcagcaaaaagctttatatatattatttatttatttttattaaatttttgtaatccgtggactgatccgccaatttacatacaaaatacgtttaaattcgttatcaatttggattggtccgtaaaaccccctatttttagatatgtaatatgatatatttttaaatataatttaacattaaattaaaaaataactaactttttgtttttgtaaaataactaatagtaacattactttatgctttttacatgttctctataaatcatgtgtgacttggttggtggacatagagtaaggatttcgtggaaatattcaattttttgaatataaaattaattaaaaagaggaatggccaattgaaaatagacaaagcggcagcaaaattaaagagattggtcgtggacttggggtccctcgcacgcactctagacctttgattggtcttgcactctagatcagtaattgtaaatattcatttagtaaatcaaaagtgttttaatattatttgtgtattaccctccaatgattgtaaccggagcagtcgaatgtagagtgcgtggagcataattggtggcaatctattcaggggtactataagtcgagttgccaaaagaaggtgacaaagaaaacatgcttaagttctgatatggatttgagattcagaattcttgatcagaaaacttttaatatgatttattcatgaattcagaatttttaccgtatgtattagagtattagacaatgatatattaatatatcaacgaagatccgttattagagtcaaagatcaactaatgttattgtcttaatcaactaatgttataaccaagaagaccttaaaagttataaaaaaaagatcctttagttattttatgtaaatttctttattaacgaatggcattgaagtaaatatattttagtgtcagattctttctcttccaccatcaaaataattaagaaaaaaaacaatgctatatataaagtcaagaagtagaaagacaaactccctctctccccatttttagccatggaagcttcatcaatatctccctaaatatgaatcaaactcattagctctataaggttgaatccaaatttggggagcttgcgctgagcttccatggaagcttctaggtgcaccaaagggtttcaccatatagcttagaaatacaacaatgttcactccctgcactcatttaaccggccttgattatgatgatttcttaaaccgttccggttaaagcggtggggttgaaccggcaagtcatggaacggcggatgggctcgatcctcttcgaacctaccaaggtcttatatcggctccttctctactatctaggtttttgtttttctttttgtcattcatgttgttgtttatcaatttgattgtgtttgtttatggaatttaattcatgaatgtgatgattgccatatataaaaattaagaaacaaaaagcaaattaaatataatagatttttagctcattctttttggtattgttaaatttaacgaataaacttttatatttgtgcatgttttaattattgtcatgtgtgttggtgttggtgacttgtgtttgcgtaatttaattttgattcacgatttaatttacctaaacctaacaacaacatagccagaaaagaaagttaggtaaccaaaaaaagaagcgttgtttgtttggcgcaaagtcgcagtgacaacaagtggagacaaaaaaaagaagaagaagcttttacttctccttaatcttatgttcttcttttctttcatcttttgtcgttcttactcaagtctaataatatcggagacaccgcaaataacagtgatagccctccaagctttttttatgaagtagggaaagttgatgggtcatcaatcctaatttaatgagtctttggcttttaattttgtgttgcagtccatgcgactgtgaaaagaataaggccaagctaaagttacttattttctattcacaaatgtttaagcatcagtaaatctcattatctcagtaatagttatacaaatcaaaatgatttttatagactaaattatataattcatagatggttcatttatgcaataataatagttatctgattccgggaacatatgatatggccattcttttgtttaagaaaaaaaaaaagaaaaaccattaatgagaacatgtgttgaaccaaaacaattatgacaagtttgtgaaatgatcctgttgtcacaattattttgttgaaagataagaagtggaacccattatattattatgtttcaggattcaccatttgatacaaattgatcttaagcgttttaacttttaactagttacttatttagctgattgttacctgagaaacataagaccgtttaagaaaaaacaaaaacatggttaaatgagaaaacatagtataaaggaaagaaaaaagaaggtaattataatttaaaattaacaaaaatataaattgtcagcagtggggtttgaacccacgccctcgtaagaggaccagaacttaagtctggcgccttagaccactcggccatactgacatttgttaatattcatacttattacatatatataaccagtaaatatacaaacatgttatatttttattttttggacaaataaagtaacaaacacttaaaaaatgagctcagagaaaataaaaatctaaattgtcagaagtggggtttgaacccacgccctcttacgaggaccagaacttgagtctggcgccttagaccactcggccatcctgacttgtttgatatcaagacatactacaaatatataatcgagaaaaaacgatatttgagtaacgtaccatattagaaacacagaaatcaatcagtacattaaaaatatagatcaagagaacgactacaatcattgtgctaatgccacaaaccactccaaaaacaaagcaaagttgtcaagtaaaatttgggttgagatctaacacataaccttttagattaccaattcacaacacaacacaacccacgtgtataaaaaccagagcattgtgcacattgcactccaaagaaaacccacacaaaacaaaaaccccaaaaaaaactaatccttcttcttgtctttcaacggtcctcttgggattttgctgaatacctttgcgtccaacacagcgtattgcttcttcaactcagccattgctttctcaccgtatgagtctactttgtcttcgtacttgtcgtagaaaagaggaacagtgaagagcagaaccagagctggaccaaatcaataaccgttcatcagcaatgtcagaataagagagaaggcagaagcaaaatacttttagcaacagtaagtgttacctatgtatgccaatgtcaagaaactatagcagccgcccaagatcgatagaacccacaatccggcaatagcctaattcaatcaaacagtacaataagtgtcaaacttaagtgagacatcgagagaggagtaacgagtaagtccaggacagtttaaacatacagagaggaacttcttgatatccctccccgacgcaatctcacgaagagaagagatcccacggttgatttcgattctaagacccgaagcaagctgaagaagaggttcttcagggatatgaacttcaggaatctttggtggagacctgaaagagaatgaaaatttggtaacgaagatgagtcaaataagcttgacaaccttgacctgtttcatatgattgaccacaaaacttacttgtgaatgaacatagtggcattagaccatagaaacaacacagcaagagcaacgatcataacgtgacataacagagtaagaagatgatactccatcaattcaaatagcacccatgccactgtagcaccgccaaatacacctcctgacattttcttgtccttccacataaatatatctgccgctgcaattaaaaagatcaccaaattagggtttatcaatcacgaaataagaaccatatcatcaataactacaagaatctcacaagatcattatacacatttccaaaaaaaaaaaaatcaattccatcacaaattctctcaaactagtcagaaatcaaaatcgaaatcgaattcaaatcaatgtaaacctctatgtagattcaaacgatcttcttcacggatcccttaaactagtgagaaaatcaaacagatcaagccaacgcaaacgaattcgttttaaaaaactgagaacaaatatcgaaacgggatcagagtaaacatacgttttccgccgccgagaaccttatgaacaggtctctctcttccgaacaaacgataaaccttcgatttcaaagactttggagacgatgacgaagacttcttctcgttttcgtcatctgatgatgatgaagacgacgaatcacctttgtgatggatcttctccgataacttctccatcaacgattccctctctacaacctccactgctggatccaaattaggtgaagattcttcatgcttatgttcatccgccattgtttccgattcaagagaagaagaagaacgatcaaagttattgttctagcgttttcgttacacctctgagaagaaagatctcgaagtcgaatgaaaaaaccaacaataaaaggaggaaaattagaataaatctgagccgttgaatattttgtttctgatctgatccgttggttggttcggatccaaacctgctgcttccttaactagagcgatgcttaggaaaagataaatgtcgtggggacatataaaaagtgttttcacaggaccgagatgttaacgctgttaaggataacggctttttaagtcacgtgtaattaacggctctgttattaaaatggctattaaacttttctggttcaggtgtcacgcggctggacaaagaaacggtcgaaccggtggtcatgtgacacgtggttgaatcgtagccgcttgcttatgtgactcatgtactttcggtctgcattcaaaagacaatgataatttaattatcttgacactaaattaaaataatattttgctgctggccaaaaaactagaaaataaaaatattagagaagtaggaaccgtctcttggttaaaagaagtgtttaaaaaagaatgctctagaaagtgaaaaagcatttaacttgacagcgttagctcgagtcgtaatatgggcccaatgagctaaaacaatgatgaagcccagttactttctcatgtccaagaaagcaaatatgattcaaaaccgaaaccatgattctaaaccggtcaagaaccaaggaacagtgaaatttttgaggcttttgagtcagttcgggtttaaaaagacccttttccccagctttcttcattcattttcaagttgataaccaaatgggccaaactagttatcggcccataataataagagagctcaaagacaggcccaataataagtgctcaaatttgaaaacaattgaacagacagaaccaatcatcccaatgatcccatcatccccctttgtttgaatttctcatttttactcctttacactctttttttcttcacaagctttaactgtgactttttacattttttaacagtcctactctagatgaaatggttaaaagttggtatttgtgatacacaaaacgaaaagaaaacacaacaagtaggatacgagaacgaacatgaacattgattcattcattcaaaaaaccataatcgtgggggattaatccttttaccagttagaactgttctttgtggaaatcgaacctggtaattcccgtctggttaaattcatggcagagtgttgaaagttccttccccaaacttggaactccacaatagaacactcctgtaacaaacaaaaaaacattcttcagacaaggcaaatatacaccgcgatatcgaatatcatttcagtgaactgatgtttctgtgtgttaccaattcttgcgttcctatgtttggtgctaatctttgataaaactttcttccattttggcctcccaaaatgtgtccttacctaaaataaccaaaagttgttatacaagatcagaaaagagtgttgtttgtgataaagtaatcaactaatcattaaagatcattaccttggttcctgaaaaaatgtcgacgccatttttggcatggtttaacgtttggatcatagtgagaagattggatcgagtatctccttcttcgtagacgctagtcaagtagttgtgcatctcaataacacccttgtagttgttcacaagacaaatacgtcagtgagtaacttgaaatcatacaatcttttgaatttaaaatgaataagtgtattgtttttacctttctatctgaatcagcaatctcgttcatgatttctttgaaccaatcgaacgagccttgttctcgtgttacccagtaaaagtaagcattcttggtattcagcgtcttccgttgagtttgcggaatccgactcgcagcttctgagtttaagcaactgaaactgtgatccgacgagatgttgctgttactacaactacctgagatgcattcctgagaatataacataactccaaaaaagtttagttgagattctgttactcatcaacaaggtttttaagcttgttatactcacagcttgttcctgttgcttaataatgttattgagtagatctctcaaaatgctaacgaaaggtgttgcgccgattccaaggccaaccagtaataccacatcatacttccaatggtcttgcgctggagcgccataaggtccatctatcaacagctctggaaaactatattacaagagagagtatcaaaattcacattctgagaataatatattgaattttaaagaattttatgcaccttctttggtttggtacatctgctctgagaagtccgctttttccagcttcaggggcatgacataccactgagaatgccttcttaatcccttctgtccaatcaccgcgctgacgaatgtgaatgctgagataatcatctccaggggaagaagtaatagaaaatggatgcctggagatggagtttaggaccgagaatctttaagttagtctttgtggtgtcaaagaacagagtttgtatatgttctaggattgcaaggaaagctattaggcttgttttggttccctataaaacactcaccactcaaattttgatactgatggacactgaacaaatacatattgtccactcttgtaatcaaatgatgtaggcttagacatgcgtagcacaacaacgtttccgggataaattacaacctgaaaccaaatcatttgagttggtatagagataatagtagatgattgacaatgtgtcttttcatgtaattcagttcaaaatgtaactgtaagtgagattttaccttacagatttcgactgtgtaaagcctggaacggaaaaatctaaagatcctctcaccaacatagagtaaaactggtacagcaagatacatccatacctgtaggatgcagtatatgttattgttaccacagccaattatgtaagcatgcaaaaagtaaaatggtaaagagtttatggaatgtaccgttttgcggtaccatttatgctcgagatagagggaaacaccgtggatgactaaaaggacgtaaacagttagaagtaagtgatgtgaataccagaaggcattatatccggttagtttgtcaaatggcttcggcaacttagttaagttccgcctgcatcttctactggctaatgtgaatgcaattaacataaaagcaaccattataattccagtgattcccacaggagtattcaccaaaccaaagtatgtgggtctggtcacaccaaagtacttaaccaagtatcttttgtaatctgtatcagtagatgctagaatccttgggaagtcacaggcgaggtggctggttgcatgaagaagcattgcactaatgattgctacagagatcgtctgcgtttaagcaaaaaccggaaagtcggattcagctgaagcatagtatctttcttatgaaaggcaagacaaaaaatggtttatgattaaccttgtgaaaattaatgcagtcatcgaaaggcactgagtgggacaaagcggtggatctgagataggtgatggtatttctacagaccggcaaaagaataagagccatgttgaatttcagtgtctcagctgcgccttttgccatgacaaggcagtaacccattacatggaatgcgtctttgtgtttgtactgatagcatttccacataaataaccaggccatgatcacaaaccacaatgtcaaaacccaaatcctcttccaattatcttgcaaagagtaaagcaagtttctgctcattctccatcttctatcctttaggttctggcttaaggctcggctcgtctggctgaacggtaggctgtaactatgagatatgtccttctctagtagcagtatctctaggtcctttaactgcatcatttcaaatccataacaaagacaacatattagaatgttgacagagttctactacctatcttgtctcagtctcaagcaagtgggcagtctctcaaacaatatttgttactaatcacagtaagattatctaaattcttaatcatacacttaaacgccactacaccactagagattatttttgataacaatatttgttcaagctctatatgtggacctctacatttttgtcttcgtcaaccttttattatattaattccatacaaaaacaaacttgcatagcacataactttaagctcattggttttgactcagtcaaatgtccctatcagagaacttgaaaggtaagagagctcaacgtcatcacttactaaggtcaaacttaacaaagaacccttctactctctctctcatagaaagagactgatctacacactatcaaaagttttacggtatttaaacatgttttctgttaggacatttaacaagattgggagttaaaagtgatggaaccacctctatgtactgagaatagagtccatctggtgcaagttcttccatgatcagtgcggcatattcctctgctcgttctcgcaacctcgatagattatttgccgatgcacttagtataataatctataggttgtcaaaatcatagaaaaccatacaaaaagtagttaataccattgagaagcttctatttgaaagattcaacgttaaacttagtggttatatagaaaaacaatatcttttcattggtagttagaatcacttccttaaattaagaaagctgctacaaggtcaatcaaattatatgcagaaaaaacaattgcaacttaaatctcctagtcttgcattggttacaaggtagacataagaaagaataatatcaagaccaacataaccaaccaaaaaaaaaaaacatgtagctctataaaattaagcaagagggataatacaatactaaaacatataaagataatgggactcatgtaagattcattagtcaatgctgattagaatactaaacaaagaagatcgaacaaaagtaaaaaaaaaaaaaaaaacctcttttacttcattctctgtgattctaccatctccatttttaaccctgcaagtttcaaaaagtgaaaaaacaaatcaagaactttagctacatgttgatcaatatgtttaacaagatttgatgataattgataacaatacatgttgaagaagatttgaagacgagaatcgaagctttcgtctgtaatttggtaccaaaactcgtataattcttgaagattgatcttatcaaccattattcttcttctcctacacaatgcgtcgaacaactcgtctgcaaactctttggaattttcattctccaaacctttcaaacacagaacaacaaaatttacaatctctatcgattctccagagtcaaactcaatttcaaaactgtgaaaatcattatgtcgaacctatgcaatgagcaaaatcacttttgaaaagataaccatctttagaaagatgagcgaaattgttttgaacatcgttccaatcaacgattccattttctttgctgcttatgaatttcaaaccatgaatcgctctctctgtacccgatccatcccgattaggtctagttggtcgctgagataaagctcgagggagattaaccgaatcggtaatttcgcctctgtgtggaaccaccggttccggtgcagaccgagacgaataaccgtaaccacgccgtgagatcttctggatctgctgctttgagttcgtccccgccgtcagtctctccgacgacgcgctccatcctaagctaagcgaccttgatcctgaaccggaatccgagcaagaggtgatctctagatcggtacctgaaatatcggtgccggttccggtaacggagtcgatgtttattattacgccgcttgggaattcgattgttacttctaggagctcttcgccggaggaggaggaggaggagggtgagggtgagtatgttgctggtaaggatggaaagctttgggtgaattctccggcggaagctaaatcggagccccaacgatcgttgtgagtcccgccggaaaatgacattgacattttgaatttgttgggaggagaggagagaagccaaggagggagaagactgaataaatacagtttttgaattttgtgtttattataaaatttgtcttttgtactaatcaaaggaacgaccagaggaaattaccaaagcagaacgaaaatataaaaataagtttggtttctaaaaatacggttttaaattatactatatttacgagttacgacacaaaaaattatactatatttttgtgcatgttttaggtacactttaattatacttaactcgctgttgttgtgaaattatatatttttttaaaaaaatttaatttgtttagcatattaaaaatatatatgatttaatgttttgaatttttatatattaattaatgtataattattatatttgatttttattctttaaaatataaaaacaataaaatacaattcatttggttaaaatctatatcacaactaaataatttgaatttgaattgtatttgttttgtttagtgtttaaaactagaggtatcaaaatgtctcaactcaactcaatccatgaaccctaatgagttgaaaattttgactcaaatgagttaatgggtcaaatgagttgatgagttaattggtttgatgagtaaaatgagttgggttgtaatggttaatggtttcaatggtttacccaattaacacatcaagttttgtaaaattgaattaaactaattaaaatctctaaaccaatgtcaatttaagtttaaccaacacatctaaaccaatttaataaatcattatttttccaaatttcttaaatatataagcgataaaattgagaaaaagtaaactcgtaaatttttttttaaaaaacataaacccgtgatttttccgccaaaaataaaaacatgtgattaaaactaataaccgaaacaaagtttggaagataaaccgacaataagtcggagatagatacgaacgaagacgaaaagctaaaacataaaacgaaatctaaagcccgatgttaatcggattagcaaaagatagtaacaagattcaaagttttttatctctaaaagatttgagagaattaagagagaaaaaaacttatatgacacaaatacatttaagattgtattttggtgagcaatttaaaccaaaataacataattctcataatacattcaacacatacattaaggagggtcaacattatcgaatcgagatccacccaaattaattttataacctaaccggtatagtaatttgccttgtatataaagtttttggaaccaacccatttaactaaattcacaaaatataataatttaaatttaagtatattaaaactataatatgaattaaaattagttagttatctttatttttattataagtttttgtccaaaaccgatcctaacctaaattgaaccaaatgaaaccacataactggatgcagactaatcaacaacaatcgcacgtgcgtctgagaacttgtcacgtgaccactccgctcctttctttggcttcgagttttggatgatgaaaaataattattaccgcgtttattataaaagtttctagggtttacgaaatttgggtctctctccctctctctacttaacgctctctgtatcttcttctccgtcaacgatacgaacccagagacgtcggcggttaaaacaatcgtcggatctctctggattcgttagacgagaagtttccggtatctaatttctgtgcgttagagagaaattagggttgttgctacgatggatgagactttacttgacgatataatacgacggcttttggcgacgaataatggaaggacggtgaagcaagcacagattactgagacggagatacgtcagctatgtttagcttcaaaagaggtttttctcagtcagcctaatctcctcgagctcgaggctcctatcaagatttgcggtaatgttactgaatagagaaatgtttctctctgtttactttatcttgaattcgtttttgtgttgtgggtttttgatcaattttacattttttgatgtaagggtttagctttgtaagtttgttgtttgggaagcttaaagcttagatttttgggatataagtgtacattgaaatggttgaagatgtgtatgttgtgaattagttaaatgctctgccactttaagttagtgtttcttgcggaattgtgagtagtgacctcttacttttgtgtctttgaggaaccatggtcccttagctctgttgcataagcagttgttggtatctcgcttgacttattacttcatttgatagctaatagttttgtttagttgctgaatttggtgtatgatagatattaaacccttctgttgctatcataactgtatgatttgtaattttgttgatggttttaagtttatatgttgatgagcaggagatgttcatggtcagtttccagacctcttgcggttgtttgagtatggtggttatccaccagctgcgaactacttgtttcttggggattatgttgatcgtggtaagcagagcatagagacgatatgccttcttcttgcctataaggtcaaatacaagttcaacttctttcttctcagaggcaatcacgaatgtgcttcaatcaaccgtgtatatggattctacgatgaatgcaaaagaagatataatgttcgcttatggaaaacattcaccgagtgcttcaactgtctgcctgtttctgctctcattgatgataagatcctctgcatgcatggtggactatcgcctgatattaagagcttagatgacatcaggagaattcctcgtcctattgacgttcctgatcagggcattctttgtgatttgttgtgggctgatcctgacagagagattcaaggctggggggagaatgacagaggtgtctcttatacatttggggctgacaaagtagctgagttccttcaaactcatgaccttgatcttatatgccgagctcatcaggtaaagctaaaatttattccttgagttctctcttttgatttctctggattggtttgttcttctctgtgactgttctctgaattcagagggttaagaaatcataactcagttgttaatgcaaggatctgtagttttttcaccaagccaagttttacttaactatactgttcctgcaggttgtagaagatggatacgagttctttgcaaagagacaactagtgacaatattctctgcacccaattactgtggcgagtttgacaatgctggtgcattgatgagtgttgatgatagcttaacatgttcattccaaatccttaaggcatctgagaagaaaggaagatttggattcaacaacaatgttcctagaccaggaaccccacctcataaggtgtgaaaatactatccccctgtatatagatgcaatgtaggtagatgttagatatcaggtttgatatgttaacattcttgcagggtggaaaaggtcgttaactcgtcgtcgatgggttcaagaaacgagtgaaaccgacgggttcgaattttgtaaggcaaacagtttgttttgttagattgttatctgttttcttatggttgaggcaacattatgttttgtttagattttttttgtaaaaattgtggaagatgttcacagcattttcaactgaagaaagttgggttttatacaactaaccttttagaaacatattctaaaaacataaacgtaaaatttataaaaataataaaatgaaacttgaaaaacaattatcttatttgacgtaatatatactataagctaaataataagagaagaggtaacctagatttgaggatagatactgcttttatcttcttcacgcgtcgccgacgcgtatgcttgttcccgtaggcaccaaggcaatctatataaacatattgagtgaagtttcacaatctttcaccatcaattccacaattctgcttcttctttgtgtgttatctctctgtcggagaaaaaaaaaaccctagtttcttgcttggcgaatcaaggcaaaatcacgatgaagcaagcttcttcttcttcgtcatgtaatccaacaagtttaacaaacagacttaaaacaatctttaagaaagcagaagagctttcgattctctgtgctattgacgtttgcgtcatctattacggaccagacggtgatctgagaacatggcctaaggatagagagacagtgaaaaatatggctttgaggtataaagaggacagaaaacgcaagaagtgcctcaatcttcatgagttcctcgagaaagagaaggtgaaggacaaagacaagtataaggggaagacgaattatgtgaagaaccctaattggtatccaaactttgatcattactctcctcaacaactctctcaattgattcagtccttagaacgaacactttctactctccaaaaaaggcttcgtattgttgagtcgcagaaaaaacagaacacaaacttggtgcatcagagtttaacaccatcgtatctgaaccagacacaacacttggatcctagcaagttctcgctgtatatgtacaaccatggagatgctactctctcacaactcccactgtctgcttcacaatccaatcaactcatcaattaccagatgcagcatggttttggtcagaacatgtgtttggacaacatcaccaacaacaacaactttcaacatcctggcgtgtcaaacacacaagactactcaccgttactttcggcgaataactacgggttgaataatcacttgatgcagcaacaggatcagcttcatggttttgatcagaacttgtgtatgatgagtgaaatcatcaataacaacaacggtttacaacatcctaatctctcaaacactgttccacatgaattcccttatggtaacactagcttctctcaagatatgttttcgagctatgatgggagcagtttgctacagacatcttctctgccacctctccacaacattcctaacagctattgtttttctgacaactcaagacttctctgctaacaaatctgtccaaaaggatttgttttttgaagcttcattaagagtcagtcaatacttataagtaggaagctgatcagagagagattgaagctgtttttgcttctgaattcttcctgctactgtctttttttattttacagtgttgttataactgtaaaacagatccatttgtggagattttgtttttacttttaagttggtatttcagttagtattatatatatatatatatatatatatatgaacttccataaaagtctttcacaaaaacttgcatgaaacaaattataatctaaaatcacttatggtgacaagactgtttcaattggttgatacaacctgcaaagtgaaatcctttactcttgcatcttataacaaacttgtaacttagtatccttcttgtctgaatcagctaatatatacatgaagatggaaagtagctctgatttcgtgaagacaaattctctgcacccaattactgtggcgagtttgacaatgctggtgcattgatgagtgttgatgatagcttaacatgttcatttcaaatccttaaggcatttgagaagaaagaaagatttggattcaacaacagtgttcctagaccaggaaccccaaaggtgaaaatactgtctcactatatagatgcacatcggttttaactaaagaaagttgggcttatacaactaaccttttagaccacaatgcaattatgtcaagaaatatttagataagcctctcgataaaagaacaaagttccaaaacaacagacttgcgagttttagttttctaatacaaaatcaaagtatcagaacgttctttgagaccacaacgcaagaatggagagagacaaattcgagcagaaaccaaaaaagaaaaacaccttaaaagttcaaaagatttgtcagacttttttttaacaaaaaccagaaaaggggattttaagaagatcaatactcccacttcttgagctccatgccatctggtggagtgctctccactttcttagtcccaacttctttccagtttgtcgacagtaccgtcccattcgactctgcctgtcaaacccaaaaaccacccgagaggaaaatctcattagtcgaagaacaaagcagagttattaaaccaaaattttaaagaccaaagatagatttgctcacaaatgatttgttcattgcccgcctcatgtcttcatctgcactcgagtatatgtcgctgaaaaatttgttcatagctgcatctccatcaagcttctcatccttctcctgcgaaattcaaaagtgataagcagaaagaacaaagtacagcaaagcctctagtgttaaggatgagaagttagcgtttgtggaacctgtttcttcacttcagcttccaacttgtcccagtcttttgctggcttagaagatgggtacactggtctctgcgacagcgctgcatatgcacataaaatcaaatgagaagagagagagaccactttgggttcagtttgtttaaggttttacgattgtggttcagaataaaatagtaaacgtaagctggtatcttctgagacaaacctgatgagacattgggtttgggcaaaacactttgccctttaccatattcaagggaggcccaggtgattatctctgctttcgcaagacggatctcaactttggtcgacaatacttcaaatctgcacttctctggtattatctgaaaaacacccatgaagaaggatttagtaaaagtgtgtgtgaaaacaccgtaattacatatgtcaaataaaatataccttcccgaacaatctcggctggagatgataagcttcctctccagcaacatcaatgacaacactcagctgcaccaaaataaagccaagatagacatctcaaatcaatacagtgttaaattacaaagagagatagtttctgaagttcagataaaagtcatgaattctctgattgaaggatactcacaatctgctcaccaaactcgacagttacgttctccttaggtacttttttggcgaaaattgtcaccaccgcttcttctggtttctggtagaactcgtgcctgttgagcaataaagttatgagtataaaatgattctggaaattaaagaagaatttacatgttagataaccagactacctgaacatcggtttggcaggtgctgcaggaattggaacaggaggagcatcagcttccgttgctagtggtgttgtagagcttgaaggcaaactcggtggcatcggctgaaccaaatctttctcttcttctgaacagagatacaaagactatatcaaaattatagccctaggcgcagacaaatacccaaaatcgtttagtaactaatttcttaagctatggagttgatgtaacatacctgcaatacgaagatcgcattcatctatcatcttcttaaactttggttcattcggtgcaacagaagctcccttttccagggctgctttagcagtactatattcttctagcttcatacaagcagtgctgcgaacacagtagcaaagaatcagaagatagaattataattccaatcaaatttgaacataacatcaaatcattcactacagagagatggtgaaaatatcatacccctttctgagataggcttttgccaacgttggctccaactcaatggctttgttcgcatctacaacagcttctgctcatagaaaccacaaaaagataaaatatcaaatcaaatcatcaaacaacaacaattcaatcaaagtacagtaactacaattacaattactcaaataagttttcttatccgaatcaacaacctcacaaaagaaaccctaaaactaaaactaaaccaaaccaataacaaaaatcaaaactttgttccactatcaacagatcgaattaaagtaacgacaaaagaacaagacccagaaccccaaaagcgtcaacgaagcaatacatctaataaagtttcaatctttaacgatgatattaacggtaaggaagagagttatatttataccagtgaagttatcgattttgatgttggcctgagcacgatcggcgaagaaggcggcgcaattgggatccaagtcaatggctttggagtataagtcaacagcaacatcgaagtcatcatctagaaaagcttctttagctttctctgctaattccttggccattgattcttatcagaggatttgagagaacacaaacaagtcagagagagagagagattatagagaaagagaccgattctattcctctaggctttttttttttttgctgtgtttgggattttttttttcttttaagaacgttttaatacctctactaggtcatataaccaaaaacaaaaaggtaattagattttattttattttctaatttccttttgattttattttttaacataagattgattcttgataagtccagattttttaacaaataaattagttgacaaaagaataatactgaaaaaaggaaagaaaactaatggtaaagatatttatagagaactacaataatttaaaataatcattttctactcattttgtttatatcgtaatcgtttactcatagtttagcaaatacaatgtgatttgtgaatttagactatgatatattttaacaagttataatttatatattgactagattaggacccgtcgtccaatacacagatttaagtattttaagttgataataatctagtaaagttaaaatatcaattatcaaacttttgccaaatatttaccttaaaaaatttatttgcaacctcgaaaaatccatctaaatatgtacagatatatttgtcgtgattactgttacgacgtcgtttaccagttcgttcttccttcttctctcaccccgactcgttcactgactcggtcgatgcttgtaccgcttgattcaagccgatgaagtgccgatctgtggcctgcctatggtctcgtgctcctccgtctcatcgggtcaccgccacagcctctctaaccaatccaccgactctctataccggtggatccgatgggtcaatcatctggtggagcatctcttcttcttccgaatccaattctgtaactcgtctccctcatcatgagattaaaccgattgctatgttgtgtggccatacttcaccaatagtggatcttgctatttgtgatcctacaatactttcaagtaatggagttgttgcatcagataatggtaatgcggatccatttgttaactgttgtgcattgatcagtgcttgtactgatggtgtcttgtgtgtatggagtagaagtagtggtcagtgtaggaaacgaagaaaattacctccttgggttggaagtccatcgattttgtctactttgccatcagagcctagatatgtatgtgttggttgttcttatatcgatgttgatggggctgagactttagcagatactgattttcagaagtcgagatgcacggtggttgttgttgatacttacactcttactattgttcatacagttttccatgggaatttatctattggttgtttgaattttatgggcgtggttcagttagatgagcaggaatcattgcttatggctgattcgtttggtaggttgcagttggtctcagtgtcagagaaatctgaaccgagcaaaggctctctagtgtctagaaactggttgagtgaaggggaaattgctgtatcagtaataactcgaggggatcttgttgcgtttttctcgaagagtaggtgtgtcttttggttgttgaatcgcgaggaggcaataggagagatatcttttgttgatgattcgcattcttcaaattttctgttcaaagaagcaatgatactttactctagtacatcaactattgaaggtgataaagatgatagtatttctgaaacttttgtgctgtgggatggtagtggttctgctgtgctgtttactatgtcatatatagatggtgaatttacatataaaaacttcggtgagattgttactgcccctgatgataagcgttccgtgaaatcaacgttttgttttgttcagttgaggcagaatcttcttcgcgttgagtctagttgttgtgatgttgaacaaccttctcagtggaggccccatataacgatctggtcattgtgcctaggaaatggtaaagaaaaagaacttcagcgcaaagtgcttggagaaagctcctattttgctgattggatttcaagctcctgtttagatcccaagggctcggttagtgcagaaactggtacttcgcagtcaggaagtcagtgcagtgccaaaaatgatctacaaagctttgttagtgacaatggacagtgtgtgtcatcgtccatggttatttctgagaatatgtatgtcccatatgctgttgtctatggtttctttagtggtgagatagagattgcaaagtttgattttcttcatggaattgattctcctgcttcaagcccgagatcagatactgatccactcgtctataaacagcgtctattgggacatacaggatctgttctatgcttagcagcgcatcgaatgtttggggatgcaaatggatgtaattcttctcatgttttgatctccggaagtatggactgtaccatccgcatttgggatctcgaaagcggaaatgttatcatgatcatgcatcatcatgttgctccagtgcgccagatcattctatccccagctccaacaaaacgcccatggagcaagtgctttctatctgttggggatgattcatgtgttgctctttcttctcttgagactttgcgggtcgaaaggatgtttcctgggcacccaaactatcctacaaaagttgtatgggatggtacaagaggctacattgcatgtctttttcgctccctttcgagaaaatcagatccaattgatgtcttatacatttgggatgtgaaaacaggtgctcgagaacgtgtactccatggggcagcttcacattcaatgtttgatcatttctgtgcaggcattagtgagaaatctcattctggtactgtcttaaatggaaatacatcagtttcctctttgcttttcccagtagacgaagagaggaaaccattttatttgaagaactacgagcgagcagcctctttgtcaacatctaagccaagttcttcgcaggaaaagactagagaagagagttctactgcttcgtcttttctccaaagcatcagatacccttccatcaaatgcacttgcccattccctggaatatctactctgattttcgatctttcgtctttagcagtttattgtcaaacacatgaagactctgatatgcataagatgctagaagagaagagtgataaggcaactgctcagcagaagacttcaaaagacaagtctcctgtccagaagactctagataaccatgcagaagttgttcacatggacaaggctattggagaatatctaattcgatttagtttatcctttctgcatttgtggggtatagattttgaactcgatcaaatgctagtagcacatctaaagctaaaaagaccagagagttttattgtaacctccggtttgcagggagacaaaggatcattgacattagcattccctggtttgaatgcaacacttgaggtaatatttgacgacctatattgatgtcacaaccgcacacattatcaacaatatccttctttatctgagatttcataaaacattccagctctggaaatcatcttcggagtttactgcgttgaggtcagtgattatggtgtcacttgctcagtgcatgataagtctgtcacattccactgccacatatagcaggtacatcatgtgatccttataaccatctctcttcttgcaaaggtatatcttcatgttttattcccacatgtaaaaactatttcgttttttttttcttacagcaacttggcagcgttctacacgcgaaatctggcagagaaatatccagatctgaagccaccattacttcaggtgaggtcgttggctatgtgcaccagatgttatgtgggttgagatgactttgtattttatctaaatagtcacaaaaccgctaaaagtttctccttattttattgtagcttttggtaactttctggcaagataatagcgaacaagtccgtatggcagctcggtcattattccaccacactgcttctttggcaatacctcttccattatgcagtgatcacgcatctgaacatgcagaactggtgagatccctgtctggaatcagtctaaacgaacctaaagttcttagcacaggggaagaatatcccacaaacagtctggactctgagcatatccatcaagctcaacggctttctcaggctgaggagtcagaaatactctcatggcttgaatcttttgaaatgcaagactggatttcttgtgttgggggaacaagtcaggacgcaatggctgctcacatcattgttgcggctgccttatcaatctggtacccaagtctagtaaaacctggtctagccatgctagtcgtccacaaattgttgaacctggttatggccatgagtgagaaatacagctcgactgctgcggagcttctctcagaaggaatggagactacatggaaaacatggattggacctgacattcctcggatagtttcagacatatttttccaaatagagtgtgtcagttcctcagtcggagcatatcaagttgtaccatcgtctataaaagagactctggtcgaagttcttcttccaagtttagccatggcggatgtccttggatttcttagcataatagagagccaaatatggtctacagcttctgattctcctgttcatgtagtatctctcagaactctcatcagaataatccgggctgctcctagaaatctggtactgcatcttgagaaggtttgtagcatctacttttacattcagcgaggctagttgagatttaaataagcagaacatttttaccgatatatgtctgtatactcttatagagatttgagaaacatttgggaaaatcttgcaggcagttaactttgttcttcaaacgatggacccaagcaacaccgtcatgcgtaaaacttgcctgcaaacctcaatggctacgctaagagaagttgtgcgcgtatttccaatggtaatcttaaacgactcgtcaacaaggttagcaatcggcgatgttatcacagagatcaacaatgcatgtattcacatatacgacatgcgaaggtacaaaaatttacatgctttgtatttctgtcccacctttatctcagtttcttagttgtttgtgtgattcccgttgcagtatgacaaaaataagggttttggatgcgagtggacctccgggtctcccaaattttctcagaggagcttcagaatctgccgtgacaacagctatatcagctctcagcttttcacctgatggagaggtaaaatttatgcataaacacattgtagcttctgcaccaaacattaaagtcgacaagttcccgatgaatactcttgatgagatcctaagaataaaatctctttgtatggtagggattggttgcgttttcagaaaacggtttgatgatcagatggtggtcactaggatcggtttggtgggagaaactaagccaaagtctcacacctattcaatgcaccaaactaatatttatccatccatgggatggattttcatcaagctcttcacgaacaagtgtgatctcaagtatctctaacgacgaacaagaacttcctcttcaggtacttaattgtttatcatcatctcattgttttggcttttaaaaccgatacttattctactcggtgtgatcggaacaggaaaccgcaaagaacataagtcacgtagagcggctaaagcaacttgttcaacatcttgatctctcttatcgcctcgaatgggccagtgaacgcaaagtagttttaacaagacacaatgtcgagttgggcacttgcctgttgtaacagtcaaggtaagaatccagacgatattcttaatccttgttcctcattctgctcgagttttgttttagaggactcatatcgagtccatgttctaggttctcaggaggctatcgaacgttcctttttttgtgtgttacttgagaacgaaattgactgttcttgttttgtatatgaataaaatacttaaatatacacgagaaaattattgaatgaatatccataattacagacaaaaaacaacaaaaatgacatatgttttatattaagtgctctaatctgtcaatatttgcatgagtagcaacgtggcatttttggttgatatgtgtacataagaaaaaaggttgaatgatatgaatgactttactatacaaagaagtttattttagatgctgaatgtttcctaatttgacggcatttaaaaatgttgtttatctaagttttgtgattttattttatcatcaaaacatattataaatgtgatataaaagttatgtcaaatttggcgtgtttggtcgacaaggcgaatcaggcaatttttctgcatattcttcttttaaaagaagtttaactttctactaaaaaaacattcaatctttctacatagtcaattagatgttttataacgttggtcagatgaaaatgaaaataaaaacaaagttaggaaactaatataatttgatttccatatgaatataatcataaatcttccaaaatatatgttttctcataagaaaaatgaagaaaaaatcaactgattactaatcatagatttcccaaaatctatgttttctcataagaaaaatcaaccgagtactaatcataaatcttccaaaatatttttttctcataagaaaaatgaagaataatcaactgattactaatcataaatctcccaaaataaaaaattttgtgtatcaatatacaaaatgtttaagaagattttgaaaattaattatattgttaataattttaaaaattctttatattattaagtattattatcataaatagaaaagggttaaaagtcaaatgatcattttgtaaataaaaagtcgtgtcttcttttcctgtaatcagagttatgattattaagagtcttcggatctctcagggataatgtgaatggtgcctcgactctaagcgctgccaaactgatttatggtttttatccttctcgtaggaatccctagagtgataggatgctcgatgctcatagtgtttgtcacgggattggactttcttagcataagcttggtttctggagttaacattcccatgagaactttcataggagaagctctctgatcttttcctatcccttggcgagtagtttcctctcttcctttcattatgtttgtcatccaatgctttattatacctatcagccgaaacatcggatgagagagttctatctttccttttgaattcaatcaatataccgataaatacgtgccaacaagatcttagatgatgcgtctgattggttgtcctagttagcacaaaaaaaaactgaaaaagaattatgcacaattcatctctttttacatcaatcaatataaaagtttaatatattacgcaccaatcagtataaaagttcaatatattacgttcaaaaacacaaaaacagtgtaaattgttacactttacatttattttagtggctgaaacatttcgtgccagagttactctctttttctctttttttccattttttccatgttttaccaatcacactgccgttaaattatgtgtcaaagtaaaatataataagttaaaaataattatatatatattaaatcttaaaaaaaaacttaaaccacaatgaaatgacacattaacaacccaaaaaaaatggttcctgattcctactcttttaatacactttgatttttatacgtgttttcgtagttcattcgaactattctaggtagattaaccaaccatatgtaaatgatctagtcatcctcaaaattagtcaaacgctagtgcaatataaatttatgatcttagaccatctccatcaatctaatactgtgtgggtttctcaacaatattattttaatcaatctataataattaaattatttatttaaattttaaattataaaaaaagaattagaccaataatataaagacacgtgaaaagcagttctataagtttctcaacccaagaacggtcttctgactctttcttctacttttttattattttatatttttttttatctccagatactctatcaaatattactgatgaatatgctctaagggttaaagacccccatttctttaaaaaaaatagaccgcctttacagaagccaaattctatttttcagtacatgaagccaatattgaaattattgttttgacttttagactaggaattacgatgcttgtgccaactacgatattacaaatataattttctggtcaaatggaaaaaaaaattattaaaaaaggagagagagatgatttatcgataaaagtaaaactagagacaaaggtcgttgttattcatcgaccacccacatgtaactaactaaaatgagttcatttgttactatgtcaactaaaaccgttgacactatccaaaaataattttgaatctccttgttatgacttttgcttcaaattaagcaaatcagtggaaacttaacataatgattttcgttgagagaacatcagtctgataaaaaaaaagttctttatattcagttaatctgaaaaaactgaagaaacaaaaattacagcaacaaataaaaatacagaaaaaagatatatacatgaacaaagataagtattagtagtacactaatgttttgtttgagaagaggaaaaaaacagaaattagtctataagacaaaagtcgttgagattgtgttggtcaaagtgaaggcttcaaaatcatggtttaacagtttttgatattgactagaaaaatctttgtggaatgttactggtctttaaggctgccaaaaaattcatttatttcattcacgacattaagtggtccaatgtctgccactatcaacattactgattctagctttcatcaataagaaaattttgaaccatataatattcgcattaattcaaaagcattctaaaaatgtagagacagatggaattctacaattctatttaatacaaaagcttacacttttcatttttagcttattctaagctgtcaagtgcttagcattaattgtattgttattatgaatacgtgttttgagtgcattattgaaaagaaggtggagatctcaaccgtctccaatgagtgatttaggagtatatcttaaataatttgcatttttttggtttttgaaattttaacataaagaatcctataattaggttttaaaatcaaaagcaagaacatttctaatattaatgcctattaaaaggggcacatttcaactgttctgacctctaattcttgtttatgccgacatgatgtttgcagtagccagtaatatcagtatttttcaataaactctagctctttaatacaagatcggtaatctaggaaaagccccaattcttacatggatatttttttttgtcatcgtgacgatataaagatgacctaattggcctgacaaaatttacacaaattttattcttacataaactaaaaaaggtgaccaaataatgacaattttatgtgtaatattagaaaattgttattaaaattttcttagcaaatattgacttcgtttttctcaacgatattatatatatgaaattttatgtataagttattacaatcgcatgttctataatttgaacggataacgaaaagcaaaatttagatttcatttataaaataaaaaagaatgaaaattcgaaattcttgtttagcaaaacttttgaataaatgatgtggacaaagcggattaaaccactctatttctagagcggataacaaattacgcttatcaaatttatttctacgtaaaaatgatctgtagttaagctgtcgcagataattttttttttttttaatccgcattattatggattataacttatcaatggtaaccaaaaagcaactcaagccgcaaacggattcgtgcgtcccaagtgtcacaactattcgaactatatatgaagttatgtgtctgttagaactggatttttactattattattactattattattatcatcgattaaaggatgttttttgatgaaaaaaatatattgttctatttagccaacaaaatgaaaagaattccggtccattattttccatcaaatacaaattttaacagattctgatcttgtaaaattcaaattgatgtctcatttcttttccaaatactgaaattggacttaatgttatgtactctcaggtcccccacaatgatcactctttttcacaaatttggttcaaatccactccaaaagatacaaaaacaattcaaactttagggaagtcaaacaaaactataacaaacaataaggaccattttgaaatttctactttcttcagttctttcatggaactttcgttgtaatctatctacaacgctccacatactcggtgtgtacacctgaaaccaaacctctatatatagaacacaatctcacttcccaacacatcaaaccataacttccaaatctcaacagaaccaaaaacaaaagaaacctatattaaagaagaaacaaaaaatggtggcttttgcaacagagaagaagcaagatctgaatctattgtctaaaatcgcctccggtgacggtcacggcgagaattcctcttatttcgatggttggaaagcttatgaagaaaacccatttcacccaattgatagacctgacggagttattcaaatgggtctcgctgaaaatcaggtatcattcaaaaataaaaatccaaccttttttttttttggtctaacctaaaaaacctaacttttttttttcttttctgaattgtgtagctttgtggagatttgatgcgtaaatgggttttaaaacatccagaagcttcgatttgtacatcagaaggtgtgaatcaattcagtgacattgccatttttcaagattatcatggcttgcctgaattcagacaagtaagttatattgttgcctgaactcagacaatttcatcacttttggtttgatttggtttcaaagattctaactttattagtttaattccttcaggctgtagcgaaatttatggagaagactagaaataacaaagttaagtttgatcctgaccggattgttatgagcggcggcgcaaccggagcacacgagacggttgctttctgtttagctaatcccggcgatggtttcttagttccaaccccttattatccagggtatgttcaaagatcatcactgaatcacattagaatttggtttagtttggtttgggttctaaatttgatttggtttggtttcaggtttgatagagatttgagatggagaaccggagtgaatcttgtaccggttacttgtcatagctctaatgggttcaagattacggtggaagccttggaagctgcttacgaaaacgcgagaaaatcgaatattccggttaagggtttacttgtaaccaatccttcaaacccgcttggtacgacgttagaccgggaatgtttgaagtctcttgttaacttcactaatgacaaagggattcatcttattgctgatgagatttatgctgctactacttttggtcaatccgagttcataagtgttgcggaagtaatcgaggagatcgaagattgtaaccgcgatttgatacatattgtgtatagtctatctaaagatatgggtctgcctggtttaagagttggtatagtatactcttacaatgacagggtggttcagatcgcaaggaaaatgtcgagtttcggtcttgtttcgtcacaaacgcagcatttgatcgctaaaatgttatccgatgaagagtttgtagacgagtttatccgcgagagcaaattgcggttagctgcaaggcacgctgagataaccaccggtttagatggtttagggattggttggttaaaggccaaagccggtttgttcttgtggatggatttaagaaatcttttgaagacagcaacgtttgattcggaaaccgaactatggcgtgtgattgttcaccaagtgaagctcaacgtgtctccaggcggttcgttccattgccatgaaccgggatggtttagagtatgttttgcgaatatggaccataagacgatggagacagctctagagaggattagagtgttcactagccaacttgaggaggagactaaaccgatggctgcaacaactatgatggctaaaaagaagaagaagtgttggcagagtaacctcaggttaagctttagtgacacgaggcggttcgatgatggcttcttctcgcctcattcgcctgtgccgccttctccgctagtccgtgcacagacttaagaccgtctcatattttgactagaccagtcgtcgttaattaaaaagtcaattctttagattgattttgacacatttatctgattaaatcaaatgtatagctacgactatcaagttgattttttctttcttttaattttgtatctcatgtaattttaaccgggtgaataatatgaatttgaaatcagaatttgtttaaccgtgttattgaaccagttaaggtttctactcttagtaaccaattagacatgtttttctcaattatcgtgaaaagaaaactcaaaacgaataagttccaaagaggtgttctaatgcctgagtttagtcaaaatcaaataaaactgttggttcaacctgcataaccgggaatatgacatgatataaccggtaaattgaccggtccattgtggaagctccgcgtttttttaaacagcttatggattgttaataaaagagaatttggcccatatagtccaggaagagaacaactattggcccatttttatactcaacttcgaccacagacaaagaaatgtagctaacgctcatgagaattggtcaaacaattctttgtggcccatttgtgtttttttttgttgcatatatcataaagagttgtggttattgtctttttttttttttacgtcaaaacaatatcatttatgaattagagtttattgtctaaaaagccatttttgttcatacatttttcaaatttgccattttctcaatattctttcaaatttgccattttaaaaaacttaacaattgaaaaaaaaaatcataaaacacatacttcataaaaaaaactacaccctgaactggaacctaataaacccaaacatcatgtgtaaatttgtgtttttgtatataaaaaatggcaattttgaaagtttttgacaaaatagcaaagtctataaaaaaaaacatcaaaagaaaagtctttaattcttaattgatttctcgcttatatccggacagggaatggttataagagagattaaaagttccctctaaaaaaactcacaagaaataaattttccttctgaattcaattttcatttctaaatatgttttcctcatatttcaactagttaatctgaaaattgtaccagtcaagccatcataagaagagaccaataaattaagagtttgtctttatattaaatcacgctttgtatatttttatttaggattttggttgggtgaatattttgatctttagagataggttgttaatatttagacgttttgacaactaattttcctaacgatgaaactagtctaagttttaatgatttttaatcatgtgttctgtttattcttttaatgcttcacgtggatagattgttttcaatttctctgttagtagcatagtagccaaatgggcttagtgtttttattaattagccatgcgagattagctgtcaaatattctgttacaatgcactaattttcaaatgaagagaaacgagccttcttttctaaagggtcactgcaaaaatgcattaacattctgatgaaaaaaataaaatatagtatcagatggactttgaatccattaaaaaaccaaccctcttaaactaacactaggccaccatcatgtttagaattctatattttgaaactagtacatttacgtgttctttggtttcttgattgggatactatagtcatttttaggtttcgttcaaagttgacaatcgtataaaaataaaaactgaataagaagttttcgtgaaaagtaaattaatttagagagaaagttgtgtctgcgtaaagtatccatacaataatggattaatttttggacatatataaatttgataactaacgctaatgtcgttatgttcttgaatctatttaaaatatataagagttttatgtagaatagtgttagaaaatctcagtaacgtggacggtcttggccatggactatggcggctacaaatggtgggagtaggtctatgggtaaaatataataataccataaccagattgagttaaggattatttcttaagattttaaaattatacctaagaattatatttaattgcatgtgtatataaagtgcaaatgcacacatgactctacctagctagctagctattcgcatatagtaaaaagaaaagaaaaaaaaaagtctatgaattgataaataggtttttgaaatttgaattagattgtatatatgacccaacaaaaaataatgtcatagaacatatgatgaaattcgctatacaaattcttttacccaatgtatagtctagttttgcaccatacgtaaatgtttattctttaacgtaaaacctatatatagatttttgcgtttaatttgaactttataagccatacaatacgtaactacattcgtcaagataagttgtttttgttaattatcaacaaccatgatttaaaatatgaaaaaatggttaagggttagatatattttattttttgttaaagcaagggttagatatataatatattacaaataacttcaacttcattaaaatacgtcacatgccatgatttgtctaccaaatacaattaattaacttaccgactttctcgacgaaattaaaaaaagttatcgaaattatcatctgtgtacacctttaattccacgaggaatctatataggctaataaatagccatcgtacgtaacatcaaacaaaatatatactagctttggaatttttgttagtgtcctggcatggcaagttggataaatacaaaggaaggtaataaaaattaaaatagtaataaaattatcacaaattttaggtatatagatctccatatctataacaaacatataacatgttaagaataaataaaaaagacgaaaccaccaagcaaattctaaagatcgttggtttgaatgacattaggaaggaaatgatagtaaatatactagttctcgagaaaatgtagggatttaagcttagaacatcttaattattcaaaaataataattgaaaaccacataaaattataaatcttgcctaatagttaatattgagactaaaactcaaactttttttttttctttggttttacttttttgattatatagataaatggatgatgattaatagttttgttggagatgattttttgctaccaaatatagacacgagttatggctctattgtctctcacataaaaacgttaaacgttctactaaaggtggcatgaatcctatgcattttggaactgacaatattcagttgtctctaatagataactaagacttataactttaatctccatttttttttccgcgaatcaggatcggttatgactaaagcgttaaacagtctctattaggacaaacctaattttgttttccaataagttatttcagttaaccttgctactatcgcatatcgttacccttcggtaaggtggttgggaagctttgatcattcccatgcggacaaaccagctacagttactctagagcactcaacattccatcgaaaaacaattcaaccattaagaagatctccaaaaatctggctcgaacaaacttttaaaatatttgttaattaattttattattcaatctcagttagtatagttttatgtaaattcaactagtcttcatacttattttctatcttcattaagtaataatacattagttttggtagaattagtttttgtctggctttataagctagttagtttaatttacaatattattttcaaaatcatttgattttatctattcatgtacttatttgtttaaattttattaacatttggagagaatctatttttttcttaattatatagattatttaccataactatatcaatatttccttaagaacacattagattataataataacaataagaaaagacaaggcaatagtatctttatgatgataattgaaatcaaacaggaataaatagaacatgtttggtagcttctttcttcttgttctcttctccacattgctttatcctctcacgaccaacactatatataatccctaacttgggaactcttatcctccaaacatagttaaaccaaattttctaagtgtctcataaaaaatgacgagattcggattagctcttttgatgattcttgtgattcaagggcttgtgaccttttcagaagcacaattgaagatgggattctacgaccaaacgtgcccttacgcagagaagatcgtacaagatgttgtcaaccaacatataaacaatgcaccctctttggctgctggcctaattaggatgcattttcatgactgcttcgttcgggtattcttcttttgttttaaataacttcatcgtatacttattatcatacgtattacctaccaatacaaacaattttaaaacattgtgtgttaaaatcatcaaaacaattcagagggtttaacagaaaaaataaaaatatttaagatgttttattttagccatgcattaatcatatagtatatgcgaaaacgtatatttttctatatagatagctaaattagtatgtatatatcggtgttgacagggttgtgatggttccatcttgatcaacgcgacatcgagcaaccaacaagtggagaagcttgctcctccgaatctaactgtgagaggtttcgattttatcgataaagtaaagtctgctctagaatcaaagtgccctggaatcgtctcttgcgctgatatcatcacacttgctactagagactctattgttgctattgtgagtatgctaataccccttgttttgtctaaactctaaacctgatacaaaaactaaccggtttcgaataattttggcttagggtggaccgacatggaacgttccaacggggcgcagagacggacgtatctctaactttgccgaggctatgaacaatattcctcctcctttcggaaacttcacgactctgataaccctctttggaaaccaaggacttgatgttaaagacctcgtcttgttatccggtaatatttaactccaaattgtcttctgtttttttgaatcggtttaagtaacttgggatataaatttggttgaggtaagtagtagaaaaaaaacgctgcggtttgatttacgtgttttatttcaatacgtcgtcgtttttacttatagtatttaaagagtaattttgaacgttttaggtgcccacacgattggagtgtctcattgctcctccttctcaaaccgtctcttcaatttcaccggcgttggagaccaagatccatcgctcgacagcgaatatgccgacaatctcaaatcacggagatgtttatctatcgctgacaataccacaaaagtcgaaatggatcccggtagtcgaaacaccttcgatcttagctactaccgtcttgtcctaaaacgtcgtggactttttgagtctgacgctgcattgactatgaatcctgcggcattggctcaggtcaaacgcttcgccggaggatcggagcaagagttctttgctgagttctccaactccatggagaaaatgggaaggattggggtcaaaacagggtcggatggggagattcgaagaacatgtgcatttgttaactaaaagtgtttcttactttttctttcgcaacttttttgttttgttttaaatatcttttatattggtttttatgttccttttgtcaacttttttgggtgtttggaagaatttcgagatatgtattattgtatgtggtgaatatgtgattttcaaataaatttcacgtctgtgaaaatcgttgaactaaattttccaccaatttatttttcaataaaaatttgctttagctttagatttttttttctaaaaaagcaatagataaatttgtataatataacagaaatgtttctaatataaattaaattgggccatgacccaaaagaataagctcaaggttggaacaaaaactatattacgctgaataaagcccattggtcttctagtgttatctgcgatttccgatttgggtgattcatcagtgtttgcttctctactcaaatttaccattgataacacacaagcgtaacttagtgttagactgtgtgtgagaacctttacataagaagactttatattaattaccgatttacctaagaacttttatatctctcgaatattacataaacgtcagtgtgaaaaaaataaagactcaaatttatttgtcttcaaatgttttttccattgatgaaagataattagaacatcaaaatggcttggtgtagtctactcacaatattgacaatagttttgcaatcttagtattaaacatggtgtatacattatctttctttaattacgaattgtaatttatatacatcaaagattatcacataaataaaacaataaaaacctgtaatttgttctcttttcttaatcaaaagagttaactcaaagattaaattttcacaacaacaaagttaaaagattacaatcagtgatcaatcacttcaagtatctcacttctgcttttcaccaacctatgaaacacttctctaactcttctctgtaacccctcaagcccatcttccattttccggcaaatctcctccatctccgccacttccgccaccacatcctcctccccattaaacctaaacccttcactgaactccatcagcttcaacccgatcctctccatcctctgcatctcctccatcagtccaccaccacgcgtctccttccgtttcatctcttctccgaccctctccgagatactcacggccgcgttagcccatacctgattcttcggcagcggtacatgaaccattaagccgttacttgtctgacaaggaaccgctacaactaacgtccacatcaccattaccatcacactactcattatatacatcggcgacgcctctcctccacgtggcgctacaagattcgccgtcattgcttgaatctgcttcgccgctgaccaattcttactcacacaccctgctcctcctcctcctcctccgctgcttccgccgctacgtcgaccaaacgacgaccactgatccgtcgatgacctcctaccacttcctccgccgctgctaccgctgtttttatcagcgtttaaagcggcgaggaggcttgtaagagctcttttagctctcctaacgcttccgtcacttaacggcgtttgtttcaacgccgtaacagcaatctccgcacaacgttggatttgtctgactgagtcaacgccgttgactacggcggtacaaatatcaagagctttaacaatccgatcaagcatctccggtacaagcttatccaacggaggtttcgagatctgagacggattcgatgttaaaaccgaatgaaactccgattctatagacatgaaaacatcaagaagcttccttagccactggatcgaaagaatcgggtaagattccggcgaatccgacggtggtaagagctccgcgaaacgttcagctacgtgtttttgaaaatcttcgagttcttcttgctcttgctcgtggttaacctccatggaaaccacttgattgcgacggcttagtcgactcaagaacgagctctgatgctccgtcgccggcgccatcttaacggcgagactacaacaaatttgtgaatctttttgggaaaaagagagaattttgataaaaagcagagaagggtttttgagattattgaccagagaacagagtcattataagagagaaggggatagattgggaagacatgttttgtctggtagtgagaccaaagacttgttcttctttctcatttttttcttcttctttttttctgttgtatataattctttttttttccttcactatttatttccctcccaatttatttttggaacttgaaaaaaggactcaaaatatttattctaatgcaaagtaaattgcctaagtattttattcacattttcttcattatatatatacaaacaattgatatgtttggtgaataactaaggatatattattttttaactaaggatatttcttgctgactagtaaaatgtatgatatagtgttaaatccaaaatagtttatatgtcatataaatgatacatatgtaattatattaatttttattagccgaatctcttaaactaaatcatgttttcattttcattcatttgtcatgttagttgtacaacatgtttatcaaattttcgtgtcatttttaagtcttctactatttgttatcggaccaaaggatattctaccaaaacaatatgcattaatatgtctaagaattgcagctaaaaataaattaacaatcaaatttaagaatttttgtttgtgggaaaaaagactaggtgtcgtgttcgaatcctaacaagtataaatataatcatacaatttaggacgaaaattgtaacaccacataaatctagctgagacaaactttgtagctaatttagttgagccgaatcttatagcctcacgtacgccaatataaacatttaactatcttaaaaagctagtcccataaaatctagggtccactcatgactccaaacggtcttagctagttactcaaatagtaaagcctattgttagtcaatatttttcaaagctatgtagttcatgaccgtatgctgaccttcacacttttagagtatctttattagtagtctctcacatagtttttcattaactaaaaaatataaaataataataaagtataagagagataagaaaaagattgaaaacagtttctatgcagaaaaactttaaagtaatgattgagagactatatgtatatgtgtatgtttataattggacagaaactaaattataataaaatatatattttttttttagaaacttttgaaggatttcaccaatagagatgaccttagttgagtggtcaacgtgagtccagaaaagcttgaaccatctaacgtattaaagaaaaattaacaaatggtaatctacttccatgatcaactttctaggtggtggaaagcataacccatcctccatataagctttatatgaagaaaatgaagcaaactcagttattattttttttgttcgccaccgaatttgagttatttaatgttcgccaccgaaatgggtttatcacaaaaatgtgtaaagaaaggaatcagaccgtttcgtctgaaaaactgaacctcttctgaaaagtctccatcaggttgaaaatgtcgtcgttgtcagaagcaaaaggataagatattatttaaatatcaatttattggctcataaaaataataaacaaattatgagaaagcaaaagccaaaagttgtgacaacaaagagagtaataaaggtttgactgattcctgtacatctcttggctctcgtgcgtttcccatagttcccaataaattctgtataaaattatgaatttatgatgaaattaagaaaattaatatccatgtataaaaataattaatatgcacaagcaaatcgaaatatgtttaggtaagcatgcaagttataaatatttaatttcagattttcagaaactagaaacgatcatttttaaccttcttttttggttagttactttatcactgaactagtgggaactttagcatatttttccattttctctgcgtgaaatgaggatcatcattatttatggtagtttattcgaaaatggtcggttaaagtttacagttgatgactgttagaaaagaatactaaaaacggttataaaacattattatagtcggtccatatctttattttatagttcattccttaaaatttctttaaaaagttgagggataatgagaaagccacatggaatcaaaatagcttctctcttgcttgaaaactcatgattgaaccatttatccttataatttcccaaattaacgcgtacatatattaatatcatatcttataatccataagtcacttatatatcatgaaggaagtatcattgtcggaaaagcaatttaacaaccaaaagcgacgcaaaaattaataagtttttaaattctataccaattttttgatttgccgtcataatgacagccacgaatacgaatttgagagaaagagatctaaacgcgttatgttggaatttcacggatttattatttcatattataatagatcgcataatgtcagtttctacattagatcacacaatgtcagtttctagatttaacttaattagaaaaaatcatgatatagtctcaatatgataaaatcatgatggattaccattttaccagaagagattgataacttttatactgtaaaactatgcactaaaatatacttactgtcactgaacatgcatttttgattctccgatttcttctgatgaagaaaatgtatatattgtatttgatttttgttttactttttttttttgttttatgttcattttcgtaattgaggaaagaaatagtcttctctactaaggaacatactcctctattctctgttgtcttctcctattttttttttttgattgggacctccataatactgatctctatcatactcatcattgtaagttgactgaatagtgaaatttagggtgggcattcgggtaagcgggtcgggttcaagtaaaatccgatcgggtagataagtttaggatccaataagataaatctaaaatattggtttggttttggtttgggtccaatcgggtttgggtcggttcgatatgaattttcaggccttttttgaaactgatactcaaattttggataaatacctagattttttaggataaatatgtggattttcggataaaattttgggttttgggtaaaatttagattttcgaataaaatattcgggtttggttcggattcgggtcggattcgaattcgatttttcggacagaggaatttaggagccaataaggcaaattttcgggttctggtccaagttttcggatccgttccggtttggataatcagttccgttttttttgcccagtcctagtgaatttatacaccattgtgaaatatgttcaaatatatagaaaattttcaactgaatggttatatcattttttatgggctgtgctgaattgtatatataggtagaagactccataacatgggccataaaataaccttacgttgggtctttgtacaaacaaactatacattgggccaaacctcaaacgcttcgctgttgggccaaccgtctaccaagagaagaaataacaaattatctataaatgatttttaagagtccaacagactccagactcaactagagaagggtccattcacttctttggcggataaaattaactagggcaatgaaaaacattgttgttttagttaactgatttcaggctttgattctttgtgtgtttaatttttattagtgctgctggcatttacaatccagatttaaatcaggtgtgtgtatatgtacatgacaaaaaaaaccattgcattgaccggtattttcattactatgtccagaggtattttcattacagttatagctttcttataacaaatattagcatcgccatatatatatattttaaaaatcaatcgtgtaattttttagaccaactccagcggtagttttttagtagaaactcatacaattaaaaaaaataaaaatattgaaaaattaagaaacagatgagagagaatttctaaaattcctaatattaggagcgtttctattagtcatatacgttggttttttggatgtaaagataaaatattaatactttttgtttttttagaaactacgtaaatcttatacgctggaagtgctcttaagatttatcattagaatatatactggtttcttacttggtccccccaccacacccccaaagaaatgaatacaaataagagttggtggcgaggaacgttacatgtcccacctcatatttctatccatgcagctaaatttttggctctcgggattgattattgtgacatcgacctcagccaggcagtgcgataaataatagagtagtggtccaatactatacattatcaatttatcatctattggccagacttatatatatacccttatgcggtctctatatttatgaaaaaaaatcttagaggttgattgatttctggttttgtatgagcatgtgtgcatgggttttatatgggtcgttttgtggggtggtcgtaattgaattgaatccttgccctgatgattgttgtgttattactctacgtatatattgtttttgtggctgattcttgtatattatgtatgttgatggtgatgaattgtggatgataatggataagtaaaaatgaaatctaaggctaattaagacgatacattagcaagaatgactactaacacctcatcatgatcttgaacgtgggtgggatgttacagttgcatccagttggatctcattttaatctcaaatcactcggttttagatcaaacttatttatggatttgatcgtgaattagagatttttacgcatggtttctttttcgatcccagccatccgcaaatcagtcgatcgctctctccgcgatcgtctcctctctcttccgagtctggttccgccatcttcctctctttctctgcttgcattttattttggttgtattcattttgtttagcattttcatctctaacgtctttcctttccacgttggttgattaataagttataatacaacacaataaatcgaaaatggtataaaattttccatttacacccaaaacaaaaaggttcaaaaacataaaatccatagttgccgatgtgttatctgaatatttaatttagtcattatattaaatttttgtgaaataaaaaaaatacaaatttcctaagataatctcatgagtaatattttgttttatatatgtattcactcttatatttataaaattattcaattacacgtactagatatattattaagagttggtggtataaaaatcacatttctttgaagtaataaagccaaatcatacccaaaaaaatatctgaaaagaagatagtgacgctacgtacatctctgacatggccacttcaaaaactggatgttataagcgtgaaaaacgttcaaaacctaaagctctaattatcgtgacactgacattatatataattatgtatataacatggaaagagacagaaattataagcatgaaaaacgttgaaaacataaaacctcagccaaggagtgacgaatgaaagaagattaagattaaaggtttttgaaccactacgattttatagagtctattataactttgaaacttgtaaattaaagttatgggaaaattgactagacatttagtttttgtatcaaactaaaatagatgggtgtttgtaaaagagtaattacgaaacaactttttgaatatcctttgtgacgagatatgtcagtagcatgttcactacgctcagtgacaaccaaaattaataattgaagttcgttgatttttttgtaagaattgtttagtaccgtaaatatatatttgaaaatttacaaacttacaaaaacgtaaataaatatgttggaaatatttcaaaaatgtctgaattactgcggccctttaatttagtcatttattagtaaaaatgcttttgtttgaataagagaaatagtggttgaataagtttaatagatttactttttgtgatgatcattatttataaatgtagttgttatatgctctcactatttcactctcattcaattataggtttcacaaatttaacgtttaatcattttaatgtatttatttacttacattgaatatttaataacgttgagtcatgattgtggagatatcttatagatgaaacctactaaggtataagagcaccaccaacggtggttctttaacagggtctctgtcaacaaaaaaaagaaaaataactaaaagataaaagttttacgagagagactctaaaatcccttatctaagggatagtcttacgaaataataaacttttattagtaatcagtttatattaaaaaaattataatataattataagattaaaatatattattttctggtttttaagggattttcatagggcccgccgttgaggatagtctaaagactacgtaatgaatatggtagaatattccaatttattaattactttccaaggaaactagcgaaaaaaaaggtaatggtccaattgtgaatggctcatgactcatgaggtcatattgggctcgacagatctaacatgtaatccagccaaagctagatatgcctgtgaaaccagcctagctaacacgcctagcatacattaccatattgaatttatttgtatataaatattaaaatattatattatattcataatataatatatatctaaacaaaaattaatttgagaaataatttcatgctaacttgtatgatttttatgtaaaattattatatgaaagtgaaataaagttcagaggatttttccaaaagaaatttatactaattttttaaatcgttaattattgctataattctatattaaaataataagaattattatatgaaatttcaactttttatttttcataaatttctatttcaaatcaaatgtaaaattagttttcttagctttttaactgacatttaatttattaattattcactgtatttttaaaaggtaacatcattgtttaatgatcattcattatcatcattcgtcagaaagaaatatgtttcattcctcattttcatttagttttttttttgtcttttagaagtcaatagtagaagtcttagttacaattccacacattgagaattcttatgcaatagaataattaaataaacagtgacaatttaattttcatgcaaacaaagatatatgaacgtacaagtttctacatcaaaatatatttgttaataagattatacaaaactctgaaaacctaatacatggaaaaaaactcaatggtaagagattaagatactaagtgaaagtcattgcaaacatgaaaaggtgaagcttgcttggatcacgaaccaaaatgtcaaaaaacaaattcttgggtttttcattttcgatccaagtaaacttaaccacccccatgacatggttgtcattggttactattaaatgtttaagtaaaataataaattgacttttatgtcaaaaaaatattgaatagtacaagatctaaaatttaaatactcagtgataatcatggctaagaagaaggtaaagcttgcagtgataatcataaaggttttgattcacgatcgattgaggcaaatctcactttcttccatgccatggctatcactcataattatctctcacttagatttttttttttttgttttttgcagtgtgaaaagaaaatcatgcacttgtgatcttatataggaagaatcaaggataagagataaggatgtgggaatccaaatattagataagtataaatctaacaaaatccaaaaatccacacttactattttcttatgttaataccattttagagttaaaatttgtttgaatgaattttttgaaaacttaatgaatagatataggttattttatttgattctcttatttttatcttcatctttccaaatttgtgattcaatttcactttcacttactaggtttgtaaatttaatttacacttatacaactatcgaaccctaaaagcttttatagtcgtctttgaagaagtacaaactccaactctttcttcatttgaatgtcgctccccatttccgtctttttccatgtatatttctttggatgtgatatattgtcaatttttttttttaaggtttataatttactaaacttaagatatgacagggtgaaaccatatatgttttgaaatcaaagcaaaatatatcttgtgcattgttaggtctcactagggtattgatctatgcccacatagtaaaatcatttgtattttgaaatcaaaacaaaatcacattttggataacacattggtattattatatgagatatatagacaactgttgaacactcttaagaacataattaagattaggggatgtgatttggtactggtacgttataatggattgattagatgcaaaaccatatttgtttgatcttttgtagcttgtaaatcaaaacaaccacgatgcaaataattgtaaacgagtttagtgccaagctaaagataaaatacatatataggaaaactcaagttgaaactcctcctatattggtttcctctttggaactaaattgtatatgttacaaaggtgaaactactaaaataaaaaatgaagttgaattattagttgcacttgtagttatcctctctctcttagcaaagccaatcctgagaggagctagaaagtaggtttatttttagagtaattaaacctactgaaaataaaacatagcaaaaaagtacctttatttattagggccacagtaattcactcgccaaccatgttatgggctaaacgttttcaactttatttgctatattgaaagacacccaatatgtaggaatcctaaaacatcacaatatgtaggaatctttgtaaatcatcacatgttttgaaagttataacaaatgattttttttttttttaaaacatttgagccgccttaaaaatattatcgtatacaataaaataattgtagcaaaatcgaaatctctaatcgacagaagttaacgactgaaatatggatttgatgaatcatttagatgtatacaattgtgtcggtcaagttagtgttaatgcacatctttcaacaacagtaataaatcactcttgccaactgattaaacagaaaaatactccgactattttagagcatgcaaaaaagtgagatttagtctgcgaaaatgtacaagagcgaattgtggacgaacccatacctgcttctatcatgatttcagaggcttctggtttcaaatgctatattgacgggtctttgataaccaccaagatttccactagtctcggttagatatgctttgaaaatgacgagacgatgtcatcttgaactgaatgctactattggcgatgttgtggatgttcgaaaatcaagacgttcacgtaacaaaaaaaataaactcacgttccttagctatgacagttaaataaaaataatatcaaaattaaaatatttcgcactataaaaaaaggtttataaactaattttttttgtcattaacataatttcatttgaagttattgtcgttttgcaaaaaggtttctaaataaatcgatcaacacatgctggtgacatttatgatgagtttcaaatgtatgagttttgaagaagtttcaaactcttataagggtttataatgtgggaattaagttttgttaattcgtacgttcaaatataattggaaatgttgtggtaatataaatatttttccagtattcgtacgttcaaatataattggaaatgttgtggtaatataaatatgtttccagtaggggaaaaaaactacaaaagtttcagaaattttcataatgttttgtgactcccacaaattttaacgtgttcgtcatgtagaaaatctttggtaaaagagtgactagggcagtgtcccaagcaacgatgggtcggcacttggtcactccaatggacatgtgttatacagttgttacctatctgagctctaagtactgagtactaaaaaagctgtcatatgttagccacattttacacaacacaaaatccatttttcttctttcataactatcagaaacaaacacaaattaaatcaaagtttcattagttttaaccccccacaaaaaaacatgggtagtgcaaaatcagccatgctgatcctcttagtagcaatggtcatcgcatcatgtgccacggccattgatatgtccgtggtttcctacgacgataacaaccgtctccatagcgttttcgatgctgaggcctcgttaatcttcgagtcatggatggtcaaacatgggaaagtgtacgggtccgttgccgagaaggaacggcgtttgacgatttttgaggacaacctccgttttatcaataaccggaacgctgagaatctcagttatcggcttggtttgaccgggtttgcggatttatctcttcatgagtataaagaagtttgccacggggctgatccaagacctcctaggaaccacgtctttatgactagtagcgaccgatacaagactagtgctgatgatgtgcttcctaagtcagttgattggagaaacgaaggagcagtgactgaagtcaaagatcaaggccattgcagtaagtgtacaaattttaatcctatccgtctggtttgtataaactattttaatttagagtaacatgataggactattaaaatttggaaatcagttaaaatttaaaaccttacagaaatcataaaaacttagttcaagaataataagaaaattatttaaattcgatttaattaaaaaaattattttttacaaatagtaagtatattttaagacgtatatctttaattcattacacttttctgatattttttcaattatttccctctcttattttattctagccgttgatacaacaaactaacactagccaaagttttgttttctggatcatagtatttaaaaacgttattgttttgtttttgttggatttacaccaagaatagacactaactagtaaggagtatcgttttttaatctacaaacttttgatgcatgttttgttatggtgtgaagggagttgttgggctttctcgactgtgggagcagtggaaggcttaaacaagatcgtgacgggagagttagtcactttgtctgagcaagatttgatcaattgtaacaaagaaaacaatggttgcggaggaggcaaactcgagactgcctatgagttcatcatgaaaaatggtggtcttggtaccgacaacgattatccttacaaagctgttaacggagtctgtgatggccgcctcaaggtcagtatagttacgatttatatataacaatattaaaagaaagaatcaattttgaacttattttccaaaaatatttgtgtaggaaaacaacaagaatgttatgattgatgggtatgaaaatttgcccgcaaacgacgaatctgctctcatgaaagcggttgctcaccagcctgtgactgccgttatcgattccagtagccgagagtttcagctttatgaatcggtaaaagattaattttttgttaaattttcatgtagaaaccttctctaattggaaaaagatttcatcaaattttttaatattttttttatgtcaaagggagtgtttgatggctcgtgtggaacaaacctaaaccatggagttgttgtggtcgggtatggaactgagaatggtcgtgactactggctcgtgaaaaactctaggggcattacatggggagaagctggctacatgaagatggctcgaaacattgccaatccaagaggcttatgtggcattgcaatgcgagcttcataccctctaaagaactccttttctaccgataaaagctccatcgcctaataaaatgagctaaatgtatgttatgcaaaggatccagtgagccagcaacctattcgattgtgaaatgaaaaataatgtagtcgatgggttttgttttgtaatatattttggatttgtatggagggcaatgtttgaagtttgtataatatttatggatatttcgttaggctctaattatgaatgccttctttttaggaagaaatgccaaaaatgataattgaactacatttttgcccctaataaaaatattacatttgagacggacgagattgattagcgattctaccatatttgcaacacccgatttttatcaaaaaatgttacatgcagaaaggtttaaaatagtaataattatgtttttataaaaagaagtaaaataataccaaaaaaaaagttatgcattttttttcatagaaaaattcataattaagtgtattgaaattaaataattttatgaaaaattgtgttattgaagactacaaaagaattgtaaggatatagaggatacacaacacaatgattttgtctagaacgcgccaaacaaacttttttacttattcttattgataataaatcttttacaaaaatcaattatcttagaaataatttgacctattctacatgaatgatcaactccgactaagaagaaatgtatgcctaattctctcttctgtattttctaccacacatctgtgaaaaccaagagaattacaaacactcacattttaggcttttgctaggctttgaagataacacacgtataccaatattctagaatgcttaggtggctcaatgcaaactccataatatttatactatttccagaaccctaacccttaggatctccgagaatcaataagcgggatcttctttgatcttcaagcttatctctttccttatttgttgagaaaaatattcaccaacttaatcgactttcgtctttgatctccacgctaagtcagcaaagctcttcggctcgtcacatcaaccaattcatctctgccatgtcagcttatgcgtctatgtcagcaactcaaccgtctgatgtgatctgatgcagtttcctgatatacaacaatttcctaaaatacaacaggtctctgatgtccatcaactcgttattgttagaatctacatcttcaaaaattccttgtgaactgtagagtcattcgtcgcgtatgaaatttggcgtaaaaagggagactaataggcagaatgtgagtatgggaggaaaaagatggaggtcgccagtacattacaagtgttcataaggtcacactattgggagtaacgggttttggtgcaacaaagataactatttaaaactgattttttaatattgagcatgtacaaaaaaacacggaaaaagattttgtggtgttctagcggatcacttgacaagtatatatgcaagcttttgcgccataatggttttagatgtactttaaaattctgccatattatgttatatatatgagtgttttttgttccatgatctaaatgatgacatttttttttttttttatctaatgcctatctttaaaatattttctggatccaccactaacctcaattgcattcaaaaacgaccaaattggtgtatcatcttcggaaaacacctaaaatatatagaatatcggttcaaaagaatgacctggacctcttttttactcattcacccaagcgaactttgggcatgtttctatacccaatcgaaaatatatcgaacagccaaaaaaacgaatttttagatacaacatatatttgaaaaagttcttatttacaaatcattggtgaaaaatttagacactactcgacacaaatgcatgagtaggtttacccatttgttcacaccaatggacacgttataaataacaattttaatatatctgagcgctgagtactataaatactgtcatgtgttagccaaaaagaacataacacaaaatcctcttctcttctttaataacttttagaaacacaaataaaagtttaattacttttaagcccaacaaaaatgggttatgctaaatcagccatgctgatcttcttactagcattggtcatcgcatcttgtgccacggccatggacatgtccgttgtttcctccaacgataaccaccacgtgaccgccggtcccggccgccgtcagggtattttcgacgctgaagccaccttgatgttcgagtcatggatggtcaaacatgggaaagtgtacgactccgttgccgagaaggaacggcgtttaactatttttgaggacaacctccgttttatcactaaccggaacgctgagaatctcagttaccggcttggtttgaatcggtttgcggatttatctctccatgaatacggagaaatttgccatggggctgatccaagacctcctaggaaccacgtcttcatgactagcagcaaccgatacaagactagtgatggtgatgttcttcctaagtccgttgactggagaaacgaaggcgcagtgactgaagtcaaagatcaaggcctttgcagtaagtgtactctggtctaactattctttatttattttaattatagtaaatagtagaattattgcaaatttattttaaaacaccttttaataaaaaaaaatatacaagtttttgatgcatgtttttttctggtgtgaagggagttgttgggctttctccactgtgggagcagtggaaggcttaaacaagattgtgactggagagctagtaactttgtctgagcaagatttgatcaattgtaacaaagaaaacaatggttgcggaggaggcaaagtcgagacagcctatgagttcatcatgaacaatggtggtcttggtaccgacaacgattatccttacaaagctctcaatggagtctgcgaaggccgcctcaaggtatgtacaattaggatcatatttataaataatgtctataagactagatcaacagaaaaaatgagagaataagtttttattttatttttattttttgggttcaaaaacgagaataactttcgaacttaaatatttgtgtaggaagacaacaagaatgttatgattgatgggtatgagaatttgcctgcaaacgatgaagccgctctcatgaaagcggttgctcaccagcctgtgactgccgttgtcgattccagcagccgagagtttcagctttatgaatcggtaaaaaaattcattctttagattttcgttagaaaacgttctttagttgaaaaaagaatttcactgattattatttttattttatttttctaaaagggagtgtttgacggaacttgcggaacaaacctaaaccatggtgttgttgtggtcgggtatggaaccgagaatggtcgtgactactggattgtgaaaaactcgaggggcgacacatggggggaggctggctacatgaagatggctcgcaacattgccaatccaagaggcctatgtggcatcgcaatgcgagcttcataccctctcaagaactcgttttctacggataaagtttcggttgcctaataatatgaactaaatgtatgccatggaacggatcggttaagccattatcgttattcgactttgaaggaaactaaaaaataatgtggtcgattggtttggttttgttatatattatgcatttgtatgggggtcagtcaatgtttgaactttgtataatatttctttgggtctagtgataaatattttcccttttgcgaaaaaggtacttgtgtgagacgagattgatgagtgattctgaatttggggaatgatagttcccaactacactttaaatccagtgattataaagcgtattagagattataaattaaggttacaattgaattttttttagatttaatcggaactagacctatgccactaacgatgtttagttaatgttaactgagtgccgtcttggcattgtttgaaacaaatttggtattcaaatcttcaatgagatagtatcatactactaaaaaattgaaacttaggtcttttttggcattgtttccttatatggttaaacattaaatacttacatttcttcttcttgatatatcgtatggtggaggttatatcacctcatttatgttttgtatttaaggatcggtggtggagatctataacatcattcatgtttggttcgtgtctttgtagggagctgttgggagttctcgacacgatggtgacaaggagaatttaacactttgactgagcaagacttgattgattcattctaataaagaaaattatggttgtggaggaggcaaaatcgagaccgcggatgagttcatatataagtagcaatggtggtcttggtatcgacaagtattatccatataaggctgttactggagcttgcgacggcccctcaagattggtagttacaaacttacaatcatagagattaggtatcatgtctaacaaaaaacaaaagtaattcttgaaaaaataaaaataaattgtaagtagcatataataccaagaatgttatgagtgatagtatgagaaccagcctgtgactgttgtcattgattcaagcgatcggaaatttcactttatttatcaataatatatataacattcatatttttcaaaataactatatcttaatagaagtctcacgattcgatacttcgatcgaccacaaccagacgtagtctcgtgtgattgtgtgactaactttaaaaacaacaataatgaaatcaaaacacgaaaatctaattcttacgtccttgttttttaaattctcttacgtcaattcttacctttgcgaccaaaagaacatgttaaatttaaacctactaatttccgatttaaatttcttaatcttgttactatgaaccaaaaattacacaatcttttcccacggaacaaagattatttattagtatccatatacatacaaatatacaatacactcaagccactcatatttcgtacttgatcaagatattttcccccggtaaaatccaatttagaattgtacaacatatatattggaagttccgttgtgtcataccgtcacactaataatacagcataccaataatagagcgcaaacgtttcacattgaatagttcaccacatatcaacttgagtaaattattatgcttagagttgttgtctttttgtttttttattttttttgaatatctggaaattcaaactcaaagaccttacattttctagaggcgggatccacaccagattaaattcatatcctttgggaaagaaatctcttccaacatgcctcaaacccagtatttctaactgagagatttacctacataattcaacaatcatgtctattatgttttcaatttaggatatctaaaaatattgtgaagataaacgaaacaaaacttgagggaaaaaaaacagtcacgtgagtcatgagttataaagcatggataatgttggagatctaattaatctaattgaatgccacatcaaattaagccaatcagtggagaagatcaataataaaagtgaattggatctgccactacacttttagcatgaatatggctaaaagagattggtattggtaatggtatcgttgtcggagattgtcgtaccaattaaataacatgtaattattggatatatattatattgtgtcggcctagtcatatttgatgtgtaagtgcgagtgatttgagttagatatggggtattttacgaggaaaatattgaacaatttagggtattttaagggttgtagtttgagcatcacaagttaattatatttaggttctgcgtaaatttgactcaaaagattaagttatcaaaagaaacctcgtataatatgatccatattaattttcttttttttatatagaaaagttgaagattatgagtaaattggtaaactcgcgatattccagagttcaaaacgtaattttaatgacaatttggtgaatagtataaattaatatattaagtaaaagataacattctattcgatattggtttaatatgtcaactgttatatgtacatataagatgttactgatatattaagtgaataatatgatattcaccaaaaaaaattgtataatgaatgtgactttgagttgaaagtttgaaaacgaagagactataacatttgaaggaatctatggaatacgggtgtggaaccaatagtggaggccctcttcataaaccgagtttcccgagatccaaattgtgctgatggagcggtttctaacgttcttgtcgataatacttgcaagcttggccgaaggaacagaagagttaccatgacgtctaccattacgctcgcaccacaaagtatgaattgattatatggaatacataccttagaatgaaagtatgtagttttggatgagaatcatcaagtagaagaggagagattaaactccaacttgtattgtatctcagtatctgttgcgaagaattcctttagtgagagatgtgtattgataggtgaaaaggaaaaggtctcttactttcatattacgtgggcctcataacatagaccagagctgatagcatacctctctctatattaaatagatgggccaggcccaaacgtttacccatctgtatttattacaaagtacacgtggctgatggacatgtgacgatacgttttgacctattcaaaatattcaaactaatgaaaaagagtcgttgtcctctgacgcgtctctctctatctccttagattttcaaagttttcaacattcaacaaaatcattattttaattttgcagagacgaatcgaatcgatctcatctccaaaaatcttgtattcaaagtttgattttctgggtttcttctgtattatctcgatatttgaaaaaaatggcgaaggaaattgaatcagcgacagatttaggtgatactaacatcaaaggagttcttgttcatggaggaagatattttcaatacaatgtttatggaaacttgtttgaagtttctaataagtatgttcctcctattcgacctattggtagaggagcttcggttttgtctggtacaacttctacccttttgtgtatttcatattcttgtttcttacttagtatttgtaaccctaattagataaagaactaagtattggtataggtttttgaattagggttgcttgcaaaatttgatcttttttggatttaagaaaggttctgtcttcaaaatcatagtttaaattgaatgaatttgatgatttgtttgtgtttgtgtttatgtataagcaaaatgattcatgagagtattggtttattgttatagtgctgcagtagattcggagacacacgaagagattgcgataaagaagataggtaaagcctttgataataaagtagatgcaaagagaacattgagagagattaagctacttcgtcatttagaacacgagaacgtaagttttgtactctattttcgcggtaaacgattagagtttctagctaatgtggtcttgacttgtacaggttgttgttataaaagatatcattagaccaccaaagaaggaagatttcgttgatgtttatatagtttttgagttaatggatactgatcttcatcagattattcgatcaaaccaatctttgaatgatgatcattgtcaggtacggtttttactctgctatatttgatactatggttgatttaatcacaagtgattcactttttcttcttttgcagtacttcttgtatcagattctacgaggactcaaatatattcattcagcaaatgttttacatcgtgaccttaagccgagtaatttgcttttgaattcgaattgcgatcttaagattactgactttggtttggcaaggactacatcagaaacagagtatatgacagagtatgttgtaacacgatggtacagagcaccagagctgcttcttaatagttctgagtatacatctgctattgatgtatggtctgttggttgcatatttgctgagattatgacaagggaaccgcttttcccggggaaggattacgttcatcagcttaaacttatcactgaggtatgatgttctgttttagaaagatctgtacaaatgttggaaacttttatttgtgtgttgcaatgtgtttatgagttgtttcatgtggttgagtagttgataggatcacctgatggagcgagtctagagtttctcagaagcgcgaacgcgagaaaatatgttaaggagctacctaagttcccaagacaaaacttttcagctaggtttcctagtatgaattctacagctatcgatctactagagaaaatgctcgtgtttgatccagtaaaacgtatcacgggtatgatgagaaaaattgtacatagcgagattggcatatgggtgatgaatccttgatcatactctttgttttgcagttgaggaagcactgtgttatccttacttgtcagctcttcacgaccttaacgacgagcctgtttgttccaaccatttcagtttccattttgaggatccgtcttccactgaagaagagataaaggagcttgtgtggctcgaatctgtgaagttcaatcctctgccgagcatttaaaacattatttaagaaggggaaagcaagttttatactctgacattgagcaaaacaaattagtagtgtttaagctctgtttctccttcatctcatgttgatcgttgtttaagctatttcactagttaaaaaagctgtcttgcaactcaagaaattgttctataaggatccttgtaacccaagacatatctttagtagttatgtccattcttattatcaggatgtcttagatagtgttctgtttcttctacatatcatgttgttatcttgtaactcaagaaattaaattaaaaagctatctttgtttagacttgtatcatgtcacttggattgtactcgtagaaaatgggaaaaactcgatgtgtttattcatctccagcagtttcttcaagcactacgtcgagctcttgcaaattttggtaatgaacactagttcgatccttcactctcgaaactcgacaaaaaagtctatcaacttcgtctcttgactctattcgagtgatattttcatcatctagaaggacgttgatcccactccttcgtaacgcggctctaagaaggctggagaacttgttgcggatctctcgactccgaaaacttatgtaaacttgatgttgcggcgtaatctagagattttacaatgattagccactagatttatacaataattatatatatataattaacatacagtatgttcttttgtacacaccttttttttttctttgtcattggcaatatttcaatttctctaattctagaactacataatttttgatttaataggattacgtacgtgtgatgaggaaacgttgtcaagcattgccttaaccttctcgacgatttcatttacgaaggttgcttggttgcttccaaaacaaagtaagaaagaaaacaaatcatataagtatgataacaatgtcgcaaatggaagaaactactgttaaatgacctcatttttagtacgtaagattttgaaagttataaagactaatttccacatattaggaatctaacattcaaatattaaaagatttaatactgtttatacatagtcaatactcaatacattcatttttaactcggtttggagaatgtattgtttactagattttaacccgcggtatactgcgagaacaattttatttttaaattagtatatattaaagtttgcaaattaaatctatttatataatatttttattttatagtttacaattgttattaaataacgtcttgtcaaactcgtcccgccaaatccgtcccgtaaaaaacccgcggtacaccgctaatttaaatatataattaaaataaatattttacgggattgcaattgtattttggtttgtcaaacaaatatttgttttaaatagttgccaaaatctagctcaaattttggagaaataagatttattgtatagataaagaatgtatttaggtgtgttttgctcattttaagggattgcaattgtattttggtttgtcaaacattttttgttttaaatagttgctgaaatctagttcagattttggagaaatctgcatgacatatgagattagaatatatttggaatatttttcgtttgttaattaatttattaccaaaaaaaacaataattaaaagtcagtgacagccattgtaaataaatcttaactccaggatttatttcacaaaatagctgcaaaaatgtatatgtagataccactgcttttctgtgatattttgacattttaaaaatatggttccaatcattttctagttatattgatttacgaattaactatattaactaagaatgcattccactcagtattagttaatctatgattccttaaaagctaaaaacatagtgattagttaaataaaatcaaacctccccttcttatatgttaagcccaagcgagacgcgaccgaaatcaaagcttttctccatccttcgaatctcttctctgcatcctcccaagccttcttactaatctgcctagctttcttccgctcatcgtgctccaactgcagtagattgtagttgaaagtacttcttgcgacctgaagtttaacgtgacaagtctcaacctcaaaaaagataggacaagaatcaagcatcttaagatccatttgtttctcgatctccaccaactcgtctaagcaccaagtggactccggatagttttccgagaagatcacgacagcgatcctcgagtcttttataagcttcaaaagattctcatcgattggttttcccctaggtgcgtcctcgtccgttaccacgttgataccattctttatcaatgcgtctttaagaaagctgaagaagttatagcgaacgtcgctgcctcggaaacttacaaacacttgatgttggggcggagctctgcccttcacggccaataccttctcttgatccattctttagtctttgtgtttttggtagcacaatagaaatggtctcgggactctcatttataatcatatgtaatgttgaatattcaaattaaatgttacaatttgtaatattaaatagaatgaaagttgcatgaaatttcacatgatatatgttttccccggtcttgaacgtacgatatatctggaattagtaaaccaataaggaaaggtcggtgttttcagaaattttaaactttacgtacagatttattttatatatgataagatatctagttaggtacgcgtaattgttttttcttacgtataacattacattttattaacctcaatagtcaaatattatgatgcatcagggaaaactagattaactacgcttactaactacaattttaaaatattaattagtatgttcggtaaattgtaaacccgatatagatgcttgactttgactatgtctttctatttcttggcaagtcacttggtacatataattaacaactatctaaatatatgtacctcgttaaaccgtaagaaaattccaggaaaatcaatcagattttacataatgttgcaagaaaattttcattaaaatatattaaaaatgttgggagaagaaaaatatgtttctttggtagacatattgatttataaaaatatctctagtagaatagaattttttgtttttcttctgttgtcacaaacttgcgtaaacgtatgtgtctcgacctagatatattttacatgagttcgatatgcaattatctcgaacattgtttaaacacatcttttgtcattgcatcgtctgttgcctataatatgtcggggaaaacattgaaaagagaacatccgaccgcacaaacggtccaataccatcaaacatcatttaaaaacaatttttataattttattttgtcatgtaaccaatgttgcaagttggcatgtgtcctaactacttaacctgtcagcgactcaagaaaccaagcagcttccactagcaacaccataatatgtatctctaccgctcctctataaaaggcacaaacattgaaagatacttagatcaaggtaaatctacgtgctgagaaagaaactgattttatttcatacatacactatgaacggagaactggtgaagggaggttcaggtgtttccgttaagagaaggagacaaggagatcactctgaagaacttcggatgattccaagacgcgggcagatcaaatcgcggatcgctgcaaccgctttgcactctatcatttcggttttgtctaggtctagatgataatgcgtgatgatgatcatcacccattcatcatcatcagcatcttgtgtctaaacattaaaaagatcctcttgtgtgttatcttattctttgcttacataaatatattatcccttaagaagatgagcgttggatcgtgatcatcgtcaacaatctatatagtttgagtcatttgaatgatttctctttttagaatattttcgttggctatatcatagatttggattcaatattatgacgcatatatcatactattgacatttacatagcgactatagttaattatggcgttaatctgagcattgtggcctaatgtctggatccgagttttatttatattattgttcatccaggtgcctagtttctataccgtcttagaataaatagattcgacatagtcggaaaataatacaaaaacgttgaaaaacaacacaaaattcgtcagaagcacatgtaaatataattctttgtgtatcaactgacacaaatgaataacttaagtgtattttatatgacaaataaaaagacgttgctacttagattccacacaaaccggcaccatgtctggaacaattacaattattttacatatatcatcactacttggtagcagaattgtgtttttgtcaacttattattcaattaacaatgcagagtgagcattattaaagaaactaaaatatgataatagttttcacaaaataatatttttctgtgtgaaaacaaggacaaaaaaactgaattatgattttttccagcaaaaatgaagaatgaaatcaataaataaaattagagaaaaatgtttttggattaaatttggtatatcttgtaaatgctcaagattccctttttcatatataagaacacccacttttaagggcactacaactttgttctatacttttatctcaatatcctttaattatgttctctaatcacttatataatccactttgcaaatggataaatcttatcactcctctatgataagtttcagagtcattccaagtgtttatgacaattttcatctctagccatataaatccttacaaagttttagaacataattcttctttctttttcacgtcatagctttgaggttatattatatatatatatatatatatatatatatatatatatatatatatatatatatatatatatatcttttaaaagataaccatttaaaaatatggattctacagcatgttgatgtatcatatacaaagaaaattcaaatggtattaattgcgatattgtggcaaacatctcataaaaattatgttcaagtccctcaaaatcccaaggaggataaggattacgagaatcaggttcaagtttaaaggctcttgacctgatcgacttcacaagaatgactctaaaccttgcccttcttaaatttgctatcataggtccaaaattggcatcgatagttaaaaggattatggtacagggtagtaatccattcaaaacactacctagaattcttgccctgttgaagagttttggtgttgtttctttaccaacatgtccatcaatttcacaactatcgctgccttcacaactgtcgcagagctgccttctctccaacaggttcatagattccaatgtttagggaagggctcatctagagagatcaggtttcgatggaccatggcctcgagatcctcttaagtttgataactcatactttgtgtaagatcatcttaagtcaaggaaatttagtttttgttctatgtcaaggtaatattatgataatgtgtctgtttgtagtctattcattttaatgcccttgcttggtcggtaatttatctgtattcatgttgcttgcaaatcttttctccaaaccaaaccatggtaaacacttttgtccgaaaccataactttgtttcattcaaaaactttgtttgaccaaaagttcatagagaatacaaattatgcatgctaggtatgaccttcaaattattgttatgcgatcgtctcataaaacttcatctacgacttcattttattatataaacatatgcatgctaggataacaactagcaataggctactcgtaaaatgcagctgatgcaaaacaattgctaacaagtactatatgtaagttgagatcttaagaaataaagaatcgatgaaatctctaaactcaatcataactattaacttaaaataacgagagggaataaaataaaataagagagagaaacatgtaatgaattaaagatatacgttttaaaatatatttagggcatctccaaccctactatattttagagtaaaaatgcaaaaatcttctccaaccctactctataattgattcaaaaatagagatttctgcagattgactctatatatagagcaactttattctctactctatttttgagttcaacttttttatttatactttaagtccctcaaatttaaactttttatttaatacatataattattttacaaacaataattacaacacataattttataaacttaacaaaatattaagtattaaatttaaaataattttataaacttaacaagaaacaagtacctaatttaaaataaacaacataagaaaactaaaacataaaattaactagtgatttaatagtccggtaaattgcatgtggatccgccaagatagtcaaaatattgtccaaatgaagtagatggaagaggagtttcttgatcttgatcttgtcgttggacacatcgtttttgtaaaatccgtccttgttcactctcaaagtatgcccgaacatgtgagttttgaaaggaattcaaatccaaaataaaatttgtaatgttttattatagttatatgatgtaatgggtttttaataaataagtagtgtttaatttaaataatattatattttttggaaatgtttacaaatctataatatatggggtcaaattgtaaattatataattaaaaggtattagtatataaattagaaatagaatatttctaaaaatattcttttttatagtagtaaatagatatagaactatacattggagatggtcttactatttgtaaaaaagtgagtttttttaattaaatagaatttcaatagtttacttattattcttgaactaagtttgtaaaatttctgtaaggttttaaattttaactgacttccaaattttaatagtcctatcatattactctaaataaaaatagtttatatatatcagacgaataggattaaactattatagatatcaagatcgtaaatttgtatcattaaagaaatgaaagcgactttctttgttatagatattagactcaacgaaaaaaatcgaggaaaactgaaacgagaagtttgggaaaatgttcaacaacatataatcgaaagaggtaaatcagacatatatagatttttttgtagtctcctagaaatcatgaataaatagaatatggattgggatctaattaccgaaacaaaaaattcatgaaaagaatgcaattggtcgtgaatcatggattttggaggtctactaggaatgtggtagctaaaataaatgatcgtattctattcaggtaactaagaagaagaatataggattaactgatctattaacgaatacaactttccatcaaaaggctcgtgtaacttccggttttgtatttataacatttcatataaactagttatgtaactagcaagtgattttaatctgattttgtataatgcttctggaaactcagttacgttccaaattaggttatattccaccgattttgtcaataattaacacttgacaaataaagaaaagaaaaaaaaaggtgtgaaatcgttttagtaatgacgtaatcactaatcagagcaaaacttgacacgtagatcgctccgtgtgacccacgacgaaagcttaggaatcgtaagctcactttttttttgttctctttcgtatttaagtttctacaagagcattaagctatctctcactctctctgcccagagagaaaaaacactaaacaaatagaaaataaaaaaacaactcataaaattttccattttctcacgattttcctcgtcttaaaaaaaatttctgagaaagaaaaaaaaattcaattttgtcgttttatttattttcctggtttcagaccaaaccagttagaaacaaactcgtttttttttcacaaatttggattttattgttccactgtgaatgaaaggaaaccaaaaagactcatcggagaaacccatatgggatcggagctcatcgggtatatccatgacccgacccggtcgattaataatctggctcatcctcttcatctccgtcacttacatcatctacactctcaagatcgtctccactacacacccttgcgaagatctaacctccgagtcaattctccaacaaagaccggagaaaaaagcggttacagtaacggttaaggcggttccggcggagcaagaagcaacggatctaaaccatgtggttttcggtattgctgcgtcgtcgaagctatggaaacaaaggaaagagtatatcaagatttggtataagccaaagaaaatgagaggctacgtgtggttagacgaagaggtaaagataaaatccgaaaccggagatcaagaaagtctcccgtcggtgagaatctccggtgatacgtcgtcgtttccttatactaacaaacaaggacaccgatcagcgattaggatctcgaggattgtttcggaaacgttgatgagtcttgattctgagtcgaagaagaacgtgaggtggttcgtgatgggtgatgatgatacggtttttgtaacggataatttaattagggttttgaggaagtatgatcatgaacagatgtattatatagggagcttgtcggaatctcatttgcagaacattattttctcttatggaatggcttatggtggaggaggttttgcgattagttatccattggctgtggctttgagtaagatgcaagatcagtgtattcagaggtatccggctttgtatggttctgatgatcggatgcaagcttgtatggctgagcttggtgttccattgactaaagagatcggttttcaccaagtaagtaaagttttgtttggatttggttatttttgtgaaatgggattttgcttagattggtttgattataaatgattttgggttagaatgatttaaaaaggtagtgaaataggcaaattgatgattagtttagtgtgtacgtaattgatattcatggtttactgatttcagtcgaattgatattttagttcaaagtcaaagattagggccaatggatttgtcaaaaactccttttaaggtttgttaatgagagctaaagctttaataggagcaagtaacagattaaggtaaacgctttctacagaaacctagactgtttaatggttcacattcgtttcagttttcgtaagtttggtagttgtgcgagtttattaacttaataattgacattaattagtttaagtatggagatccgagtttgtgccgcactactaatttgctacttaaaaccattttaaaacagccgaccaaaagtaaaaccattggaaataacaagaagcttcgtttgatgagagaaaacgtgaattgttgtcaactttggttgatgtttttaattaacaaaaaaaaaacctttggttgattttctttgttagtattttaaacgatttaaagagaaattaaagcagaataattagaacacgtggcgcttgagcagcgccagtctttgtcaatagttagattcctagatgtcggaataagacgcgtgtgtcagtttcaacctttaaaagtctttaaagacttgtgactctttttttactctacgcgcaatatagcgcgtgaaggtctacgctcctttcttcaaatttctttgattcaattgtgtgtgattttatttgtatgtagtacgacgttcatgggaatctcttcggcctcctagctgcccatccgataacaccgtttgtatcgatgcaccatcttgatgttgtggaaccgatttttccaaacatgactcgtgttcgcgctatcaagaaactaaccacaccgatgaagattgattcggctgcgcttctccaacaatcaatatgctatgacaaacacaaaagctggactatttcagtctcgtggggatttgcggtccaggtgttccgtggatcattctctccccgggaaatggaaatgccatctagaactttcttgaattggtacaaaagagcggattacaccgcctacgcattcaatactaggcccgtgagtcgcaatcattgccaaaaaccgtttgtttttcacatgtcgagtgcaaaatttgacccgcagttgaacacgacggttagcgaatacacgagacatcgggttccgcaaccggcttgtcgatgggatatggctaacccagaggagatcaacactatagtcgtctacaaaaaacccgatcctcacctatggaacagagtaagtgatattttgtttttgagagattcatttttggaaattttaaattaatctgttaatgcttagtattttcttggcagtcacctagaagaaactgttgcagagtattacaaacaaagaggaataatacattatggatcaatgttggtgtatgtagagcaggtgaagtcactgaagtaaagtaatttctattttgtactaagaaaattttgaaagagaaaaataattaggggtttttgttaggcttttaaccatatagttttgctgattaatttatttttcctcgtaatctcatttattaagttccaaatctcaatttattccattgtaatccgtgaaatatttcgccaaagccagttggtttagtaccgaggaagaaaatatataggaaactatattttagtcttctgaaaaacttatgttattagtgagaacttatgttattagtgagaacttatgtcattagtgagaacttatgttattgctccaacaatatgtaaaaaagcagaaagtgtcattgtaatttaagtctaatggtaattgctaaaatcctcctcaactgaaatttcattctactcttgctctatattgcaactatcttaaatttaaggcaggtcttgatcatgtatagacaaggttttctggtttaggtcacttgtgtagaatctaaatagtctagtgttgaagtctttataacctattttaaaattttactttttgaagtaaaatttgtttgttgaaccgaagaagatgattcataaatcagaatcacaatcttgaaggccatatatagaggctaaataagatggtggagccatccattactgcagttctttcttagcttacaaacttatactaaatcgactagtctttaacattatttttttgtttctctttttcaattaccggtaagcgattagccattacgtggatcatatagtaacttatataatatgattacatctttacttgattcaaaatgtctctactacaacaaattctatatttgcaagctaaggattacaaatttgatatcagtttgttgctaaattttgaaaactcaatgtgttgctaaattttgaaaactcagtgtgttgctaaattttgaaggttcagtgtgttgctaaattttgaaaactcagtgtgttgctagattttgaaggttcagtgtgttgctaaattttgaaaactcagtgtgttgctaaattttgaagattctgcatgacaaaactttaaagatatttctgagaaaacaaagtgaaacgctctgacattggataattcattgtgtctctttgtgcaaaccgaatatagaactacgacaagatgacttcatcaccgttatgtctgaataataaagtactaaagagtgtctaaatgcgtgcgaattaaagtatgagtgcgtccaaattatgggtttcgtaccaaaggcccaatatcaaagaatgtgtatcttttagtgggaataataaaacgacaaaaaacaaggataaattcacaacaaaaaaatggagatgcggggtatcgatccccgtgcctctcgcatgctaagcgagcgctctaccatctgagctacatccccatttgctcttctatatgaaatttgaagtatataatatctcatgtaaggagagaatcattcttatggattcaagatgattttagtttggtaggacctatagattcaagatcgtgttcatatcttcactatccactcttgaatccctgatgtcaagatcccaataaatccatcattcgggtattaaatttctacctaatattaaaatttgttttttttgttttggtatatactaaagaagacccttaacgtcaccacattatctatcacagaaaattgtattaatatattctctttgtttctataccaagcaaaatattttactattttacattatacactaaataagacccaccattgttgatcaaattgactatacttatcttgagccgccggattcaattattataactccaacatcaatctcactatatattatacttgtctctataattcaacaattcaagctttatctctttctttctctcctctctatctttctctcacactcatgggtcttccaacagatttcaaagagcttcagattccaggttacgtactaaaaacactttacgtcatcggtttctttagagacatggtcgatgctctttgtccttacatcggtctaccaagttttcttgaccacaacgagacctctcgatccgacccgacccgactcgctctctccacgtcagcaactcttgccaacgagttaatcccggtggttcgtttctccgatcttttaaccgatccggaagattgctgcacggtttgcttatccgattttgtatccgacgataagattagacagctgccgaagtgtggacacgtgtttcatcatcgttgtttagaccgttggatcgttgactgtaataagataacgtgcccgatttgtcggaaccggttcttaccggaggaaaagtccacgccgtttgattggggtacttcagattggtttagagatgaagtggagagtaccaactaataatgatggttttacttttactttttacttttttcacggtaatatttttctactgtataattctttcttccaaactactgtataattcaagtataagattatgtaattgtgtatattagcatcaatcatctttctttgttaaagaaccgtctgtataaaatcttccaatgtaatctgcttttcttttatttgaataaaaaagtggacaaataaacacatcaagtgttatggtatatcgctatgttaggaatctgaattcattttcttttgaagaaaaacagtattcataatctaattcgtctctaccaaatagaatttgtaaacagttttataccgaaaaatatcttaaagaaactcttaatttgtctattaaaatccatgatactatttttatttgtactttataaattacagaatgaattaatacgtaaactaccttagtctttgtcaaaattgatataaagcaatatattttattcaaaaaaaataatagtttagaagatatttcatccactataaatctatatgtctttcgacgaaaaaaacaaatttttgcctttcataatatctatcaaatgaatcttttttatcatatttaaattctttctgttgtactttatataactactacaaaattgacatagtttgaattaaagcggataatcgactttttaactgatattatttgagttttgctttgctaaaatcatatactatatttaggaagaattgttagaaatgcacattttccattaccacttttcaaaaatgtcatctctctaaaacatttatcaaaaatatctttaaaatctgaaatatacctaaataagtgtaactttataagaaaacttaaacaaactacttttatacgtttgtaaaactttataaatttttggatggagtctctgaatagtcgttaccattttgaagtagtattaaagaacttttttttctttgaaaaatcctttaaacagtgttattaaaattccttgatgtcaatagtctttaaactgtgttattaaaattcaaccattcaccgttttgcaaagaaaagtatatagaatatgtattctcttttgttttgacatcaatttggttatacttatcttcagctgccggtttgaattgtactccaaacacaattataaatctcaccattttttattatacacactttattcttgtctctatagttccacatctcaatctagctctcttctctatctttctctaaatcatgggtcttcctgaagatttcatcaccgagcttcagattccaagttacatattaaagatactttacgtcatcggtttctttagagacatcgtcgatgctctttgtccttacattggtctacctcgttttctagaccacaacgagacctctgcacccgatctgacccgacacgctctctctacgtcagcgagtcttgctaacgagttgatcccggtggttcggttctcggatcttccgaccgatccggaagattgttgtacggtttgtttgtcagattttgagtccgacgataaggttaggcagctacccaagtgtggacacgtgtttcatcattattgtttagaccgttggatcgttgactacaacaagatgaaatgtccggtttgtcggcaccggttcttaccgaaagaaaagtacacgcaatctgattggggttctggttcagattggtttagtgatgaagtggaaagtaccaactaattggtttaatctatgtcggcagaatatttgttgtatcaattccagtataactctatgtatattaacatagatcatctttttgaaggaacaacactatatatatctttatacaaaaacaacactatatctaaggatgtcaaaatggataacccaactcaacttaactcataatcaaatgagtttagggttaaatgagttatgggttgacccaactcattttgttaaatgggttgggtcaacccataacttatttaatttgatgagttgagttgttaaatgggttaacctatttaaatagtaatttaattaattattattataaaataataataaataattatcaatattaattcattatcatcaaacttaggatatttaccgattccactttttacggatttacgttttcgacgagaaaatcacgggtttacgtttttggcggaaaaattatggatttacgtttttggcaggaaaatctcgggtttacgtttttggcgggaaaatctcgggtttacgtttttggcggaaaaatcacgggtttatgtttttttggtgaaaaaattacgagtttactttttctcaatttcatcgtttgtatatttaagaaatttggaaaaatattaattttattaaattggtttagatgtgttgattaaacttaaattgacattggtttagagattttagttggtttaattcaattttacaaaacttaatgggttaattgggtaaaccattgaaaccattaaccattataacccaactcattttactcatcaaaccaattgactcatcaactcatttgacccatcaactcatttgagtcaaaattttcaactcattaaggttcatgggttgagttgagttgagttgacctatgaattttgacccattttgacactcctaactatatctattatcatcagatcaatgtaccgagttataatttattttaatatattttcttgttacaaaattcattaaacatatgtttttttctgatggtttttaatactatataaactaaagaatgattaaatatgtacaactaactaggtattaaaaaacgatgttttttaaaaagaaaataataactaaatcaaagactttttatttaaaactccattttatttcaaagatattacatcttttgaagaaatgttttcatttttgatatacgaaaaataataacaatttcggaaacattttatttcgaaagaaataaaaatcgaaaataataatgatttttatttatttcatgattatatttatcagttaaatctttttatcatattaaaattacttcaacgtacttcataatatatgaatttgtcaaaaaaaaaaaaagttaataaaaaatacacatttctcatatagtatatgtacatggaaaatatggattaaagcaggatattcgacctttttacttttgttatttgtgttttgtttgctctgtttaaaacatataccatattttaatatttgctttgagttattatgtctataatttttttgaataatcaaatcaaatttaacgaatattttgccatgtcctactcctagctacagagtgtaccatttgataatgataggtaactgatatggagtatatactaaactaaattcctagtatacaagaatcttatttgttttagtaggtttcgttttttttaatcagaaaaaccaaagttaggtaaaagtttgtcaacaaatcgtggatccacgaatacatcgaatatcgtctacattcatttgaagtagtgaatgacgcaaccgttgaaattgaacagtcaagtcaagtgtacacttttgaatcttcagtcttccaatgtgtgtaaataaattttcaatactaatgatgattctgggaaggttcatgatatgcacgacttgtcaaaagctctcacattaaaatatgtaattctttttgtttcttaaagtataattgaaatatgtatgtctacatctccatatgatcaatgctttaaaccaaagaaaatcatgtttctgccaatttgtgtttggaacaaataaacctaatgaaaggttaataaaaccaatgtgtttagattttttttttccaagtaaattagtatataaaaagaatatatttatgttatgtgaataatgaatgcaatctaaaaaattactatttaaagtaggtctttttctacattttttatataattagataagacacgcctaaatagttggattgaatatataagttattgatggtgtatgaattctaaaaagtaatctgtattttcttaatatttaatttactaacttttttaaaaccaaattttaatcatacatatttcatatttctatacactttaacaatctattccatcataataaacttaaatttaaatctacatacttcatctaatttatttgaattttaaatactaaatagtaacacatacactttttatatttaatttaatacttttttgaaaagacaaatttcaatcttacatattctattttgcagtacaatttaactatctatttcatcataataaaatggattttaattctacacacttcctcttaatgaataagtgcttaatgttttatattaaaataatatgtatatcacattaaatctatatcttagttaatattataatagttagcatataaccaaaaaaaatccacaaaagtttttgaaaacaatcattgtttacaatataggttttctatacattgtaatctcaaaagttaattttacctcatgtcaagctaattttaaataatttaatattaataaatacaacataaataaaaacattagtagatggccaaaatataagccattttttcaaatttgtggtgttttcaattgtgactatatgtgttaaaattctttgaacaaaacattagtataattagattgatattctcatcaagtattcaaaaatccattcttattaagctcattattttgttattctgaacttcaatagtcatcttttgtttaatatctatgctaaatgatttttcaaaaaagcttcatacatgccaaatttaattgactactaaaacatgtaaaaataaattgttagtttttatttttggttaagaaaaataaaatttaaaagttttagatatagacaatatttttctattttctttttcttatttcgttcgttatatatatatttacacatatcaacatgttattgaaagaattaacatatgtcacgatcatcacgtgagttactaactttgaaaatcaagttttatacaatactagataaggcccgtctatttaggcgggtgtacctgaaatttttaaatacttgaacgggtctaaacttcaaaatctaaaaaactcgaaccagaacctgaataagtatccaaacatatctcaaatataaatatatattagttacatttatacttatatatagaaaatatttttttggatatattagttatttttgtgtatttttagatatattcaagcaaaactactcgtgttgttttgggaatttttgaaaatttcaaataatttaatagatttgcacacaaaatttgatatttcaatatataaataaactcgaacccgaacccgaacccaaactgaacccgacccgaaatcttaaattacctgaacgggtcctaaacttctaaacccgaaaacccgaacccgaaatacccgatccgaatacccaaacgcctaggcttaataattaatagaaaaaacagaaatccacaaaaatatttagaaaccaaacaatgttgaaaatatattttctatatatgccgtaatctcgtaaattaattttacatcatgcaaattaatattaaatgagttaaaattaataaataaaaataattgaaaagttaaattttataagctaagctatttttctcaaaatgttctattttcacttatgattacatgagttaaagacaaatttgttaattttctttttgttgaataaatgttaattgtttataaatatatagacatataaattagtatatgtaaatttgtttactttctaagattttctatttttttagagaataaaaaagttaaattttgaatgacacatgtaaacatctgatcgtttgacttgacacgtggcacgatcgtatgagttagcaactttgaaaaccatactttatataaaaagataattgtataatttcttaaatctttttaaaattctaaggaaaaagtaatttctttttctatagaattattacctttaatttatattttatttaataagatatatatagtttatttactttttaaaatttattttctataaaatatatatgtataatttccttataatttttattctaaataaataaaaggaaatttttgtttgacatgcacatgtcaaattctgagactgttaaagttgacacgtgtcatgatctggtgaattactaacttttcgaaaaccgtactttatataataaaatgatatcaatgtaagagttatttagtttaggactatatatatataaattttaaagaaaatttttcattaacctttctcctttctttatttaacttttctttgtacttaataaaaccctaataaactatctttttctatcatattaaactgttatagggacaatccacttgcttaagataattaactcacatgtttaagtaggacttgactacgagttcgattctttggtttaattcggttcagttgaattatttttggtttgattcagatactttgaatgaaaatcgacaaataatcaaacttcacttgatattagtttgattctgaacacttaacccaacatatcaaaaataaaccaaaataatcaaatatccaaataaaattgacaaaaatgtattgagccagaataaacaaaatctaatagaccaaaaaataaattgtgttcgaaattagatcaaaatgtattgggcttagttgtaggtttgtagaaggctaaccaattttttttggctttgtatggatactctcgtactcatggatatcagataataaccaaactgaagtgactgatatccaatcattcaatgggtaaatgtgactaagaccatgtactaagataatacatttagagtatcaagagatataaataattttttaatagatcagacaaggcctgatcctgtatcagtgcaatgattcttttgatatccagtatcagttgatatggagtctcatgattcgtatgtaaaactcgttttttcctgaaagcaaaaaaaaaaaaaaattccattattctctccgatagtctttctactattttagctaactaactatatttttcgcgagtgagtaattttgcaggcttttcgtgattatgcgacataattttgcagtaattttgtaatcttatgtttttatatatttattttttgattttgcaaataattttttttttaatgatatcaatatcggtctcaccactagaaacatatttattaccagtatcataaaaaatctcaaacaataaataaacattaaaaatactaaaaaaatgatacatataaagtatcaactatgttcatgctctaagagcatgtcaatcagtgtttctaatgggttactaatttgaaatcctaaagaataaaagtccaaaattaaagaaaaacccaaccaaattattaggagcggtcctaattttagttttttttataagtgtttagaaacgcagacgtagctgcttctgattgggtgaaaatttagacaaaaaaaatctgcttcgttcctcttctcctatccgactctattcttttgttactctgacaatgaaatcaggcgaaactcgttgctatgaaatacattgagagaggtcgtaaggtttgatcttttcctctttagtttctcagaaaaagttttgaactttctttgatttgttagaaattaggtaaaaagtctgcaacttttgggatgattgaggtttaagagttgagattttgatggtattgcagattgatgagaatgtggcgagagaaattatcaatcatagatcccttaggcatcttaatatcattcgattcaaggaggtttgttgctttgttgcataatcttttagtactttaattgagattaagaaacttaaaaaacagagtaaatttgttggtggttctaactccaactcatcttgcaattgaaatggagtatgcttctagaggagagctctttgaaagaatctgtaatgctagtagattcagtgaagctgaggtttgataaatgctttctaacttagttcttattggattttttgacaaatttttgattatatatttttccatcttgctatttttctcaagctagatatttctttcagcagctgatttgtggcgtggactactgtcattcactggtatttttatttacataacttaagcaaatctccatgagtgtgaaaggagagtgacaaaatcaagagacaagagataaagataaggttttgtcttgatagtagctcaagtgtttctcagacacttatacaaagagaaaacatttcagacctaaggggacaaaaaggaaaaagaccaaaaggggttacaaacagtacataaagcaacattaagcttaagagcaattaattgatgtgctctaaataagataagtagcaatatcttcaacacccttcctcaagttggagcatgcatatcgaaaatgcccaacttgccaagaaagaaacgaagctcccttgcgcccaatgccttggtaaagatgtctgctagttgttgttgagaaggcacgtgagaagtggcaatgagaccggagaggatagcatcgcgaatatagtgacagtccacctcaatatgcttcgtgcattcatgttgaaccggattagcacttagagcaatagcaaatcggctgtcggagaagattgtcattggttgaggatgggagataccaagatcatgtagcaaacgtttgagccaagtcagttcttgagtaagaaaagccatcgcacgatactccgcctcagctgaagaccaattcacagtaggctgcttctttgttttccatgagataggactatcaccaagctgcacgaaataaccagtaagagagcgacgggtaagaggacaagctgcccaatcactatcgcaccaaccatggagctttaaagaggatgtgctagagagcagaatcccttgaccatgagtggattttaagaaacgaaccaccctgatggcagcgtcccagtgatcctggcgtggatgttgcataaactgagccagagtgtgaaccgaatatgatagctcaggacgggtaacagccaagtatataagtctcccgactaagcgacgataccttttaggattgggaagtaaaacagacttggataaggacagtttgtggttctgttccatcggaaaagaagaaggtctggcgcctaacagacccatttctgatataatatcgaggacatatttcctctgagacaagtagaaaccatcagcattccttgccacttcaattcccagaaaatatttcagcagacccaaatccttcatatgaaagcaagattccaaataaactttgaaacgttcaacagcgatggagcaactgcctgggatgatcaagtcatcaacatagatgagaacgtgaacacacgtcccattgttgttgtagctgaaaagagagtagtccgatagagactgtgtgaaaccatattgaatcaaagccgtggagagtttcgagaaccaacatcgcggagcctgcttcagaccatagagagatttatgtagacgacataccttagtcggatcatcagaatgaaagccctgaggcaacttcatgtatacctcctccgtcaaatctccgtgtaagaaagcattatgtacatccatttgatgtacatgccagtcacgggccgcagctactccaagaaacactcggaccgtactcatcttagcaacatgagcgaaagtctcatcatagtcaacaccctcttgctgacgatttcccaaaaccaccaaacgcgctttgtatctctctattgtcccatcagaacgatacttaatcttgtagatccatttgttgccaattgcccgcttcccagggggtaaatccacgatggagaatgtttcattggcttggagagaggtgatttcatcagacattgcatcacaccaaactttttcaatcacaactctattatacgttgtcggttccacaccagcagttacagccgcaagaaaagctttatgagccgatgagaaacggctactgtcaatatagtgctcgattggataaagagacgatgaatccgcaactacatcaggttccacggtaacagtatttgtaacaaagtgttttagagttaccggttgctgttttcggcgatgaccacggccaagcggttcagcctctgggggatttggctcagagttcaccggtgttagcgttggttccattggaagtgaaactgtggattctattggctgttgcgactcttctggtgttgtgtcgagagagacaccaactagggttgaaagagaatcatctgcgtgggcctgagtgggagataaagttgctgggccttctgaagaaacaatagtcggcccatttggtacaagagaaggaattaaacttgttgtgtttaattcctggcccatacggcccaaatcgtgatcatcttctccacgagggacttctgcaaaaggaaactctgtttccttaaagatgacatctcgagaaatcatgaacatttgatcatcgagatcaaacaaacgccatcccttttgtccatgaggatacccaacgaaaacacatcttttcgttcgagaggcaaatttgtcgcctttatgattttgattgtgggcataacacaaagatccaaaaacacgaagatgagcataattcggcgccttcttatgcagcagctcataaggagattttccttgaagaagcatcgatggagttcgatttatcaggtatgcagcagacaaaacacagtcccccccaaaattcaattggcaaatgcgattgaaaccgcaatgatctagcaatattcaagatgtgtcggtgctttcgttccatccgtccattctgatgcggagtcccaacacaagaagtttcatgatgaatcccgcgttattcaaagtaatcccgcatacacataaattctgttccattatcacttctcacagttttgacacggacattgaattgacattcaacaagagcaagaaaacttttcaaatgtttctgcgtctcactcttttcaaccatcaaatacagccacactcccctcgagaaatattccactatggttaggaaataacgagcaccagagtgagaaggagtcctatacggtccccagacatcacaatgtataagaccaaaagcttccatgcttctattatcacttagagaaaaagtttcacgagtttgtttagctctcatacatatgtcgcagacactgtccaaaaaatctctactactagacaaaaaatcagtaggaatcaagctaattgctttttatgatgcgtgtcccaaacgtttgtgccatagatcatatgaacctttgacacttgtgctcacaactgctgccaactccatacttttaaacaaaaaacttccattctctcttttaccaactccagtcaccgtcctcgtaatgcggtcctgtatcacaagaaagtgatcagcaagctgcacaacacagtaattctcatcaatcatctgtccaacagagatcaaatctgaagtcaattccttgacatagaaaacggatttcagaaccaaactggaaccaaggcgcactgttccttcactcacagcaactcgcttattcccatcagccaatataatcaaaaccggagagatcttgcgcatatcagtcaacagatgtaactttccagtcatatggtgagctgcacctatatctaggatccaagaagagaaattagaacacgtacccgttagagtctcatgtccttgttcgttgggtttgatgttggcttcatcactttttccagcgttcaagagcttgagtacaccacgccactgctcatctgtaagaccattcaccgcatctcgatctctatcagtgataactcgattagcccgttccacagtggttaagccagttgtgacagcattcacataagaggttggagtgcgattttgtcctccattaaagcctagaccgggtttgcctctgcctcgaccagattgtcctcgcggtctatcgccccaccactctgggtatccaatgatcacaaagcagttctccggcgagtgaccgccacgattgcagtgcttacaaacgttcttgttggggaactttgcagaactaggatcaatctgtggacgagactgagtagcaaaagcagtgacatctagcttttcttccttagagtatctattgctcaacatgtcctcttcttgtctcacaatgttgtagacttcttcgagtccaggaagaggaacacgtgatgttaagctagaccgaattgtatgaaattgagtttcatcaagtccatacagaaattgttgaaccatgtcatcttctctacctttctcctgctcagcttcaagattacacacacatcttccacatttgcaggttcgaagaggacgatagttgttgatattatcccaaatcttgttgagttttccataatatccttcaacagtcataccctcttgtttacaagtagcaagatctgccttcatcttctgattctttggaccactagaaacagagaagcgtttacgagtgtgttcccaaagatctctagccacgtcacggtgggagatattcgtcaagagcgccgggtcaatcgtcatcttcatccaagacactagcaaagcattaatcgttaaccagtcctcgaggtccagagattctgacggcggttgtggaatggagccgtcaagaaaaccaaacttcttccgtgagcgcagtgctgttttgaagccacatgcccattcatcataattagtcgacttcaagatcgggtgggagatcacagctccagagttatcagcgaccgttaagtcatacggcgagatcgttcgccggacttcagttacaagaggaattaccggaggagcagccattactccaaaagaaactcaaactttatcgatttcaaatgaaaaaccccagctttagctctgataccatgacaaaatcaagagacaagagataaagataaggttttgtcttgatagcagcttaagtgtttctcagacacttatacaaagagaaagcgtttcagacctaaagggacaagaagggaaaagaccaaaaggggttacaaacagtacataaagcaacattaagcttaagagcaactaattgatgtgctctaaataagataagtagcaatatcttcaacagagagatctttgcttcgttttgttaatctttttgttgggtttgatttggtctttggttagttgcagagtgggaataagctccgcgtgttttggtgtcaacttgttgtcctagtttttagttttgtttcagttagttcctgcaatttctctttcacgtatttgtaagaagactgagtcttcatctttaggctatttaaagccaaacaactatgataataaaacatcgaagcattcagttttagtctctttgttctctcagatcaacacttttgtatgtttatgtagcaaatatgtcatagagatttgaagattgagaaaacactgcttgatggtagtcttgcaccgcttttgaaaatctgtgattacttggctttgatctcataggtcattcattcattagtctctttttcttcttttgtttcagttttggttcccattattacttggctttgatctcataagttttttttttaaggaaacccatttaaggattctacctttggagaagagaatttataaaaacttgacaaaaactctaaccttcaaaattattaatatttgttattaagaaatttaaaggattccttataaaaaacccaccaatggatttgctttaagatccattaagatacttattggaacctggaaccaaatcaaaactcttttttttttttttggttcggttcggttcagttccagttttatggcaaaacctaagtttaggggtaaattggaaaatattcaaaagttttagccaaatatcaaagtttttactaattatcaaaagacacactcgagaaattcataaatgggctaacttttatcagagagcccactaaacaatcggcccgttagccaagaaaatcgtcaccggcgtcttccattccaacatttctccgtcatcgtctctctctctcttttttttttgtgtgtgcaaaacgtctctctctctgtctcataaaatctcagagaagaaacatcgtcgggtcaggtcgaagaaaggagagaaatgagtggtcacgattcgaaatacttctccacgacgaagaagggagagatccctgagctcaaggaagagcttaattcccagtataaggttttttttttcttcttaatcttactcttgtctcattccatgtggatctgtgatccgccattattacattcacgatctctcggtcgatgatccttctctccttgtaatttagttatccttatacaaattttggtagatctgtgtagttctggattttgaattttgaattgaaattggtttcgtgattttgtgggaagtgcgatgattccgttcatttttcagtaactgattgggatataggttagaattggagaggaattggtaggtttttgagaatggctaatgtggagatgtgtgtgcaatctcgtagtaactttagtgaagcttaggttggtgaatcagaacttgttcgatctggatcagtggatttggatgaagagtttatgttaatgatttaagaaggaatggttcttttctgctttggctacagttttgttaacccttgttgtttatttactgttgcataggataagagaaaagatgcagttaagaaggttattgcggcgatgactgttggaaaggatgtttcatcacttttcactgatgtagtcaattgtatgcaaacggaaaatttggagttgaagaagcttgtttacttgtatctcataaattatgcgaaaagccagccagatcttgctattcttgcagtaaatacctttgtaaaggtaacactcaagcaactcaaacaaaaccacgtggcattcctttgttctgttctgaacctgaaggggaaaggaactgataaactgatcattacaaaatcattggtttgtattctgcaggattcacaggatccaaatccgctgattcgtgctttggctgtgcggacaatgggctgcattcgtgttgataaaatcacagaatatctatgtgatcctcttcaaaagtgcctaaaggtttgagtttctaatgttacatcttcattggaatctgatatcaaacatctttattgcccttaagaacctgtttcatcttgactagtccatcttttcactatcctgtgtatattttttgtgtttaggatgatgacccatatgtcaggaagactgcggctatttgcgtcgctaagcttttcgacataaatgctgaattagttgaggacagaggtttccttgaagccttgaaggatttgatatcagataacaatccaatggttgttgccaatgctgtagcagcccttgcggagattcaagagaacagtagtagccccatctttgagatcaatagtaccactcttacaaagctccttactgctctaaatgaatgcactgagtaagtcctctccatttccgtagtttcactgcattctgttcgattttgagtatttatggccccattgtccagtcagggtttaggggatgttgatggttgtgaaatagcttgtttgatgtggtatggcctctgtttggatatcattccgttgtctttgtaactattttcaaacagcagtttagaatttttcgtcattgatggttttatctgtagataatgacccagtatataaactttggggaagagaagcataaaatgagtaatggataagcttttggtagcttcatttttagtactgaccatgatcatcgcaggtggggtcaagtttttatactagatgctttatcgaagtataaagcagctgatccccgtgaggctgaaaatattgttgagagagtaacaccaaggttgcaacatgccaactgcgctgttgttctttcagctgttaaggtgagcgactttcattgattgttatcctctctacttctagttggtagctcgtcaaacttgattgtaaaacatcaggcatcatcaaatgcctttgcatattttcctattgcgttctcacttctgtttcatatttggtaattgcctgacagatgatccttcaacaaatggaacttattactagtacagacgtgattagaaatctttgtaagaagatggctccaccccttgttacattgctttctgccgaacctgagatacaatatgttgcacttcgtaacattaatcttattgtgcaaaaacgacccactatccttgcccatgaaattaaggtagcatgacctgtgtctcatagttcctcagaataaacaactgatgtatccgtgcatttattgattatgttgaaagtgatattctttttgttttaggttttcttctgcaagtataacgacccaatttatgttaagatggagaagttggagattatgattaaacttgcctctgacagaaacatagaccaggtatcctcactgagctctaccatctgctgtgtgtcttgattattattggtgcatatctttatgatttttgaaaattgctactctaggttcttctggaattcaaagagtatgccacagaagtagacgttgattttgttagaaaggctgttcgtgcgataggccgatgtgctatcaaactagagagagcagctgaacggtgcatcagtgttttgctcgagttgatcaagattaaagtgaattatgttgtccaggaggccattattgtcatcaaagatatcttcagaagatatccaaacacgtaagttgacatttctcaatcactgttgaaatggcatcttaaaactcttctttgattttggttatgctattcaaatatttcatacaggtatgagtccataattgcaacactctgtgagagtttagacactttggatgaaccagaagctaaggtattgaacttttttgattttggtttggaaaattgaaatttaccatcttcatttaatcttaaatcactgaattcggtatcttttggtaacttgaaaggcatctatgatatggatcattggtgaatatgctgaaagaattgacaatgccgatgagcttcttgaaagctttctggagaattttcctgaggaaccagcacaggtccagttgcagctcctaactgctactgttaagctattcctgaagaagccaactgaaggccctcaacaaatgattcaggttcggctttttccttgctcaccactgtttttatgatcgattcatgagcatgtatgtaatgacaggcatgttttccgttatgcttgatgttttcaggttgtcttgaataatgctactgtggagacggataatcctgatctcagagatcgtgcatacatatactggcgtcttctatccactgatcctgaggtgtgtgttaccttgatttcttatagctttctagtaatcaaccagtagagaatgaatatattcaggattggttattcaagcaacaagcaatttttatcagttgagctttctcttgagatgtatttggctgaactcatcatttctcttgattaggctgccaaggatgttgtcttagctgaaaagcccgtgatttctgacgactcaaaccagctagacccatcacttcttgatgagcttcttacaaatatttcgaccttgtcctctgtgtaccacaaacccccagaggcttttgttacccgcttgaaaacgacagttcagaaaacagaagacgaggactttgcggaaggaagcgaagcaggatactcatctagtaatccggttgatagtgcagcttctcctccaggtaatatcccacagccttccggaagacaaccagcaccagcggtcccagctcctgtacctgatctgctaggtgacctgatgggattggataatgccgctattgtcccggttgatgatcccataactcaatctgggtgagttatgtcttgattaatgaaactttctattgttgggactagtttattacgttaggtcaatttcggttgcctagttcatactgaaactcatcaaatcttatgaacttgatcgtagtcctcctctgcccgttgtcgtcccagcttcaagtggtcaaggtctgcagataagcgctcaattatcccgaaaagatggacaagtattttacagtatgctcttcgagaacaactcgcagtcggttcttgatggtttcatgattcagttcaacaaaaacacattcggccttgcagctgctggatctcttcaggtaactctatctgaatctaattaacgtctgaaactcaggtctgaatcattgaaaccaatatccatgtctgtactgtttcagattccgcctttgcatcccgcaacatccgccaggacaatgctacctatggtcttgttccaaaacatgtctgctgggcctccaagctcgctcttacaagtcgctgtcaaaaacaaccagcagcccgtgtggtacttcaccgataagattatacttcatgctcttttcggtgaagacggtagaatggaacgtggaaccttccttgaggtaacatacttcaaaacttgagctgttcatatcggttctggtttaggaaaatagtgacgactgtgaaaccaaatcggttagagataaatttatacggtttgggttttcatttggatatatctttatgttttcaaagattttaagtttttgtttgctttttaatcagacatggaggtcgttaccggactcaaatgaagtcctgaaagaattccccgggatcaccatcacgagcgtcgaatcaactatcgaattgctcacagcattcaacatgttctttatagcaaagcgcaagaacgggaaccaagacgtgatctacttatcagccaaagatccacgagatgtaccgtttttgatcgagctcactgcaatggtgggccaaccaggtctcaaatgcgcagtgaaaactcccactcccgagattgcgcctctcttcttcgaagctttggagcttctcttcaaggcttgatgattaacgttgttatcaaaaggctaataagaccaagacctgaaaggtttcagagattctttcttgtttcgttatatcccaccttttttcttcttctgagtttagtgtatgtaataaatcccatgtttgtgttacttccggttgcacccttttagtttggtatttgtaatgctcactattttcttataattcttgtatcggaaccacattttttttctttcgatatttaatccgggaaatgctggtttctgaactaataaggaagatcaaacaccatcaaaggaccagatcaccatggaaaatcagtgatctagctacattggagccgttgatgatgctagtgatggacaatgccaaaactttcaaacatttcttttaggtgataggtacacttggggctagagaccaaagacggttattcttgtattttaaaatcagaattgctatcagaagcatgtgttttgtcatgcagtgtgcaatttggagtttctttcaggatatgctagccacactaagtttgcatcagagtgaaacatagtagtatccttttagaaagtaaggcatcggctcttaagttaaacacaatttggatagacatatgtggacatgcaaaagttatcgtgggaggagtgttgggaaacatatctccacctatatcgtttggtccaggtactatagttttgaagaagattataagaacaaagataaaagaataactctcttttcttaactccattcactaattgtactagaatgacaagcaaagcaagtataaaaagaggtttccactattaaaaaaaaagagatattttttttcaccttcacttgtaaaagtgaacagagatttgagcatcattgtattgagaaaggagttgcatcaatcatagacaaaatcaaaacagaggtaagacagctaatgcaaaagctgatacttgcttaagctgttagaccaactgtgacactggaattaatctactgtgaacgtggaagtggacactgatgaacatcaactagagtgattcgacatgaaggaacgaatgcaaaattcaaaacttaaccaacacatacacgtaattaattagctaatgtaaaaactagtacatcgttaacatgttacaacaattgtacaccagctactggtctccgtgcaatgaggacacttgatggtattagactccatttgatggctgtattgggctaaaatacaatacaaggtcatcgaagtgcttttttttttttggaatgaataagtcattgaagtgatagcttgagccttgatgattttttttttttccatttttttcgtcaactaaggattctttatcttcataactaaccgtgacctcaaagccactaacatactcgttgatgctaataattaagacaacaaaactgagactttgattagtggggcatatataaattgtaaatggtactttcttacatgtataaccatttatttattaggggtcctgtctttttgttcttatcaacggctagtgacttttaaaattgtttttttcatgatagttttagttattttgtgtgcttaatttagttatagaactattataaaaactaatatatataattgttattgaccaagttatgtaagagcatctttaagcgtaaacattgacttttaattagagagagatatagacttgaaaggagcataccgttgagatctcagattcttcttcttcttcttcttcttcttcttcttcttcttcttcttcttcttcttcttcttcttcttctcaatcttgtagtaggcgaccatggaatcagagggagtgtcactaccgttgatccacaagcatgtcatgatgccttctcatgatcagcggaaaggtgattgttgtggacgctcagaatttaccagtggtggatattactgcgaaatctgtgacttctttgttcataggaaatgtgttgacgagtcctctgaatatattaaacacacatctcactctgttcacactcttaagcttcaatgtaaaccacaccatatatgtaatttatgtggcaagagcatcaaggatctattctatcgttgtgagatatgtgacttcgatgtggatctatactgtgcaaagtacccaccaccagaggttattgatatttccgagacgcatcaccacaagctcacccttttcaagaagcggaccttggtcgattgtggtgccagcaaatgtggggaggttatgtatgggtttccttacaaatgccatgaatgtaatttagccttccatgtggattgcgtatggaat

SEQ ID NO: 569 - DNA, 87104 bp, Arabidopsis thaliana
aagcttctctatgtttggcatcctgagaaacaaaacaaacaaatgagatcctcctcttgtatacgactttaactatgattcattaaataaaagatgaaagttacctctcagcagcaaacatgagatcctctgtttgtacataggaattgaagtgaaagaacaaattcttcgggttcatgcggctcaaacggaggttgagatcaccaagctgagccgcatgaacctggagaatttgttctttgttgacgttttcaaaacatgaacataattttatcaaatgaaacatatagtaacatacacatcttatatatagcagtgtttttatatgtaagaggcacatatataagaaaaatattgcttgtgaaatagaatcggtaacgttttctgaaaaaacagccaacaaatcttttcagaaatatcagaattcaagttcctttatctcatcattccgccaaacctcagcgagataagacaatgagtagcgacaacgatctttgcaaatcatacaatcgtgaggacatgtgataaatttctcaagcttctgagtggcggctgttataacataattgtctatagatttcgctataggaagaaaataatcatacgggtttttgcaatgtgaaacattaagaatcgtgaggtttggaaggccggtgataaacctgtaaactgctatagaactgaccaaaaagcatcgtaaactcaacctcttgaggctatggaggtaagacactatttccctggacgtgtattcttccaaacgacccaaatattttaagttggttaggttactacagctctcccccacagctttaaagtcgaatctcccgctgaaagagtgttcatgagcgatgatcaatgttttaagattcttccattgactgaatgcaaaccgcaatgacttctcgttttgatagcaccagattggtaaagcaagtttctctatatttggcatcctgagaaacaaaacaaaaccaaaaaaaacaaaattgtatgagaggcacgtcattcaagaaaatctgactagatggttggtgaggtttacttctcagcagcgaacttgagaccattttcctgtatataggaattgaagttaaagaacaaattcttgggggccatgcggctcaacttgctgatctcaactaatagattcatgagacttatgctgccttctacttcaaaaaagtcaagaaagaaccgagagatgatcttagtcaaaagattcgtaaggccatgtttatggtcaaccgggtgcttgtaaaagaaaattggtctttctttatccttaaagttgaaaatgcgggagacatctaactcttggagattggtgaggtcgaccgtgttccacagagttttattgtgagaagcaaggaaccaagagatgcagacacgtgaagctcccatggtaatgtccatcacgtcgagcttattgaaaataagttcaagtatgtctttgtttagatctgcccattctgaaacttctcctgaagtactttctaccttcgtcatcacgttactactacatacagaaacaagagataaaaaggttgaaaacattgaatacaaatcttgttgaagagaaagagaggattttcattatcaaacaaaagaagagtaagtcaatggtaataacatatagaagcaatacattgtagtgtcttgcaagataatgctacagaagttccagtattacatatttacaacaccagaacagcaacactacttctgtagttctactcctcttttgtttagttttgtgctataaagaaatagaagtaaacaaccaatggtgctacaactatgttatggtaaaaaggatctaattaaggttcgaatagtctgtgcttgtaagcactcactattcggtcatgatttgagattcaattgtaagcaacttatctacttagaaaaggtattgtaaaatcctttctccgaaaacaataacaaacagaacaccaattcaagcaaagcatcatacaaggcaatatattcaaacgaaaataataaatgaataggaatgattcacaatctatagcaaggagatggaattaaagaactaccttgcttaggtcttaggtcatgttcgtggagagttgtggctaagaggataactagggttttttcgttttgccaaaaaagttaaaaataccgaaaatatcccacgcttccgagttattaatcatactatatgggcctattggcaactacttggtcagttacttgttcggaccaaggcgggtcacaagtacttaaaaaatattaagtactcgccttgtgcgcagggctattgttgcctctctatttcaacttataaagaacaggaaacgtagagatatttagggtttctctaaacaagagtgagcggtcaggaccatgacgacaagtcaattcaagaagagtaaattaatagagaacaattctcagtctcttgaaatcttaaaagagaagaacttcaatgatgttcctttggacgtagccatagagatatttatgagattgcctgtgaaatccgtagctaggtttctcctactctcaaagttttgggccgaaattatccgaagtagacatttcatcacgtctttccaggttaggtcttcgttgcagccgcgtctactagtcgtgtttattgatttaaataaacaatggaactgcgaagattggtacttcttctcgctctcttcatcaacaacgtcttatctatcacgtgttacatgtccctttccagattatgtgcactattctcattatgttaatggcttgataagccatggatatggtctagagaaattcataactaaccctagcaccggtaaatccacagttttagggagagtccaaaccaatagtaaggttgcgcaatgttttttggggtatgatccggttaatgatgaatacaaactattggtattgtgcatgaaggaaaaaatgcaacgtcatgacggtcgaactcgaatattacaactatcatctcaacatcaagtattcccattgggagttaaaaagaaaccatggagaatgattgattatacaactcctcacggtcctgtgctgaacagtgtgtgcatagatggtgttttatattatgttgcttttacgggcgaagatttgtcacagctgagcttaatgagattcgatttggggtctgaaaagttggatctttttactagtttacccgcggactttccagctgcatttctacatggtttcactttgatgaggtacaaggggaaagtagccttagccactaaaactttatttattggtattgaagtgtgggttttggatcagcaagccgaaattcatggatggttgaagaaaagtttcagtatcaaaggtgttaggaggtggttattttgtgatttatttatcacaggcactactcatacaggtgagtttattttggcaccacggttctattctaatagcttttatgttatctattacaatcccgacacgaaaagtttaagaaaaaccaaggttgaagtacacggaggctatgacttcaagcatcgggaaacaaaagcaatggtttttccggattatgtagagactgttcggttgttgtaggagacacagtttcatgctttggtaacaaagactgatccaaattgtaaggtaacgggaaatctgatatttagatctacgattattacatagtttggccgctaaaaaacggattataattgtacgcggtcccaaaggcacacactcacgaactcagcttactacacagtattggtaatacaatactaatgagcttttatttgtctaattatgcaatcttgccttgcttaagcagtaactcccaacaacttcttcacatccttctgcaattgcgaaacaacgatttgacaagcaattagaaactttgtggctctaaacaaaactcaagcttttgatgattacatgtgatagagacattacctcaatgctgagaggtgaggtagttggtgcgaaacgatcgacaacatttccatctttgtcaaccaagaactttgcgaagttccacttaatgccgtctccaaagagcccgcctttgcttgatttcagaaacttgtagactggggcagctttgtcaccgttaacatcaacctgcattacatagtgcaaaggtagaatcaactccaagtagagaacttatactcaaaacgaaacattatctgaaaatgagtcactgatactcagactacatcatccaattccaaaaattattcagtgatgctctaagagctagcaacattctcacatatcttcgtctcgtgtgtcaagaaaagttgttaccttgtcgaaaatcgggtactcagccttgaaacgagtacaagcaaactgaacaatctcttcattagtaccaggctcttgattcccaaactggttacacggaaacgcaagaatctcgaaacctaaatcaaaaattgcaaccatcaacaataacaaacacgatgataaaccatgatcacaaacaaacatgaaacaactagtaacaaaattatataccatggcctttgtacttctcatacagctgcgcaagctcagtataattcgaattagtcaagccactgcagaagaatcaaatcaccaaagaaactaagtcactaaaaccaatgaatctatgatcacatctaaacgttacaaaatcgaaatcttaccattgagaagcaacgttcacaatcaaaagaaccttccctttgtagatgcttagatcaacatcgtttcccttagcatcctgatccaataaatcaatcaataccaaatcccaaatccgatcaacaaattcaaatttccgaaatagtcaaagattaaactcagagaatcaaacgtaatcaaatcgcaagagaatcaaagaaaaggatcatttgaatcgaaccttgacggtgaaatcgtaaagagatttgggttcggaagaagcagccattgaatgctccgatctagatagtttagctcccgttgtagaaattggaagagaaataatccgatgagaattgaaaagtggtttcgcagaatcgaatcgttttgatgatgatgatgatgatgatgatgataaacttcgaagcagaggactggttcttcttatatagagaagtcgaattgaggagcgaagcatttgcaaaagaagattcttttctcacaaaattagatatttattttggttggagtcaaaatatcattttagtttcttgatccgtgttcagtggttggagaatggaatagacacgtggatgtttaagagaaagccacgttggagaatcgtcggaacactcggtgtgcttacgtcatcagttgcgttttttgtggcggcataatgtgaacgttactactgccttttggattttttctcatactgggcctaaatttagcccatacattttatgaacgaattatgtaaattcttttatgatcgaataagtgcgaaattgaaatatgcttcacaatctggatttggagttctctttttttttttttcttttttttttttgtcaaaattacctagattgacacaaatatagccaataataactagaatgactctctatttgattagagaattagattgacacaattttggtgtataatgaccaaaaaaccttggtctgtattttttttgaaatttttaacatctgatattaaaaaaataatgtaaaatgaaattaaaaataaaataaaaacaaataagtaaggaaaaatttaaaaaaatatcgctcaaaattctgagtttataggtttcatatttttttaacccacacacatacgaggaaaagagatgaaacaatatattgcttccactactccaaaaactgaaaagagatttccaaaggaaaaaaaaagataaacaaaagaaagaaaggaggccacatattttttgtaaggagactaagtttttgtaaccaaaaccctagttgtatctcgatattaatattttttatgagttaaatattgtaactaattttagtaaatcagtcataacaagctaaaatgaaaaaaaaactgtcacaacagttagtattattctactacaaaaaattatggaacaagaaaactaaaaatcagtcaccataagaattcctaattacaaatctgtcgtaacataaaatatttttaaggtcatttcagcaatttattttcttatttattaaacctgccatcaaacgatagatttatggtaatataaatttatctgtcacaacataaaacaactctgtcataacacaaaacatcatattttagaaaataaatctgccaacaaacgacagatattgtgtaagattacataaatctgttataacttaaaacaagtctgtcataacattaaaaaaaattggttatcgttagacgtcattctagtaattaattttttgacaacaaatctgttacaatgtgacagatttgtttaacaaaatcataaatctgccatcacttaccgtgaaaatacaacgacaaaaaaataagtctataaaattatataaaagtttgtggttgaataaaataaaaatctgtcaatcaaattaaatcagctataatttataaatctgtcatcactatcttctaaaaagtctgtcaaccaaaagagtctgccatagaaaatctgtcgcagttaaaaaagtctgcggaataagaataaatctgccgtaattaaacgatagacttttataaaattgctggaattttttttaaagggtatttttgtatttattttatttttaacacatatgtcggcaaggaaaacaatccttcccaaaattaagccggcgagcaaacaatatctctcgggaataaaaacatatcgaaaatgaaaaaaaaactcaaaaataaagaaaaacattgatactaaatctaaacttctcaaactcattactaaaagaactcaaaaacaaagtacaaagtataaatccaagttaaattaaaaacagatctaagactagagatctatccaaaggaaataaaactaagactttccttaccaccaacggcagtgagacatcaatcaacactcccgagattcaaaggaaaaagtctcatgaagaaaggaaggagaccaagagcttcaatattgagaaatatgcatctgaggcattgaaggatcagaaagaactgtctctgtcatggttggaacgaccagaactgaaactgcagatgaaggagacaaaacaagcagcaaatccggtagaagaaggatttagactttataaatctagatctgagaatttagatctgaaaccgttggaagaaaagcaggattcaaatcacatcaaacccaaaagaaatcgaaactagagagactaaaacaaagaaaactcggttggtgctgaaaaagccaacggaaccagtaaccctaaacggcggcggtagagatttttgtagagagaagggatatctttattttaagagaaagaaagagtgatttcctttcttgtttttttttgtgagtgtgaatcttttggattcagagttctctagctaacagaatctagaagctcacaaaaagaaaaaaaaaattgaatctaaaagaaatttcatttctagtttataccaaattgggaattttggactcactgatcctttctctgattttcttagaggtatttttgaaaaggaaacactaatgaataccatccaaaatattataacgttttcaaatgaaaaaaaaattgtagataaaacaaatccagattacaaatagtaacataagtctatatccgacaatcacataaaatactccagccaatataagctagagcatactatccgttcgagcaggcaaccggcgaaagaagttaactggaacagaaggaagccgatgtcggaacctcggatgcctcatcgtgaagaatccagccaatgctacaacaatctgaatcggtgttatgaagaaaactatggccgcaataaagcacaatataacaaatatcgcggtagcgcgtggatctctccagcttaaaagtgcttgaaaacgttctccttgtgttgcaagatctccgatcacggtctgaatcctcccggccacgcttctaagccggtcataccttaaacgcaccatgtcagggtttctagtggttggaaacgtatcaaactcttcatcaagctcgtctggatggaccgcctcggcttgagagatttttgtgttcatgtgtggtggataacgtggtctaaaccggtagttccagagcccgatcaaaaacatgtagagaaacattgttggtaagatcagttctgggagacaaacaagcatcaaaaacagaacatgaacaagaacggtcgtgatcgggtttcgccacgagcaaatgtccgagaaccattttccaaccgcgataacaccggagaaaactgtcatcatccggaagaaattagctttgctcttacgcatactccacaaatgcgaatccgtgtccgacataaactcaatgatctctttcctcaggggaggctctgctctacctaaccgcgcagccactatattcaccgcttgatgtcgaagcatgtcctgctgcattactgaaaacggtctaacataatgcattttaggcaaaagtggttttgagtattggtaaagcatgtttgcgaacgagatgcatgtgaacctcacggccatatgtagctcgcccattttcttcaccccagtagggtgaagaacaagtagcgggtaagaatgtgtgtagatccgtccagtctctaaagtagataaccttatacgaatcttcccaatcttcacatctctatttcctttttcacctagctgtccgttatcaaacacaccaacggttaaaaccgtcgctgggtcaaagacttcccatgtatactgctcgttatacttgggacacaagttatccaccattgtccttgttctaacccacttttgtccatatttcccaacgcaaaaagtgtcagaggttcctctgccttctctagttttcattgggtgaagtccaacagcgtttaagatcccgagctcaagaactccgatcggttgtctccagagtggtctagcggatgggcggagatcgctgctgtaatgagttgactcatccaaaacatggtatcctccttcaagacaaactcgcagatgaatcctcatagagaatttttctctcttgagctgatccacatctacaataaccggtctctccagattatacctatcaaaacacatttctatcaaaacctttaagttttatatattatgaatctagtatcataagtagaagcagtaccatcgcgcatgtatcatatgatcatcagctcgcttctctaccgtgttcaaaggaatgtaagtacgaccaactatctcgtcctttcctggagcaacccggtcctcgacggtgagaactaaatggtcttcaaatggctccgcaacaacaaacaaaaagtcttcgttccatacggcaccaagggttcgagcttggcatggtctggtcttcatgacttggtttcctagctgcgccttgacgtaaacatcagggaacctagttttgtctgtcggaatcaagtcttgtgcttcgatcacgttcacacggacgtaccatagacgaggcgcatgatagacctattttaaaacaaaacacaataaagaatcaaattatttgcttaaagcaacgtgacatcaataaataatattttaaacatattttacatctaatatttagaagaaagaaattaaacattactattttttcatacataaaaatatcaaacattacatttttttttattgctaagaggtttggtgttacactcacagttcacactaaacattttggggttttatttgaatgtaaacgttaagtacaaacaaatttaaaccggggaaaaaaacaatccaagtcatactgtacctttgagcggagaacggcggagatagctggagaacaatcaacgggcattgcagcatcagaatgccaagcatcagagaaagcttcatcagcttgtgtaccgatccaaacagcaagcataagctcacctttgatcttctctcctttcttgtcctctaatctataccattgcggagcaagagggctgtctggtggcacacgaagagggacatcattaatgtcaaacctaacaaacccgacataatcgtcttttaaaagatctttgtccttaaccactacttccaacaccgaggcttgcattcgctctttcgcgaatgcaaacacttggttccattccggatgttgtctcttctcaaaatgtcttgtgattcctttgtagttccccactctcacctacaaaacaaaaccttttttataaaaaaattcttgatttgaatcaaatgttttattaagacattacttaattaattacctcgacgaatggatcaacacttcctgttatatccattataggaagctcacgagctttgacaacgcggacataaaggaaatacattctctcgacaagatcataagtactcgtagcggttttgtctttgtgtataacacgcccaccaacgactcttccaccaccgagatgcgggcttgtctccttaagcgcgaaatcagcaggctgagccgaagcaatggaatgcgcatggactagcttcgagggccgcgctggttcggatctcatctcgtctacttgatgctttggtacgtaatggtgatgatgttcgttatgattatcttgttcagcggctaaggaagaggattggttaggcccttgtggatgttggtgttgatgttcttgagcactgtttgggagattgtaaaacacatgtcgtttgtcggatctatgttctacattcattgctgacattgttacatatacaaaaccaattccaagtaaatcacaaatagaaatcagcatataaaatcaaactaaaccaaaatgttttacaaaaaaaaaaatttgaactgatatttatttataacggcattgtttaaattattttctatgcaaaataaaccggatcgaaatcgaacaaaacccaaaatttggtgaaaacaaatactatattactatttcaaaagtaagatgaaagaaaaagtgaggtttggcaactggaccgaaatattttggcttcaattagactctcaactcctaaaaaaacaaaatagctgatccgaatcgaaccaaaaatatcatatggctaccctaaataaaaatggtatatggaaaattagtacatataacaaatggtatcaaagctgaggttaatacctcttgggagcgccggatctagattatctggatgatcattagaagcagcagaggattttaaagaagcctcgtcggttatgtaaactttcaagccgagctcacctctcacacgagaaaagatcccacgtctctccatgggaaagtgaagaacaacagcatcagaatgaggaacaaaagaggtccctgagagagataccttgccaaggaaggaacgtccattagtagatctgttgtgactataagcttgagcttcaagattgagatagtgaagacgagatggatctgagatgttgaagaagaaactctcgttccaaaccgggtttaagtctcgatctttgatcgttgttcggtgcttttgaccatcgaagtaaagctcaacgtaagcgttcgatgttccttgcccatcttttgggaagagattgtgtgctccgatcacgtccacgccgagttttagattgctcatcatcatgaccgtcgatcttttgatcgaacacttaaaagtgaaagagagacttagagtagaatcaagctcacaacttcaattttgataaagggtcttggaactatatactacataataaaattatatgcacatgcatgtgcattcataagtatatgtaagttgtggagaaaaattgaataattatggtaagaccaacttagatttcaagtaagggcagacagagtttcttgggattttcttaaatgtttctcatcttgaaaaattgaaaaaaatccagaaccgaccttaatttatacatgtacaataatgcatatttttgttataaattaatatgatatggtgtgccttaacatattgacatgagttataaataggatatggtgtacctcaactaggacctcaacccataattttttttcctttgtaagtaaaacaaacttacaaaaaccaaatctattttacagagttataaattggaatacaagaaataaggtcaactctttagtctctttttgttgattggatgagatggattcaggaaaaataatgaaaaaccatattattatctccacacataaatgcagatgcgtataaaagaggtcaagagttcatgcatgcatatatctaaggtaaagatcctagaaaaacgcttatgtcacatgagtttctttgacttatataaattgagcacatagctcttactacttaagatctaaatttccaccaatagaaaaactactagctaggtctccgcagtaagtgatacgattattaaatgctatatatatttatacaaaatacatgtgtgtgcatgtatttatacacgtattttagaagtggggtctctatctttttatggattcccatgattcacaatttcacatacaaggatttaactactatcccatcaaaatcctaatctgaagactaaacctctgatcttgattcacatgtataaggagaaagatgggaaagcttttaattcatttttgcctccgtttccaacattcaagctttgaacttctcacttttttactagagagagatagtgatggcacgatgaacgagggttgaaatggaaatcgcagattatgagatttattttctatacatcttgattcatataataaacacagtactagttgataccatgctatttgtagatttctagataattattgtttttagtaaaattgactaatggtaaaaccgataataaatagtgtattttgtgtgtgaatgatctaagcaaaaccactaaccggatataataacataaaatttgttaactaacacgtccaaaatctatgttccttcaaaaaaaacatactagataaataaaaatatacaatttggctcgaggtctcagtcaaaatcaatagtttagttatcaaccctatagtcctgaatccataaatgttggataacaagtttgcaatgttatataataaaaaaaaagattgcaatggtaagaattaacatcataagaattttattggagattagttagctgtttagttcatatataaaatgctttttagtgaagaaatagtcaactatcatatgaagatttaagatttaatcagtgatcattatacaattctatttctaacttgatttagattctctgccgatcttatctcatctccacttgttctctttctcaccttgttttctaatttctagtcttctagagaagtcaacgtaaacaaaaaatgtacatggactaaaggaatgtgatagttttatttatttagataagcaatgcacgacgtttattgtgcaataaaacagcgtggtgttctttttttctagctccgtgctgtcttctcgaatctgcaattccctgtaaacagagcaaactgaaatccccaaatcaaaaccctaaaccctaatctctaatttgagaaattaggttagttcacctttttgtcgattcctcttgcggagagatgcaatcgattcgtggcagtacacggttgcttcagaggcatcgtttctccatctccaacactcttcgtttcacttcttcttcttcttgtggaagctggtctgaaaatgaatccagaaaactagggtttgattcttgcccttctagcagagctgcgacatatctcattagctcgttgaaaaatgcaggcttttcctcttcagctatacctgtaagccactttcgttctctatcttggtttaacattgtcgaaatgtagaagaggtttggttggtaatggagatcttatatcaaatgggtttgaaaattgcaattagtgtagaaaaacgcaaactttgctcttgtgtggtagtaagagttatgtagatatagaagaaccagctttgacacaagttttatgatttcacaagttgttctactttatatgtttgggtcacagtgatatctatctagtatgttaatgtacattaggtttctacgtgtttacgatgttcttggaaatattttggcagaaacaaaactttacgtatgcgtcgaggtgtttttccaccactggagattcttctgttcaaggatctcctgagtcagattgtgttgtgcctcagagaatcaagtttaagcggcttgataaaaccgctaagcatataatgcaggtactacaactcaattactagacaactgtcatggataaatcatgtcatatgacacaatcttctgcagattgtagacaaggaagcggttgaggaagtgagatctcttagagagattcctgagataaagcccggttacattgtgcagctaaaagtggtaatttcttttttcttggtgaatgggattgaactatctttgtctttaaagtgaaaccttttcataggcttgccatttacttttgtttttaacaggaagtgcctgagaacaagagacgtgtatcaatcgtgaaaggcgtcgtcatagcaaggcgtaatgctggtctgaactcaacatttagaattagaaggcttgttgctggagtgggcgttgaatccatgttccccttgtaagtaacttgaagctcaaactgcaactacttattctttttttctttctctcagaatttgtatatgatatgataactcaagccaccatgttttgtgtgccttaaattgatgtgagtgagggtgtttggtgacaggtattccccaaacctgagggagattaaggtggtggacaagaagaaagtaagaagagccaagctatattacctcagggacaaggtgaatgctcttaagaagcattaacaacctcagtaaaaaaaacaatctactcgtgtcttaaacaattttccaatgttttagttgcactctctcaaaaggagacgatttgcctcaaatttcacgtattgaatttgtgcaatggtgaatcttcttcaattctcttctctcccttgttggaaaaagcacatgggctaaagacatgttatagttttatatatggagacaagtaatccacgacgtttcttgtataataaaacagcgtgacgttcttttttttagctccataacacaacgctgtctttgagtaaatgtatctgtcctctcgaattctgcaatttcctgaaactgggcaaattgaaattcccaatcctaaaccctaagctcaaatttgagaaattaggtttgttttcatcctttctttgtctcagtcacttagtttttgggttttagtagactcctttgtattttttaacccaaaaattgcaatgtcaaaagtttcagtcttttgcaacttctgctgtgttcttttgtgatttgagacagaagagaaacttaatttgtctttaaagctaacatttttaggtagcaaaaattagtatattgagcataaagttaacaaatttgaagttatttaagatgattgaggatatggttttctattctgataagtaggaagttgatgaagtgataatgaagcttctttgaaatgtttttactttttagaaatggaagcaaatagagagaagtatgctgctgatatattgtccataaaagaagctcatgaccgtattaagccgtatatacatagaactccggtgttaacatctgaatcgttgaattcaatctccggaagaagcttgttctttaagtgtgagtgccttcagaaagggtgagacttgagagtacttcttagtactaatggttgattgagtggagattctctcattgttctcagtattgaatgtcgatcgttttacttttctgtttattgtggaaaaagtggagctttcaaattccgtggagcttgcaatgctgttttgtctcttgatgctgaacaagcagccaaaggagttgtaacacacagcaggtttttgtttccatactgtgaaagattaatgctttattgtttaccgatttcatttctgccttataggtaatgatgctagagttaatagtgactgaatagttccttaatgttgaatttctattaccagtggaaaccatgctgctgcattgtctttggctgcaaagattcagggaataccggcatatattgttgtaccaaaaggtgctccaaagtgcaaagttgataatgtgatcaggtatggtggtaaggttatatggagtgaagcaacaatgtcttctagagaggaaatagcttcaaaagttttgcaggaaacaggttcagttctgatccatccatataatgatggacgcattataaggtactttgctttctcgatattggtctttcaaaatgtgtctgttcttttatgggacaactttttctgccataaatgcgttattggtgaaactgtttagtgattttactgaaatgttggattatggttcttgtaacagtggtcagggtacaattgcattggaactgctggagcaaatccaagagattgatgctatagttgtgccgataagcgggggtggtttgatatctggtgtggcgcttgctgccaaatctattaagcctagtatccggattatagccgctgaaccaaaaggagctgatgatgcggctcagtctaaggtcgctggtaaaatcatcactttacctgtgactaatactatagctgatggccttcgagcttctcttggagatttaacctggtaatctacttcttactcgtatatagggatcatgtctatgaagcagatatagaacagaaaatttctcaaactctgtatcattccttctctaaacattttttttttgctatcaggccggtggtgagggacttggtagatgatgttgtcaccttggaagagtgtgaaataatcgaagccatgaaaatgtgctatgagatactgaaggtctctgtggaaccaagtggagctattggccttgcagcagttttatcaaacagtttccgcaacaatccttcttgtcgtgattgcaaaaacataggaattgtactctcaggaggtaatgttgatttgggctctctatgggattcatttaagagttcaaaataaacacctttgcttattgcatttctttcacgacttccttagatatcaatgagaatggctgtattatccattaagtcgttgatcttatgattatatgcgtactcatatctacgtacacacttactcacatacaagagagagacgaatctctactcttaattatttgatgctcctttgtaaccaaataactacctgggtcaatcgggagctttgagtcccgtagcacctagcttagcgcctaaggacgaaacacgaccctgtagtttagtggaactacaagtgaaagtgcttgttcggtcgtcttgtggatagttgtaggcgtcgggacacctatgtttgaagaatcttgagaacccagtgctgctacatgaaccttgtccgttcgtataacagtactggtttgacctataaaccgtacacgggttgttgcaaccgcccagggctctcaagtcgtttggacactgtccttctatgtctgcattgcatattatccggtggcaattcgagcttgtcgggctggaaacaattcacaccaacaaaacactatcatcatcgattcaaaacattttaaaatagactttcgattgttgttttctttttctcgagcagaaaatttaggtttgtaggtttatgttccatttgtttttaggaaaaaaaaacaaaattatgaaagattttgatgatattcttacctaaactccataggaatgttaaatccatccacaagtgagatgtcgtagaagtctacgttattgtagtgggagagtcccttgcccttgcatttaagatgcagagtttggattcaatcctagcaatattaatgattttttagtcagttgtgtttataaatggactcaaaaagctttcttgctttaggcatacattaatttactctggacaggttttgagaaaatatacagtggacctgatgataaaagaaaacaaaattgctgatttaagtaaacaaaatcttacattggaacttttcatatgtaaaattttaggtctactaaaggaattgtatattctgtggtatatacttttacgtccaatctttaattgattcattggagaccgatcaatattaatgttaaactcaactacacctaaaagtcaaattcctgatgctaaaatatttagtttcactaaacgtaattctcccgaaagcagccacgaatcggtctacatgattttacacacgcaattagacattgaattgtctaaggatataatattgtttattagtcagtttatccaactttatcaataattaattatagaaattttgacttgaaaaagttagtgatctactagattttgtgtttcttctgtatattcgcaaactcaaaccaacacaagaacaataaatgagctcagtagattccaatgtaaaatcttgcaaacaaaaattaagatgttttctttaagatatttgccaaatactactatactggaacataaagttttctttgtagtatacgtaatccaaaatcataattttcttttttctaaacttgattttcggaaaattatcaatcacaaaaatgaaaaaaattatatttttcaatgtgaaaatgttatttgggagaaagaatattttaattttctaaataatatatagcatatttatttcaagcatatagtaaaaaatacaagaatgatcttcattgtatcgaagcgaaattgttatttttacattaattgatcggaaagagaaaaataagtccaacttatacgtgggtcgactaacgtaattattattgcatgccttattataatccattaagtgtttatggtaacgtatatatgatcacgtcacacgtacgcatatctacgtacaccctcacacacacacacatacagtagatacgagtctattaattctcctcggtgaccatcttgatcgggagctggtgggatccagtagcaccgagcctagaccttggacaaaacacgaccctgtagttagtgttggtgcaagtgaaagtgctagtcgggtcatcttgtggatagctgtaagcgtcagggcatctctgcttaaagaatcttgagtactcagtatcgctacatgatccctgaccgttcgtacaacagtattggttcgtctgaaatacagtacacgggttgttgcatccacctggggctctcaacacgtttggacattgtccgtttatgtctgcggtacatagtatccgatggcagttcgaactagttgggctggagatagcacgccaaaataagaaagacaaatcattatcgagtcgtgtaagaacctaaaacgtttagaagtatgaaatataattgttctctttttttattatctttttttttcttgcatagtagaaaaaatgattttaacgcttgtatattatgttaaatgtcaagagatttttacgtttaggagttcgaatttatgaataaagcaaaaactaagtagaacttgtgaaacgataatggtgatattcttacctaaactccataggtatgttaaatccatcgacaagtgagatatcgtagaagtctaagttgttgaattggttcaaagcgtactcagccaacgtgtttggtggctgtccccagccagtacattggagtccaccactgcagtcaccagtttggcatcggccacgacctgaggagtcaaagttacaattggtcctaccccaaatccgtgccattttagtgcccgccgcgacatctagcctccatgattggccagcatctagacgtcggccacctccagggcttgcggcagcccacacggtgtaactacattggtttaggatttcgaatgtggcggctgttgcggtggagatgagcaaaagtgcggaaaatatgaaagtagagaccaagaggtttgccattttttagttctactacttttatgtatgtgtgatctattgataatattactatggattttatatagaggtaaatggttacgtattagtttgattattttattttttaattagtatttgcatttttgaagttatctagatgatgaatgttaatatgctttaatcattttaataggttggggcggcttgactatgtttgatggcttgcgctaacttgcgcataagtcttatttctagattggggtgtagaattaggagacactacaagtgactttgctgttttactatagttaaatactataaaacaaatcaatattaattttagatacaaccttattaagttgtaactaagagaaatactgaaatagcttaaaaaattcatattttaaatgcatgataagaaaactaattttgatcaaaaaaaaaaaagataacaaaacttttgttaattttgattgagattacaaatcaagattgagtgggattacgagctgaagtagatttgagattacgaactaaagaactaaagtgtcagatttggtaaatggtatcacacttaattttggagtttcaattggataagagaagcaaaacattgaaagaacaagtttgaagatcttcaattcacgatcgagctgatggagaatttcctcaagattttgtctttctttaatcaattttgtatccacatgtaatttcacaagtcttacagtctgactatgttgcttccttataatttaataaaacatatataaccacaactatatcaagtatttcattcgtgcacgaaataacgatcatgcgtggtgcacactaatttaagtaattgtactatattagagagataaatgatgaaatatcgatgtcaattttattattttcgttaaatagtataaatataagtttgttgttgaaaaaaaaggataaatatcatttgagattaccgggcatttcttattatatagtccaaattttttgtagtttttaagtttcgatgactatcatgtatattgatgtggacattttactaacttactttttcaaattttttctatcggacatttactatttttattttcttatcaaagatatattttatatcgtcaaccaatctagaagtatttatatttctaaaacaattagagaagaggaaaaaaccctcttagcaagccgatcaacagcttgattacaactcgaacgaacaaaattctaatgcaagtccttaattatagtgtagagaacatcttgagacttgagtgtatagagatctactaatttaagttgtaaatacttggaccttgggacttcgaagttatatcacaagattggttcagatgtccaacaactgaaaacatggtgcagcccattgcccaattacgaaggaaagtaatggatttcttaattctttagcgagtaaaatttttcacacgtaagcataacttttactattttatcattctttgttattattttgtgttttgatggtttgtattatgtttgtatcttttgtttgaaagtaatatacgtagatgttaaaaaaatgaatgttacgaattcataatttcaacttcacgttttaattttgtccataaacaacggcagtggcggagccagaaaagtttattatggtggtcaaatattagtttaacatgagtcataggggtcagctgagatgaatcaagccaaaatataccattatataccaattaaataagcatgtaaataagaattttaaaatgttatggggtcaactgacccccttggttatgagttagctccgccactggacaacggtgtgtaaataataatttatcctaatacagagagattaatgtgaacaaaacaacatacttaacaaatttattcattgattttcttaaaaataatcatcgtagtaaccattggtatattcaaaactttttccaaaaatttcttcaacgatgatactcgtcttgaaaaatcatgtgacatctattggcacacatacatcctagtggtgcagccaaaagttttgtttacgagggtcataattatttttctttaaataataaattatatatttaaaatatatttttttcaagattttttaaaattttctaactaaaccaaactaaataatctaattttcttaatattatatataaatatgtagtttttaatatgtttcacttggcaaataaataatatttgtaggtcatcatctttcttatttctagttgtattatggacatttattttcaaatttttttttttattaaagtactgtatatagtatattattgtgtttatcttgccttttttattatctatactattaattgggaagtatcgtgtgaactacaacattgtaagggtagtttaaaattaactaaatgaattttttgcatgggtaatttaataaattaacaactactccaactaaataaatagagaatattacattctaagacacttttctcaaacaatttccgagatacgacactttcaaaacacaaggcacttctaatataaaaattgtccattttgtcttcaaaccaatttcggttcaattctttaattttaatttctaaacgaaaatcaatttgtaagaaacctctctttctcacccaatcccccacgacgactttacaatttctgtttgtttccatcttcataattgttgctttctcacttctcaatgtcaatacacatcgatttctcctcccaataccgtttcaatttcctcgtactactcccttacgactgacaatgatcaatccttcttccattacttccaccatcttcttcgattatgcgtgacggctcaacaatgcaggtaagtgcatgcccaaataattttatccgatttcatcttctgttctgggtcattagctgcgaatctcatatatgtttactctcggtgaggactcgtcctcgatgcctgtaacgtctttgagattgtttctcttgttttgttgtcggatttgcgtttgtggaactcgattcaaaaagctaatatgtctcatgggatatacgagtttgcttttgagctttacataagaatgcgtgaacgagatctcacagagtaattgtcatgtcttgattagattttgacttttcattgcatgaatcttaagtcactgtccatttatacattgttaaatgaaacaattgatcttatattctctttgattcaattttgcagatgattccttgcactacattaaattatatcacaaacggacgtactgtgcatccatgaattcaacttaattcaaatgattggtgaccatagatgatagaacaaacaaatatggttagctggatgcttacttattgatgtcatccaagagaatctgtccattcagaagcaaacatggatattgtgctcattctattcactatataagtatatatgtttcttgttatatttaggattagtatacaattttggttataatgatgggagtttccatacacaagtgaataaatggtcaaagaaaaatgaacgatgatgtactttgaattggcgtttgaattggtgattattgttcatgtataaacttgtgtattgaaatgaaacaaccccgtaagtcactagatgaccacatggactagaccgcttggacagtcatcaatggacacttgtgtctttgatttactttaaatgtgttttattggtcggtaaaattaccattttttgtatgagtttagtgtttgtttttacggtttcagatttagtggagaaagatcatgggttgagggtttgggtttaattttagggtaagtaaattaggatttagtgcaaaccgttaagggtagagggtttacacacttgtatgaaccatttttgaatataatcataagaatatcaccatatgaatgatcctatattttacagctcttagattgaaatgtcttagctgcacaaacagatacacgaaagatgagtaacaccaaatctaaacattgttcaccaaaatcaaatacaagaacacttcattagttggagaacatatattcaaagagtaatggacggattcctatagctgacagtccgcaagtacgtgttcatatatgatattaagaagtagagatgtattcatgtaaaggagaaggcactttattatataccaaatcaaacaaaatccctagacccggttaatcaattgatggtttaatgtgggaaggatagaattgtccttttatcctccaaaaacaagagaatattacacgtaaaggcactattttgaaactttggccacaaataggcactttaaaggcattagtcactttaactcagtagaattacccttttaccctgaaatcgttggtttaacaaaacctaacaaatttagccggttttcggtttaattttttaatctcaatctctaaactaaaaccaatttgtgagaaacttctctttctcacccaatccttcacgacgattttacagtttcatttatcagggcagttaaaatcatcacaacgccgataacatcatctcgactccggcgatcatcccgacgagttttctaccggcaaagtcatttcctcgtccctctcccgtcgttatcgtcaacaaagctttcaatcggctgacattaattcgtcctctcctgtcgtcgtcgtcaacagttgttctcccgtcatcgtcttcattttcttgtctctcaatcgattcgtcgtctccggcgtgtgctagtaacttctactcggttctcaaatgtaaggtattaatcttctccaatcattttatttgctccaattattcaatcgtgtgctaattttatttataatatccaacattgtgaagagctaataagggaagacatgaatgctacgttaggtgatatttcaaaaatgttaatcacaagaccttatcttcttaccacagacttcggcttgcttatctcctcattgttgacggtgtcctcatatcctgaaaccaacctattacgtctacattaaaatatgtagagatgttggcagatttggagaagttccttaactgactgaggtctacgtaactgactgtctatacacatgtggataaatggtcaaagaaacatggataatatactttggattgacgtttattgttcatatataaacttatgtattagtatgaaactatcatgtgagtctttagatgatcatggactggactgcttggacaatcattaatggacaagtatgtctttgatttgctgcgaatgtgtttatagctcgataaaattgtatcaacatgtctatatacatgttgataaatggtcaaagaaacatggataatgtactttggattgatgtttattgttcatgtataaacttatgtattagtatgaaactaccatatgacttattagatgaccatatgtactggactgtttggacaatcattaatggacaagtctgtctttgatttgttgtgaatgtgtttataactcgataaaattgtctcaacatgtctatacacatgtggataaatggtcaaatagacatggataatgtactttggattggcgtttattgtttatgtataaacttatgtattagtatgaaactaccatgtgagtcatttgatgaccatatagactggactgcttggacaatcattaatggacaagtatgtctttgatttcctgcgaatgtgtttatagatcgataaaattagcacttttttgtttgctcatctaacattatcattggagcccaacttgatacaacctctctagcttctcttcttcctctcttacaataaacagaataatcatcaccttctctttcaacctctctacattcctccctcgacgtcacagttacatcggccgatgaagaaatcggagctacaaatccatcaacaccaatcggtatatcaagccttgtaggtcgtttcctttttaaaacttcttccggaggagacgatgcagaaacagagtcggatccaaacgataacccgaatcagggggagattcctaatcgacttctacgtcatctctccaatcacagtggcggttaattcgctgcaaaaaacatcgtcacaatgtcttggttaaggcggaggcaactcaatttaaattgttccagaggttttgtttgaagggagagagatcgttgcacagtaatattaaccaattcaagaaacagtgacccggagattccgagactttccatagtaattgcttggtcggaagaattaacaaccatcgacattgatattgtgagataatttcagtcggcgaaggcaacttccttttctcatctgtaaatatcaactgtcgatttattagaagggaaccaaatcaaaacaaaatctttctaaccggttaagtaaatttttggtttagatgggtggggatataattgtccatttatttttcaaaaacaaggaaaaatgccttgtacgtgagaagtgcctcaaaaggaataaaagtttgtagaagtgcctaaacatgtccaattcccaaataaatatcttgaatttttttttttttaaaaacgaattaaatcaataaattaataactacacaatattttaggaaatcatttaaaaacgtttccataacatatcaggctattttaattcgaattgtatatatgtaaacttatttattttggtaatatgttattcgataattaggaaacttcaatctaatttaataacaaattctcatttagtttagattttatacaatttccgtaacaaaactatgttaattgtttctgattagtacacatgaaatttaaactatgattaagcatagtcaaaagagaatttttggattttagatttgtaattatctagaaaatggtttcagtatatatttaacattttaattagaatttaaatgatataaacgtttaaagtatttttctttaaacaggtaattttcattattttaaaaatatatcattaagctaaatttgaattatataaaagaaaatatacttttaaacgtattataatagttacaagcttttgaaaaattcattcttctatatacgattatttcttttttttaaaacagtaaaacaaagtttaaataccaatatttaaaatttttaatgcaaatattcaaaatgagaacaatcagtaatacgatttttttgacagatcattaattatattcgaacaataataactaccatatttgcgataatgcataaggatgagttagcttttaaaaaaaatatttttgtcatcctaaatttaaaatatgtaattcagattagtttttttttatagtaaagctaatattgaatccaaattaaaatctaattttatgtataatctatctcttataaatgttatgcatacattcatattgcctcacaatcaatctagaatattgattctttaaaaaaaatagatagagattcatatgtaaattacttcatgttctaatgatgtttatctcctaattttactatccatttatgcgagtcttatggatttttctttgagggtcaacactagattacaaaaacttagccgggtgttggtcaatattataccacagataaaatcatggaattaacaatcagatatatttatacaatctaaaacaataaacaaaacaaatataacttaatttatattttatttttatatttgtttttaactaaaatcaacaaatttatcagtttataaaaaataaaataaaaattagcctgtggtaccctacgggtaaatcactacgatttcatgtggttgcaatatcaatttatacaaattttgacttttaaaatatattttatataattcttgaaaggtatacactaaaaatcggttttatatacttcaatatcataaatttataaatcacaaattgtttttaaatatgttaatccaagatctaccacaggtcaatcccttgattcttaatatattacaataaaaatatttaaaaataacaaaaataatatttaattttacggaatgaagttatcttgtggaacgagtttgggttgatactcctacgggacgataatctacgagtgtaatcttagaattaacaattttaacacaattatacaatcttaaacactaaacaaaagaaataatatttacaaaacaactataacttaaaattcgaatttttagttacaaataaatcgaacgactgtgtaccgcggagtaaagtttacattatatcatctaactagattttaacccgcggtacaccgcggggacaattaattttttaatatatataaaagtttgcaaattgtatctatatataaaatatttttattttaaagtttacaattgttattaagtaatgtcctgtcaaactcgtcccgtaaaaaacctatttattttattaatgttgattttatttatgatatgtttataaatcattgtataaatattttgtaattttgtagtaattaactgctatcaaatatttctgcagtttgatgcttataatcgaattgttatactcataaaaaagcaatatcaaaaatgataattttgtagtgtttaaatgatattaaatattttgaaagttttattttagtaactaattgtgtagttaatgtggatagatttcgggaagatagttaaatgtcaaatatttaattcgaagatttactttctaattatcaaaaataattattaaatgtcagtggcagccactgtaaataagtcccaacttgaggatttatttcacaaagtggctgcaaaaatgtatatatagattgatcaaatttcaaacaaaaacaattaatttgtatatacatcaaactaacaaaaatatacagattttccaaatatctctatattattgcgcaaatcgaaacaaatctaacattcgatttactatgcaaaacacaaatgaaatataaataatataaattaattaaaaaattagttattgtatcataaataacgctatacacttttctatgcacattataatttatacactacaatatatttcactaaaaatgtattccaatatatttattaaaataggaaaccccgcacgtatgtgcgggtcagaatctagtttaaatgtatgttaagaacaatcttttaaaaatggtagcaaaaaaaattgaaacaagaagtctatagaagaaaaaaaatcaatatgtaagaagatgttatagatttttagccattttaaagaaaaaagacataaaatggaaagagcactaacatttaattggaaaaatgaacatccatggggtcaaatgcatagttagatcactatttatggtggtcattatgaaaattttaaacaaaaacatcaaataattgttatgacattcactttaaaactaaaaattgataaatgttatgggggtcaagtgacccccttgtcaatacaccactgccactgatatgtgatatttgctcgattctcctggagttaattgttaggaaatcatggatgaaacccattaagatatcacataggcttcatccaagatttccaaacaacacatgtgtaaaacccattgcctaaatattttgacggtggagttgattgcgaaagaagcggttcaagaatttgagtagatcatggaattgaaaaagggtgaaaaaacttctgacaccaatggttcagacaaagggacaagaaccgatggagttgattgagaaagaagtggttgcacacaatatgacaagatcatgggttttacaaatggggtaaaagaaacttctcacgccaatgggtcatataagggagaagaggaactaaagaggacatggatggggtaaaatattgttgaagccgaggagagtgtccaaaccaacctggcaaaaagacattggaatagagcatgattgataatatctaccttacggccataccttgaggtttgaactaatttagctttgaatatattgtaaaataagattcttttaacaattatccccaacaaacgatcaacaagctataattacaaagagatccaatggtttatcttgttgagtactaatagagttacagtgaattcgatatgttttaggtcctgaatgttttgtagttttttattggcttttagtttttggtttttggattttggattttggtttttgatatttgtagtttttgattttgttgtagattttaatttttgcaaaatcatgaatggaattttgtttaatttttagtttttacgtaaattgtttaaaaaactcacaaaacttggtttttagattttataaagaaatagctaaaaactcttaaaatctggttttcctattttttagaaaatctactttttgtagaatcatgaatgggtatttatttggtttttaaaaaatcacaatccaaaaactactctaaaaactgcagccattcaaggctttaatttgttgtcatgttaacaaagttaagttattggtgaagcaatgtcgttttttatgcgacaatattcttagagtttcacagaattgatgacaacgaaggaaaaatatcgtatcatctttagtttgagtaaaaggaaataaagtaacatatttcttaaaattcgttagcgagtaaaacgttccacacaaaagcataacttccactgttatatcgttctttgttattactgataatgtatgatttgatggatttgtataacgtttgtatcttatgttttaaagtaatcaatatatgttagaaacgaaagttacttattcaaaaaattaaatttattcttttcacctttgacaatgaagtcttaatcataattccccctaaaacagaaagaataatgtgtacaaaacaaaatacttttatccatcactgttttgaataaccataatcgtgtttttaacgatatttgaagaactttttcacaaaacttcttgaagtatgatattcatactcgatgaacataatggtgtatatggatttatgtcatacaatattaatgtgaacatttgattatttgccatgtaaatgaaatttcttttgataaatagttgttaaaaagattaatgggaacaagttataatacttgataactttcttaacaattaatatcaggtttacattggtggtatttccacaaaagttttcaaagatggtactcgtgtagaagaagtagaacgacgacatctattggcagtagtacatggacgcctatatggatttgctggtgtgcgcttataacatgcagcggtaggaaatcttggatcacaacctttacctaaatctaatctaattggatactcaatatatcttttcgcatgaatggtacttataaacacgcataatacaatcaaaatcgtcacaaacgtaacttcttttgtttttatcataatttagattttggattagttatatttggtggaaagattggaaaatctgttttttatatatagtgcaaaacgataagttatagtttcactatctttaaaacatatctttgtttggttccagtttagatatttttattaaatatatttaaaaaaaaactgaattggtgttacagttttagtttcagttttttttcttcaatatatacattaattaattttgaaacatttgaaaatattgagattttaacatatcattttttgttggtttaatttcaatcagtttttgttttgtcaaaaaacaatatcggtctcctaatgctagtattacatctcaaaattttgatatgtttaaaaattgcaaaattatttttaatattataaagtgctattttataattatttctaaactttaacatataaaaattgatagatcggattgaatatctccgatatcatgatattttgacggaaatccatgtctggatatagaaaatttacaaatttaggtacacttatcgtaatatttaatgatagtgatttaatttgtgtgtattttcacctcaaaattttatcttagagactacgcgagaaaaaatgcaaatccacaattaatcttatgtagtattttaggatcgatcctaataagttatatatactaataagttacacgacgaattcgataaagaagaacaaaactaaggcaaaataaaaagtggtttttgcttgggggttttagcaatatatatattactttaagatatgtctctatgtctgaatagtttgttggcagtattgatattgaattcaatttggctgcctcactccaaaaatatattgttctttcgactattaatcatcagccaaaacaacattgtctcgatactgtttctcatgatcactaattcactatgtattatattgatcaagatatacaaaaatatgaactgctgggtatagtttcaattatcccatgtggacttcattttgcaagagaaatttagtcaactagaaagaaaaatattaggaattattagtcatacaaccatattataagattataacgtggaagaaaaactgtatagagttctaacaaactttcggtgaaacttcatgtcatccttaattcaaaagcaacccactagtcaaatctttaatatatctttcagaaaacaagacttcacatatatgaatcaatctcttcaattatttttggaacactcgaatatatttgatgaaagagcttaaagatcacgttgtagtgatcacttatggaccatcatcggaggcttcagtaacggcgtcacctgtctctcaacagacgccgtctttgtttgcatactccgtaacgccgtcagcatcaagattcagctcacggcgagcatcggttcatgttatcggtttggttctccggtttataactatggttctatgtttcgtctctgctctttcgttggcagtgaatgttcaacggccttcgaagagacatctgacacaaaactcctcgagttttgcttcatatcctgaactgttgtaagaaactaaagaaccttatcttctttaattcattgtttaatactaatattttatatagaatatgatgttgttatttccaagcaaatctggattatcgttgttcacttactaaaataataagggatacttgaaaaaaaaaagtctaaaaaataaaatgaaaagattggctgatttctgttaaattaaagatatatgaaccgaaaattgtaatggaaatgaattaaattgggatttttgataaattaaattaaagtattaattatctttaatatgcatggaaatgaatattttgatagtttatatatgaaccgaaaatattgtgtaggcgtgttaaaaataaatatccattaacaaaatcatccaaaaattttcaacatttttttctctctatgctaattggtacgttaagatatatgcaggtattgttttggagttgcagtgataggattcgtgtatacaagtttgcaaacattcaaaggagtttgtgatattactcacagaggagttttaatctctgagcctctctcggattacatcagcttcatatttgaccaggtattttacattattattgattaatttctatacgttgagtacatatataatagaatgtgttaacaattaacatataaaaaaaattgagctaattttatttttgtatacaaaacctaatcaggttatatgttacctactagtgtcatcttcttccgtggcaattgcatggatccaacatataaacgaggatgcgataaaaacactaagaaacaattctatagtttcagtttcaatgtcattctctgcatttttggttttgacactctctggcctcttgtcagggtataagctttgcaagagatttatgtggtaattaaatcttgtaatttttttatactcaagtcatgtttaaatccgtaagaagtaatgactatttatgtttatgtggatatatttgtttgttggaatgtaaaatttatacaacatttatttgttttatcgccaacgttttagaatttgaaagaataaccgaattttttttagagaaatataagataaccaccaccatgtgtcaatgttgcagtaatcaaatgataatttgtacatgcatgaccattgtaccaaacaaacttaatcaagtgtaaactagttttcctcgtatagtttccaaaagtactatcattaactggtaaaagggttcttcagatgtgacaaaaactattttctatattaaaaggaagttgcaagtgtttcacttacaaagtagatgaagtgtcattaaaatagtgatgggtcaatgaatgaattaaggtcttattatcatatttatcatatttggtcataagaatgaagaattttaaaacctagttaaaattcttaagcattttgatgcgtttttatcggaggtgaccagaccaaccaataaagtttatcaaaataaaaaaaataatgaaaacatgcatattttaattatgttcgtattcacttttttttatttttggtattcactttcattgtatttataaagcagattctaaaactgaacttagagaagagaaagttgttgtaatacaatcttgtagtgacaagagaaatttgggtgtttctttctgcaatgtataatgatatgtttgacgataaaacattataccgcccggaaattctgtaatcgcaatagtaaaactggatttcttcccctcccacctggaaatgatgtatatcctaactactataactggatttaattttccagaaaacgattatataaatggatttatataaattatttttgataatttaaatgctcacataaaaataatatattttttttgtcatttcttgcaaatagtttaagacatttagattttttttttttaaagattaccgaaagttatacatgttaagtatacaattcaaattcatgactttcgactatgaaaatacatcataaatcgattgttttacgttttctggatttttttttgggtttcttggcaaagtagacactttttcataaataatttgtaaagtggatagttttttttagaaattagagagatagacacttttttgttttttgtgagatagaggatatgtctaatagattaaaaaaacaaaatacatatcaaatactaaaataccctttatcttgagagctaataaaaataatatgagagaccatttgtactttattttgtttgtctttattttttttatttttttattttagttttcttaaaatatttttttaaataataaattctttttaaaaaacattacattaacttttagagtaattatatgtcatcaatccaatgcacaaacatttcaaacatagttttgtacactaaccattattcgttggtgtacaaatgtgtatactgatatttcataaatcattaagtacaccgacttctcttataaacataatgattgtataaaccttatatgattactcaatataatagtgtacatgatggtgtacataattaaagtatttttgatgatgtacaaaatgattgaaactattatgacgattgatggatagaatgatgtatacaacttttaaatgatagcatacaagattattagacaaagtgtacaaaacttggtgtacacttctaggaaatgtataaatcattatttcaattagtggtgtatatctcgtacaccaatgttagtacactgtctcatagatctttaaagctgtacgatcatgtacaccatattttccatcatctctttacactattttgtacacaattatactgagtctatcacttctcagtattatatgttaatttttacattattgtcgtacactaacatttgtacaccagttttaacaatatcacatacaccgtcggctgggattaaataaaaaagtgttacatatttttgaaatatagcaaaattagactttttagattcacataaaaattttaaaagttaatatgattatgtggtaattttttatgaaaaattattatcaaacaaagtaaaaatatttaaataaaaaaaaaaagagaaaaagtagaatttgatttgagttttgtctatattttactacctaacaaataacaaaaggttatataagtatttttactaaaatttttattagacaaaaaattgtattagaaaggaaaaaaaaaattatctatttcttctttttctaaaaaaactacatattttgcaatttatttatataaaaagaatacattttccaacttatctcttttttttaaaaagtttttttatcataaaaactttatatttaaaatctggataatgacactattactacaattttgctaagatatttgtttcctttttacgatgattacaattagactataatattggataaacgaatctcaaatattgaattcataattaatgttgaacataaaacataagaaaagtaattaaaaaaagagtcaactcagaataatcaattcgagtctatcactttattccactcacattaattaccaaaaatgttatgaaaatctagatagcgtttcacatattcacagggtcaaaaaaggaaataacaaaaagaagaaaaaagagaaacttctggaaaaagaaaaggaagccacatacgctcttctagcgcattcctatactctttccttctttgtggtccccttttcacttttttaaattccaactttacccttgttcttcttcttcgttctcttttttttatttttgtttttgttgttgtcttctggaacttccgatctgtctctcctcttctctctctttcttatcaatacgttcctctcagaacattctggaacttcacaacataatctctctctctctctatctctagcttcgtgatcatcgtgtgtctctgtgttcaatctggattgtgacaatctctttctttcttggttggtgtagattacgtcaagagagagatagagaagtttttggatttggttctaatgggtctgtgatagacgtttcctttctcttctctgtctagtttctgttttgagatctctatgtttccaactttcttcaaagctcattcccattggtagatttcatcattatcttaatttgggtattgggattaaggaaagtttagatttttgatctataactcatgccgggggaacaaaccggagaaactccgacggtggccggagttggcggcggtggagctggttgtagcgccgggaatagtggtggaagtagtggatgtggtgctggtggtggcggtggtggtagtggtggaggtggtggcggaggaggagattcacagaggtcaattccgacgccgtttttgacgaaaacgtatcagcttgtggaagatccggtttacgacgaattgatctcgtggaacgaagatggaaccacttttattgtgtggcgaccagctgaattcgctagagatcttcttcccaaatacttcaaacataataacttctcgagttttgttcgtcagctcaatacttacgtgagtctcaatatacgtttgaatcgaaattttcagttattaggttttttagtagtgagctcttattttggtttattattggttttagggatttcgaaaagtagttccagatcgttgggagttttctaatgattgttttaagagaggtgagaagattctgcttcgggatattcaacggcggaaaatctctcagcctgctatggccgcggctgctgcagcggcggcggcagccgtagcggcttcggctgttacagtagcagctgttcctgttgtagctcatattgtttctccatcgaactctggagaagaacaggttatatcgtctaattcttcgcctgcggctgctgctgctgctataggaggagtggttggtggtggttctttgcagaggacaacgagctgcaccactgcaccagagctggttgaggagaatgagcgattgaggaaagataatgagcgattgaggaaagagatgacaaagcttaaaggattgtatgcgaatatctacacattaatggcgaatttcacaccgggtcaagaagattgtgcgcatttgttacctgaagggaaacctttagatcttttaccggagagacaagagatgagtgaagccattatggcttctgaaatagagacagggattggtctgaaacttggtgaggatttgactccaaggttgtttggggtttctattggggtcaagcgagctagaagagaagaagaattgggtgctgcagaggaagaagatgatgatagacgagaagctgctgcccaagagggagaacaaagttctgatgttaaggcagagccaatggaggagaataactccggtaaccataatgggtcgtggcttgaactcggaaaatgaaaaacacttgccgattcagaggcattgttgaatatgcaagaaactgttactgatccccattgcataggcaagccattgcgctgtcccggacggaaaatggggatgtgttcggtcataagaggacagatgttcattgagttggggtagtacaaaagtatctaaaaacactgattctaccatcctgagttgttcctgatttcagatgttgcctcctgaatcttcttcttgatggaactgaaactattctggcttgctgtgctccagtgagtggatgtgcttctcacgatttcggataaagcaggcagattcaatgttacatcttcatattctgcaacaaatagcaggaatcaatggtttttaagagttatggcaatgttgatacagaatcatttcttttgagttcaaaacaattgtagctctctgacttgtaatgatcttaatgaaatttatctctcttatttaaagatggtccaagttctctagtggtcgtgtgtgtgtttttacctgttgacataggaagctcgtactggcgctttaagaatttggaggcgttacgatctttcttgtggcaaagaactctaacaagagtttgtgcatcctccaagcgccgctgctctgaactcacccccatgttgatgagctcgctcgcagtcattagcatctgaattagcatatcgctctgccacaacggacataatccgtaacactttggtatctcataatttctaagaaaggaactaagtttgcaatttgcaagtgagcaaaatatatttacctcgagagagtacaagtcgaggatctctttcgcctgtttcgcttcttgctcaactagtgaacgaggaagtccctccccatcggcaatgaagaactcctacaaggggacacacgccgtaggttaagtacacagattggaactgcctaatccacggatcaagacccggttctcatatgcaaaatggccgaacctcaaaatcaaagtagaaaatctagtttctagtattttttaatattgtctttatctgaaactaattggatgcagggagtatacaagatgatagagctcgaaaactttggtttccagtagaataagtacggaatttcaaaataagaatataagttgcttactttcaaaatactgagatcttcttccatcaaggtgatgtcagaatccgaaaaggcacgggttggccctccatcaagtagtactcgaacataggcttcctatgggagagaagcatgccatttttgtgggcataaaagaggttagagttagttaacttgtttccatatgcaaaagagaaaagaagtgttaccagagcggatcggcagatgcttaacaccaccatatcccgtgagtcctcataactcaaactgcatacagtatcaaggacctgtgcattgcatttcctagtgtaagttcatgcttagtagaacggggtgaataaaagaaagagatgattttggtttactgaatcaatgtgagggagtattctttccaagcgggcgccttcgactgtgccattgtacaactgtataaggaacatgtctctcagatcccagaaaatcgctcttgcccctgacaaaaagcaacaataaatacagaaaccagagctaaaccgacttctttgtcgttgataacacaaaagtcttaaagagtaacacaatccatccaacattctcactcatccatgaggatcaaccaataaaagaggaatgcgtacttttgccaaagaactgaaacatgattaatatgtatggcttattcacgagtatctcagataacgacagaaaatttgataatgcatcttatgtaagtcttcaaatagtattaaaatgctaaagccatctagtttgtggataagaagattgtgcattcagaaagtttgaatcttgacacttatcaaggttgcagggaactggttcaagtttggacagagttttcagcttttctcaaatttaaagtgctgcataacacgagaatttgtattagcttaccaattaggtcacgggttttggttatgcaattggcattggtgtccctgaggctgtcataggtggtagcaaagagttcatcaacagcttcactatgcgtcagtgaattctccacttcagcttcatcagtctcgatttctgaagcaaaaaaatcatgcaaaatgaatccgccaatgcacatttcaacactagacaaccatcaaaattaagagaaaaacgtataatccaaagtgaatgagcgtacctgatctcttgttgagagaggcttcaacaagtgtcaaagatttccttatgcctacttctgttgcactgatttgtttctggatatactgatccatgaacacaaaaatacattaaaaataaagaagctattgtttagttttaataggaatttatgaaggtttagcttggaagaacacacttacacagagtgtattcaatattatgcagagttttggtatcgtcagttcatccagtttcttaactattttattatctggctcactaaactcgagtgacttcctcttcattactggcattacattttctgtgaatcgagttaaaggaggagctgacggatacagaaacttcttgtcaactgcagatagaggctaattgtcaatatatcacagtatgcttctgaaaagttgcttaatttaacacatgtattcaaaatgttttcgtatcgcctttggatttggacaagagattctatatacactaatactataatcttaatctcacggaagtcccatacaaagaaacacaacaataaatcatgcatgttgcatgtaatctaccagacacatataagcctgctcaagcatgtgtctctagatattgacataagagaaaataattttatatagcatgttccatggttatgcaagaacttgactctgtaacaactgttagaaagatgtagggttggtcaatacctagttgatcgaaaactctctgaagataagtatccaagctatggtaaattaatgagagaagagcttggagatgtgtgatatcaacaggtagatgtaaaccaaacagctgagacacagtctgcagagtacgtgaaatgagatagtaagacggcaaatatattgtgtgcagcactaaaaagtaaaggtaggacgaatcatactagaagtaaagcaagaacgtaaacaaaaacaacaagtaaatcaagaggtaacacaaagcaaagaaaattgttttagcatactgaactcccacagtttgcacactattcagaataatcatgtcatgaaagtatgtaggtctacatacctcttctatgatcctgaatatttcaacgattgatgcagcatgtctttgttgaactgatagaggctcccactcctgttcatggaaaagctttacgattaaaaaaaaaaattccatcttttggacattcatactttggatttgattgattatggaaagtgatggaaggtctgtatatgttaaatatttctgacttcacggatccttcatttcattcagtctatattatcacttcaaactatatatgatgcaacttttgtttgcttcaaacattttctcaatacagtgatccatcaaaatagtttcccttatggccaaactttaatgtctatctactgtcgacagaaatcaacatgtgaatgttttgccaagaatatataacctcgatttcaaaagctcgcctagtccattgtaagatatgatcatgttgagagataagccagtccagcattactggtttgacagccttttctatctgcacataaaccgatggatagtctcttttatgacttattgacatgttaaattgagttagcaaaccagaaaactgagaagtgatataattttgttctgaaatccaatctatataagaaatcttgtcagtgacctcgtaattcttcaacttatggaagtaaggtttgcgcaacttagatttgctatggcaattatacagttgagttaactcttcctgtaacatataagcagcagggactacttttctaacatcaccagagagggatgaaactccttcgaggaaaggtgtctgctccagtagaacaagaacaattataaatatagatacaagtgacaaccttttttcttaagtattgtaaaatgcttagggacaaaccagtctttctccataaaaccgatgtagcagcatggccgagatcatcatacattcgggtaaccatttggagaaaactgggacaaactcgttgatctctacttttgcgatgacggttagttcatttgcaagcagagctagagcatgcgtacgctcaccatgagatttcacgtaagcaaaatgcgcagcctaggaggataaaatatcgaattaaagtatatctttacatcataagatagaacgataaaagaagtggcttatacagtatagaaaattagaaatacaagtaaccaatacaaactgaccctggcacatgcacctttgatagagttctgaacataggattgtatcttatcactaacatcatcactcaaggtatccagcttgataagctgctaaagaaaaacgatatatatcaacaaagatcacccaagtattcctccacatcacaagctgcagttcctttctttatatccaactaggaacttttctatcaacagccaaacactttatacataaaacatagtcatgccacgccagaaaattgtctaaccctagctagttagttgtactgccgaagagcacattaaagttatacaaatgtcagcatgaaaattaaaaagctagtttgaaactgctagttttgggataagcgtttttgcaagaatgttaacttcaactcaatatatataagtcaaatattaagacataaatagcagaaggcaaaggaaaacaccaacctcagttctggtacagtcagctggaggaagtccaactgttgatgccaatctgacaagcattccaaaatcacgaggtttctgaggagtagaagataaaagaaaaaaaaaaacgatgcttattatgatgtcctgatggagttgcaaaaacagatatcgaggagatagattaacaataatgaaaaaggtatttcgtcagttaggacgtagccaaaatcttatgatcttggttaccaagaaaaagaggacagtttacgacacagtgatatggtaccaagaattttggccagaagattcgaaaagaatatgcaacattatgtaaattataaggtcgttgccactgatcgagaactgaccttaccaaagtgtagatgatagtcctgaagtttatcatcacaccaagcactaactgaagttaaaatagccttcacaagacctaagtgtatgtcagttccaatggtttgccttgaacatactagatgacttaaataaagatcttccttcgggttgccactttcagcagaagtaactttctgcaactcctgaattgtgctccctagaagagaaggctcacctgtgcacacaaacttcccaggaaaggagcacatgtgatggctatcttaaactcgtgtctggataaattatgtatgcagcatacatgcatcggtacagtgaggatcatataacatttaagaaaactcaacatttagtactttaactattgcgtagcagcaaggggtaggacttaagcctggtttaccgtttatccaactgtgagtttagatgccctaaattttggcttccctaaacaagattactatttacattatatacatgtgtaggtgtgtgcgcgacttgagtatttatacctttgaatttaaacacgaaacagaccgatgttattgatgatatgttatttgtactcaatggtacatagagctctaagctatctttttgtgcacatccaaatagtgatcagttagatagagcagatttttgaagaataagtgataagacgtacctgttggaaaagaacccatccatatattgcactatgtagattctcagttatgcccaatgtcgaccaaattgatttcatatggaaaagcattgatgaggcatcctgacatgtatatgaagtcagggaaaataatgcatgacataaatgataagaagaaaaacaaggactaagaaaatctacctctatgacttgaccctcatcaagagtatcaaatacaccaaataatagtttctcatagagtctaatgttcaaatggtagatagcagtccagtaataagtttcttcttcaataccacatcggcctggtagtgatgacaactttgaagccacctgccttatagacgatagaacctcaatacgtagtgaagcagatactacaacatcccattcctatgccagccaaaaatagttttagattcaagaaaaagtctgttaagtcatatcactagatgagaatttgctggctacgaaacatccagatcacaattatagtgcgcacctttgagtctctaatcgttgcaaggcattttctcatagttgctcgttcgtttttctccagactaggtgagaaacagaggacttcttctagtaggttagcctacattgacgatggaaaaaagcacataattcaatgactgtagcaataaagctgagcaaattttcgttgcctttcagatattttgaatatgcatgtcgacgtgtttatgtaaatgtccacaggaccgcagaatgctgtagaagtaaacaaaattcgcaatccatccgagatcacaagctacatgtgcgtaatgaagcaggttacgttttagcttaagctgtggaagaaaagctatgcctatgtgccaatcagtcatatctttttctcatccagacttgcataatattatcatatgatctacggcaaaccatgaaatccaagaaatggctcaaagaagtttcataaggacgacaagaaaaaatagcactgtagtttgttatcacctgtctagtcttccacttcatgtagagcttttcattaggaaaatctgatttgaatattccaaccaaaagccccaatgctaactgtggaagatcaatttgttcacctgtccttaatgttgccaactgtaccagatttctccgtatgcatgtatccatctttgatgaaatctataaagcagaaacagtaagattaacacaagtgatgcaaacgaagttaagttgaaatatcgaactgctaattatattggtaagtaaagaaaatgctagcttatacttatagtataactaatgattttgaagcttgcctgcatctgtacacggatcatgttgatgacctctgagtgtgtattagagatctgaggctgcagatgtggtttatcttttcttttcaaacttaacattagtctagagcttttttctatctttcttctatgagtaggatacgcctcaacactgtttgttaagaaactaagaaaatgagagacaccacacagatctatctggaaaaagactgcaaggctgcaccataggcaacacagaatagagatgtatgaaggagaaaagagagtgagtaccttgaaagcaacatagaagcaatcattaattcatatgctgcttctcgtaaatcatcatccgataacccttcaaaatccctaacatcatgtatcagttcactcgaaagatggtaaaccaaaaagatcaagattcgcgaaaacacatatagtaatctaggacagaaaattcaaaaaacaattgcctaactaaatacctgttctcaagggtggcaagccaagaggaatgattttgataggtttcacgggtttgatgtcaggtgtttcctctttaaatacatagttgtctctagctgaaggagtattagaagaatccatgtgacgcgacatgtctgcaccattgttactggatttttcaatgttaactggaggaggaggcatacgatgaggaggagaacctgctaaatccggactcgacacaagaaaataggaatctccagactcagagtgtatctgcaaatttaaagcatcaaaactaatcatcttcaggattattaatcatcatcaacaaaaggtattagtgtttgacatccacagcttaagccagatgaattgcaaatgttttacttccaatcgtcaccactctacttcacaccaataatacattttcatgaattgtataccaacagcttgaagtgtttactataactatagttcccatcgaggtaagcaacaaaacaatcaagaaaagttatcactgtatgtctgtatcacttcaattatacgcagatgccatttaaaatgcaaattttctaagctcaattaaacgtataaggaaaccaacaaacacggatcattatagaaacgtttccttactgttacagggtatgatgaatcaaaattgtatttctctctgcccttggatacatcaactacaccacctgcattcgtgttcacaaaatggagtgtttcagcaatttctgatagatttgcaaatcaaaacaacgaagcagagagccaatttttccattaccctaactgtgtagaaaccttaatcgtcaacaaaatttagaaatcagacgaaaacaattcacaaatttataaactagtgtgggaaaagctgagaaaaccattaaacacttgtgcaaactcagagatagatactaacgaaggatggattattttctcagcgtaaactcaccggatttcacgcaatctaaaacataatcggcactgagagcatccaaatcagccggagaaagagaagtaggggaaccagaaggggaacgaagctcttttaccaaacccgaagacataagaaactccatgagcttgcggcgatcgttccggtaacgctgcaacagagaatccatctttgactcccgttagaatcaggaaacgaaaaaatcgcctctgacctagagcgtataatttgaaatccaggaagaagaatggagctgcagagaggctttttcagcgtgtactttgttgtcccctctccatggaagaaggtgagagagctttgggtttagggggaagcgcggaaaaagcacgaggactgatcagcaaaagaccaaaataaccttagaaagatccttttcatattctgacatgaatctgacttttcttttctttttggtaagtccttaaatgtttttgaatcattcgtaacgacggaacaattaatttcctgttaacgatgtcgttttgaatttcttggtaagtccttttaatttcttgttaacgatgtcgttaaaagaacgtttgttttatactgtgaccattttctttgtgatcggtgaccgcgccgattgtttctgatcattgaccacgccggtttacgattttcaaatatctttttgattttgtaattaataaacgagaaacacaaagctcagttgtttccacgttccacaccaagaaaattaaaaaataaagtaggactaatccaacgatttattcctacatactatcaataggcgcattgacgcattgtaatagaagatcaggagaaagagatatggactagattttctaactgcacaacactaaaacacgaaccagagtttacatatatctgaaacgttctggtctgggatggttcgttcggattgatcctagaaccagaacagattttactagacttcgttgtttgcgttcttcaagatgttaaacttgcagagcgggcaacgtgagtttatatgaagccatttatcgatgcaagtgcaatgaaagtgatggttacaagggagttctctaagttcaactccatcttcatattcacagagacagatgcagcattcctgcagaatcataagaagccatgcgttatcaattttacacactttcaaaatgtacaacttgataagaatgtggaaatgggattgtaccgcgtcttctggagagagcgagcgttcaataggtgaatctgttccacattccgtcattattccccgtgctttgcctgagagcttttcaacattgccagtttttgtaaatctgaatttcggcatttgatctatgtcgttcttcgatgctccctcctgttttgcgcaacagatttacatcacaagatgatacatgtagatcatgctttgaagctggattttgctaattctatgtagatgaaagaacattttgttatgggaaaagagcttacctggtcggcaacagcatatagaattgcaattatacatggaagacaacagcaaacagcaaggccgataacacaagccaatgcaacacagaacacaacaaagaaaacatcgaaaccgagaaaaatgatacacagcctgcaagtcaaaaacaccaaagtacaagttgtttatataactcccacaacgatacaacttcacaaagagactctgaaaaagaagcctaccaatagagctgaggagagtcactagatagtgtttggcctcctgcagaaacccagtagaatccaattatccaccagatgaatgagaacatcgtattggctgattcaagatgcttcgcaggattactgataccatcaaaacaatgtggatcaacaagaatcatacgaaaacaaaagaaactcagacaaacaataaacaaggaccaaaatagcctaaactatctcttaagactccacaacaagaccaattgcttcacatcaagcttgatatcaatattcaccaatatgaaaaataggtcacacaaaaagctacattgattcacagatacaataccatcaactaacattaacctaaaaacctagattccacatttcaatgtatatacagtgaacaattcgaaattagaaactccaattccagatcaatcagagatactgtacctagtctctcctctatcctccaattgcgctaacgaaacatattgctgcgacgaagaattcgtcaacccagaaccaccaccatcctccgggtgacgtcgtcgtctcctccgcctatactcaacacaaacacaagccatatgtaaccaacattgaatcccataaccaacaacccaaactctcaacggcatattaggcttctcgtcacggctaagtatcagaacagcaacaccgatggcaacaaaagcaagattccacaaaatgtcaagaaacaccacaggtttagaatacgcccaatcactttgtctctcttctaattgctcagcagcggtttctctaacgagcatcgatggttcacgcatcattctccggctaccagcgtgacggaggaacctcgctgcttctcttagaccttgtcgtctagcggatcgatgaattggattggattcttcatctacgcttatggttcttgtaacggtgggaggaagaaatggtgtagtgtcgatgattccgtcggaatttgatctaccgatgtgagtaggtagagatgatgaatctgattctgttgttgtgttcgtcgtcgttgatgatgatgatgacattgtgaagcttgtgtgattctcaattttgatcgatgattgccatggattgagatttgttcttaaaaaagggtttggagattttggacgtacaactttttcagaaaagtgagagagagagagaaataaagaaacgataacgtgaggaaaattaaaaaggttttggagatgtttccatggtccctatactctctcggtctctcctcctgttttcggtgtctttacatttttaccatttatagttgctaattgtagtgttgtggtccatttgaatttgccatttgggtgtcaaagcaattgacttttggtatggtatgagttacaatgctaaaatgtttgacattgaaatatatgaatgtttgaaaatcataatttgattaatttctaacataagcaaaaacaaatgagtaaaaaataaacacaatccaatcggataaatatttattcgattaaaatttactggttgtttcatacagttttggttcagtagttcttcgcaaaaaaaaaaaaaagttttggttcagtagagtgagtagttgagtaggtgaaccaacgtttaaatgggtcaacgaacccactttaaataaatatgggccttacgttttgtctagcccatatagtatggcttttcttgttaaaaaaataaaaactggtcatgatgcttaatatgacttcttttcgtcttcttctttcgtcttcttcttcagcgcctgaatgtttcctgtttaaacgtatctgccatggcggcaaaatcccagaaaaccctcgttctgctagcgaatttaatcaagtttcctccattaaaagctttttctctcttaaattctccaaatttccatgaatttcaacacacacacgaatcaatctcaatccttcttcgtctccttctctctgggaacttattctctcacgctcaatcacttcttctacaagtaatctccggaaaaatccactcccaattcttcacatcttcctctctgttacactatttgacagaatcagaaacgtcaaaaacaaagtttcgtctctacgaggtaatcatcaattcctatgttcaatctcaatccctaaacttatcaatctcttacttcaacgaaatggtcgataatggttttgttcctggatcgaattgcttcaactatctcttaactttcgttgttgggtcatcttctttcaatcaatggtggagtttcttcaacgagaacaaaagcaaagttgttttggacgtgtatagctttgggattctgatcaaaggttgttgtgaagctggtgagattgagaaaagctttgatcttcttattgaattgacagagtttgggttttctccaaatgtagttatctacactactttgattgatgggtgttgcaagaaaggtgagattgagaaggctaaagatttgttttttgagatggggaaacttggattagtggctaatgagcgtacttacacggttttgattaatgggttattcaaaaacggggttaagaaacaagggtttgagatgtatgagaagatgcaggaagatggagttttccctaatctctatacttataactgtgtgatgaatcagctttgtaaagatggaagaacaaaagatgcattccaagtgttcgacgaaatgcgtgagagaggggtttcttgtaacattgtcacttataatactttgattggtgggttatgtagagagatgaagttgaatgaggcaaataaagttgtggatcaaatgaagagtgatggaatcaacccgaatctgattacgtataacactttgattgatgggttttgtggtgtgggaaaattagggaaggcgttgagtttatgcagagatttgaagtcaagaggtctgtctccgtccctcgtcacgtataatatcctagtttccgggttctgtagaaaaggagatacttcaggagcagctaagatggttaaggagatggaagagagagggattaaaccgtcgaaagtaacatacacgatacttatcgacacatttgctcgttcggataacatggagaaagcaattcagcttcgactatcaatggaggaactaggattagtcccggatgttcatacctatagtgtattgattcatgggttttgcatcaaaggtcaaatgaatgaagcatctaggctttttaagtcgatggtcgaaaagaattgtgaaccgaacgaggttatatacaatacgatgattcttggttattgtaaggaaggtagttcttatagagcattgaagttgcttaaggagatggaagagaaagagttggctccaaatgttgctagctacagatatatgattgaagttctttgtaaagaaagaaaatcgaaagaagctgagcgtttagttgagaagatgattgattcagggattgatccatctacttcaatccttagtttgatctctagagccaaaaacgattcacatgtaagctcaaaataatgattagagcagttttaatctgagataaattaccgataatgcaacaacctaagctatgcagctacatgcatacacctagtcgagaaattatgacttgcattttgatgatttattctcagttttgattacaatcagaaggagccagcatccatggtgtttgatggtttgatggtttgtgagctcagagtataaccgccgagtcttaaaatttccaactgcggatccaagattcttctgactagagcaatgcgatcgacttccttaccaacccgagccttgcaaaagtccttgtagctaatgtagaaagttgcatcataggcgtcaagtcccatattaacagagaccccggggcttcttgaaatttccatagccactttaagaatcttcaaactggttagaccatgtgtgatatggttcctgaaagatgtggccacaacaagctccaaatagagaagaatccatgcattgtcttcgatctgtgacttgtccagcacgtaaaatcggccagtgtcatcattgaaaggatcctcctctaggggtaacttagaatcgcaatactcgcgtaatatgaaatccaactccataccggcgtcgaggatatcttcagtaagtttgatgtttttcttggtttcccctatacaaagattaactagatcataacccgtgctatacagcacgggcattaatattttttataaattaaattgtatactttgtttgaattacacaagaaatagtatagtataaaaatgatgccataatatttttcaatgtttgtactatttgcatataatgctgcattagattgactttgtttaaaaatgttatttttataataaatacaacatatgtagttataagtaaatgtgtaaaatttgtatacaagttgttttggtaaaaaacatgttttctttgtattagaggatctaatttttggcctaacttagaattagtctttttatagtattttggttatatttttggacctaattggggcctatattagattatctttaatagttctgacgaaagaacggatccgataaccaacctaatacccgaaccaaaaaaccgggttaaggcgggttaaaattttaggaaatttccttattgggtagagttttagtaaacccgtggatatccgattggtccgtaaattacccgttacctaaaaatagtattcaaaaacccaaacattaatttaatatccaaaatattaattatatttaatcgtaatattatctaattatctaagattgtaattataaatttaaatatatcaattaattttggacctaaatatccaaaacaactaaactattcaaaaattatttgttatgtttgtcaaaatttagtaaaatatattcaaatataattaaatttattaaaacttaacaaatttaaaagttttttttgtttggagacccgctttctacatacaaatttctcgtttctattttttttggtatttttagggtctgaaacgttttgtgcaaactgacccaaacccaactggatccgacccgaaccagaaccgaatatttagaattattctattgggtagtaaattatatacccattaatcccaaacccgaacgggttctacccgaactcgaatgggttactcatatgcccaaccttattctctgatttaattatctaaaaactcccaaaaaaacatatgttttgctgactactttttattataaaaaaattacatcctcttctgccaaaatcatttcataagacatcccaaaacccttggactaatgatttcatgaatgaagaatcctaatttgaatataccaagagattttgaaaggttttaagtttttgataggtgtgtatgtgagaaggtacagacatcgtgatggtaatctgcttatttataattttaatttgcagtataccgcaggtaggcttatattttagttaaactaaaaacttttattgtaaagatgattataaatatatgatattattttatttgattttaaatgtatagtaaactgcgagttgtatatgttttgttgatattatttatattgtttagtgtttaaacttatacacttgtattttgattgttaattttagagtttcacctgtagtataccatcttatattaatatcgatttaaacccgtcaattctaggattttccagcttgtattaaaaattgaatcacatcatacacataaaaaaatataatatgttattaattattgtaatatataaaattataaatttttaaaataatatgtatgaaattgaatataaatattcaaattatgactcagtactcagtagaaaattttcttaaatctatttttgacccgttataatatttttcatgtattgaacagtttatattctttttaaaaaaattcaaattatgtcatatcgaaaacaaatctaattatttttttataacgatgatattatttttcgcaaaaatagaatcatataaaaatgagaggtggactataataattaataaaaaaattaatatgataatttagatatcaaatctaatttgttgattttaattggttagttttttggaaattaataatgtattttgttttaattaaatttaattaattaaattagtatttgattttttaatttttaaagagatgaattaatttactctttaaattttatttctaatagcatacttatgtaattacttacaaaaaaataaggttacgtttaaaatgtacttcccaaataatatagtaggatgaattttgtgttgtataccaaaccaataataattaaattttacgtacctagaggtctagcaagacaattcaaacagaatcggccatatgctagttcacaaacttgagaccgaaaagtttgaagcgaaccaatacgattggtctctggagccacggcttggaaagttatgcagtaagtggatgcagcacaaccagtggaccggatgtattcctctacgctacagagtttcaagtctttaccctaaacattgaaattggtcaaagaaagaaatcgacttactaattaaaaaaaacaaatgtttgttatttaattacctggaaaacattttttttattttattttatattaaattaaacttaaaaaagaaggccaatgttgttacaacaagtgctaacgttagtttaaagaatataatctggaaaacagagtcttatttctaaaaaacagagcttaagttatttctctctgaagccaaacttgaaaccctctatcaaatcttctatcaccactctgttttatggccatcaaatgatttcgaatgtgcttatctatccaactgataagccgacttgaagaattcggagaagctccatgtttgcgctcgtttcgctctcgccatagagtgtaaatcgtcacctgcaaaatgcaacgggctaggaaacctgcaatgcgatccggccagttgcgtgagacgttgttgatgatggtttgccaatccgtgtaaaaacaagtgttatagatggtttttgctagcggttcccatatttctgttgcaaagggacatgaaaagaagagatggtcccgagattcaagcgctttgttacataggatacatgtcgcatccacccccatgttccaaagtgtcatcctgtctcccgtagagagcctattgtgaacggctaaccacatgcaaaaagcgtgtttaggaatggcttgagcaaaccaaacccctttataccaagccaccttatttgaaactgtgcgaatatgattccaagtatcctttgtagagaaaatgcttcgaaacctattctctttccctttccaaagtgcacggtcctctgcttggtttcgggagttccaggacagaataagtcgctcctccactctgtttaagaagttagtgcggtgtcttcttcttctccggttaccccaagcctctaccacagttgcgtgtttatttatccccagatcaatggctcctcgatcccctgcactatcaatcagtcttcctaaatcactccaatcatcataccaaaaagaagtccgggcaccattgtttatttccactttacaaagagtcctcgctatgtcacgaaacttaaggatctttctccacatccatgagccgagacttgtattttcccttaccgcccaaaaagaaactttcttaaggagagagctttgtatccacttgacccacaatgagtcagcatgagatataatgcgccagattagctttaaacaacaaacatcgttagcttcctttagagatcttaaacctagacccccctcttccttcggtttacacacaaacgcccatgtgatcttagcttttgatgtatttagctctcctcctgaccatagataagcagagcacatcttatcaatttccctgatacaatcccgaggcagacggaaagctcccatccagaaattacaaatactccaaagaactgagctgattaggttcaatcttccagcataagataaaaaacgagctgaccaagaacaaattttctgcctggaaaacattgtaacaatgttacaatgtgttacctagaaaacattgtaacaatgaagggccaacttagcataaagggggactaagacacgatgaggagcgtatttctctttggacatggtgctatgcacacctctgtcgatataaaactcctaagtaagacacgtttctttgttattagcaaaaattaagaagatccgatattgagagtatcaaattaacaagtagaggaaaatgaaagcatatataattcttacatccaatgtaataatttcctccgtatcctcggacctgtcacgctcatcaatctccatttcctcttctgatcctaacaacaacggcggcaccatcttctcttcggctgttggatgcatggatgcattgctttctgttttttttgggtcgatttatatacctcacttctgggctttaattgggcctcatttatattactcttcatagcttagggaaggtcctacggaatgtataccacaactctttttctaattaggatggaagatatttaatatatattctcgcatcagtgctacttataaacacacatgattaatgaaagtagtgttattattttgataacgacaaatgaaagtagttgatgcatgataaacaattctttgaagttttattcactctacgacttcatgaacttcaatcgtgccctgcaaaaaaaggttattgcattggtttaattcggttctctagtaatttccggttaagtccaatggatttaaagattaaaaaacccaaagtaaccgttggaagaagacgaagaaagcagttcttcaagaagaaaacaattttcaattcgcgtctccgtgagagagaaaatggtgaacgcgattttaatggcttgtatactcgccggaattttcgtcggaatgttcaacgaagtcgacggaattcagattttatcgaaatcaaagctcgaaaagtgtgagaaaacatcagattctggtaatctcaattgttccactaagatcgtcttgaatctcgctgttcccagtggatccgtaagattttttttcttctctaaaactcacatttatacttgttttggttttgtgttcatcaattttgtttttacttgttttggttttgttgatgaaactaagagtggaggagaggcttcgattgtagcggagatcgtggaggttgaagataactcgagtagtaatatgcaaaccgtacggattccaccggttattacagtgaacaaatctgcagcatatgctctctatgatcttacttacattagggtaagtatctagagtttgattatcatgaatttagtctagagttataaggttaatctaagttttgaatcaacgttttaggatgtaccttataaacctcaagagtatcatgtcacgactcgaaagtgtgaacacgatgctggaccggatattgtacaaatttgtgagaggtaatgatgcttaaatctcttctccgaaggagataaatttaacttggtgtgagttctgtctctagaagatgtgtggtctttgagcttgaacttccatatattcaaaaaaaaaaaaatgtttaaatctctctcttatgtgattgtttctgatgagtttatctttcactaatttttggtgatgatcatcatacaggttgagagatgagaagggtaatgttttagagcagactcagccgatttgttgtccatgtggaccgcaacgaagaatgccttcttcttgtggagatatttgtatgtgtttctcttttgttacgtttaaggaatgtatctaaatatggattctcatttcttctcttgactttgtgattagttgataagatgattaaagggaaggcaaataccgcgcattgccttcgttttccaggtgactggtatggatctttacttgatgtttatcatctgctcctgtgttcaaagatagaaactattgatttctctcatgtaggttccatgttttcgggattggacaacggtcactaggatttagtgtgcgagttgagttgaaaacaggaactagagtttcagtatgttttacttcactaaatacccttttgtttccagtcactcatactcagccttacgcttcttctttttttgatcgtaggaagtgatcattggtcctgaaaataggacagctactgcaaatgataactttctcaaagttaatctcataggagactttggtggttacacaagtattccttctttcgaggacttctatcttgtaatcccaagagaggtaactgcttatccatttgaactcttttaacttgcaccgcgctgtaagactaaatgaatcggttgaaaaaggcggctgaagcgggacaaccagggagcttaggcgcaaattactcaatgtggatgctgcttgagagagtgagatttacattggatggcttagaatgtaataaaatcggtgttggttatgaagctttcaacacccaaccaaatttctgctcttctccatattggagttgcttgcataatcaactatggaacttccgtgaggttagtatttatttgttacacctttctaaacacgttaccgcgtcattttctaaccgataacaagtttatttcagtcagatataaacagaatcgaccgacaccaacttcctttatatggacttgaaggaagatttgagaggatcaatcaacatccagttatgttctagcttttactagtttctaaatcaatataagataagattttctgttggcttatcggattatgctttacacgatacagaacgcggggcctcactcgttctcaattggagtcacggaaacactcaacacaaatctaatgatagaactaagagctgatgatattgaatacgttttccagaggtaaactcttcagctatatagaaatgctgattataaagtgaagtttagtaacttttctatggttgcaggagtcccggtaagatcataaacatcgcgataccgacattcgaagcacttacacaattcggagttgctgcagtcataatcaagaatactggtgaagtagaagcgtcttatagcttaacggtaatatccaaaactgaatcttatctgatagtttggttcgatatagtaatcgcatttcgcttccttctgcgcagtttgattgctccaaaggcgtggcttttgttgaggtaactaactctttttaaaacttctaagaagaagcgttgtttagaggaatattacaaactgataatgttttcaggaacaatttttcattataaaaccgaaagcggttactactcggtcttttaagctgtacccgacgaaagatcaggctgcaaagtatatatgcacaggtgattccttataaaaaaagactcacctcctccctttaccttgcctgtttccttgcataacaatcctctgttttttttgtttgtagctatactcaaggactctcagttcagcgaagtagaccgagccgagtgtcaatttagtacaacggctaccgtacttgacaatggaactcaggtttcattaattacaatggaattcaaacggttttgattaatgttgatgttgataattaagtgatcattttcatcaacatgcaggttactaatccatttcaaattccagagactcaacctaaaggtttctttgattcgatcaggatactatggacgaaaatcatcaatggtttagtcgatttcatcaccggagatacttgcaggttacaacacttttcctaacctaacttgtcataataataacttgaaaagtgaactaatatcaataatattatgcagaaacaaatgctcgagtttcttcgacttcagttgccacattcaatacgtttgcttaagctggatggttatgtttggtcttctcctcgctctcttcccaattagtaagtgtttcaaccgcaaccgcaaccgcaaatcgctaacataatatcgaagactcgaactaacggttttgttttcagcttgtttgcttctttggctcttgcaccaaaagggactctttgatccatgctacgactggtgggaagatcatttcgatttagaccatcatcggagattattaccctccagagcagacgttgttaaccgccatcatcaccatcacaagcatcgtcatcaccataatcaccatcgtaggacacaccagagacacaaacatcatcatggtcaagacgacgacgtattgcagaagatgatgcttgaacgtgaccacagcgactctcactactaccaccaacttcatcgagtccataaagatagcaagcagaagcagcgtaggcgagccaagcacgggatcgtcctgccacgtgatgtgcacgtggaaagacagaggaaacaaagactacgtgagagttaaagagttaaaacttaaaagtgataatgtcagatttgtatatatgtgtattaaaccgaatcccaactggattgtgaagcaaaaatatatccgagttaaaaaaaaaaaaaaaatctctctattttctggtataaatagatacaccaaatagccaacgtagttcacatttatttttccccgaaaacttctggttcgtatcattatcatcgttacataaaaattttattttggtttgaccacggtagagagaaagatggcgactggtgattctctcgaagatattaagatcgagattgatgatgatttggtatgaaatttcttcttctttttactctgtaaattcttttgttacttcaatttcgttacgtttgtttaaaagtttacgtaaggaaagttcagtttatttgttttctatttaacgattcgattaagttagggtttctattcattctgttttatttatttattttgcgtctgactataagaatttccattggttgttatacttagttgtttgttatttgtgtaaaaataaaattctctctgtttttttttgtttgattgtttagggtttagggtttagggtttagggtttaggaaaaaaagacatattaaaaaaacatattaaatattaattataaatgtattattttttgtgttttacagttttctataactctaaaccaatgataattaactatttttcttgaaaattacagttcgacaatactaaccaataaatattgcatgaaaaacttataaaatcaatttttttgaaacaattttttttctagaaaaatcaatcatttaggaacaaagagtgtaatgtacaccagataattagatcatgttcatattatattgcaggagaaaatcccaattgaagaagttttcaagaagttgcgatgcagcagagaaggtttatctggagcagaaggaaaagaaagactcaagatctttggaccaaacaaactcgaaaacaagaagaaggtaaactaaaactttcatatcttttgtggcttattacaataagtaaactcactaactatattatggtggtttcaattaacaaacaggaacacataacactcaggttcttcgctttaatgtttaagcctttatcttgggttatacaagcagctgcaatcatggctatgttgtttgctaacggcgatggaaggcaactatttctcggtattgtatgtcttttgatagtcaacacaataatctgctatctcaaagaagacgatgccgcaaatgttgttgctatggctagggctggtctttctcccaaaactaaggtcctctttatatactccctaaattcttcttttttctttgttgttctatactcgacatacgacctcgattggtcgtttgtttgcgtttatatttagtgtatacgcgggtggtttagttatgttatctttgaattgagtagtttttcagcaccctacttgttttcatatagtgtcttgggggtcaaaaacaatctagtggtccaacaatttatgagaaactgaaaaattggctttaacaatatttatatatattttgaatataggttttgagagatggaaaatggtcagagcaagaagcttcaattcttgttcctggagatatcgtgagcatcaagccaggtgacatcattccttgtgatgcacgtcttcttgaaggcgacactttaaaagttgatcaatctgctctaaccggagaattcggtcccataacaaaaggtccaggagaagaagttttctccggtactacctgcaagcaaggtgagatggaagcggttgtgatcgccactggagtccacacgttttctggtacaacggctcatcttgtcgacaatagaacaaacaaagttggacatttccggaaagtggtaaccgaaatcgaaaacttgtgcgtaatctccatagccatcggtatttcaattgaggtcattgtgatgtactggatccagcgtagaaacttcagtgacgttatcaacaatcttctggttcttgtgattggtgggatcccccttgcaatgcctactgttctatatgtaataatggttactggttcccttaggttgtatcgaacaggaactatcacgcaacgaataaccgccattgaagatatggccgctattgatgttctgtgcagtgataaaaccgggactctaactctcaacaagcttagtgttgacaagaatctgattaaggtttattctaaagacgttgagaaagaacaagtgttgctattagctgcaagagcttcgagaatagagaatcgagatggtattgatgctgctatggttggatctcttgctgatccaaaagaggtaagaaattttaaaaactctgtttttaaaatgtttttgtttcttgaagaaaaaggaactcttttttctttgtcaggcaagagctggaattagagaagttcacttcaatctagttgataaacgaaccgctttaacttatatcgatggcaacggagactggcatcgagtaagcaaaggaactccagagcaggtaactaaaactgactctgttttacttttaagtagagtagtactgtttccctctaactacgattaaccgtttattgatgattcagattcttgatctttgcaacgcgagagatgatctgaggaagagtgtccactcggcaatcagaaattacgctgagcgtggactcaagtcatttgccatatcttggttccgaaatacaaattgtaacactgtctttttttttccttaccaattatgttcagagcacaaataccatattgtgaacaagttgcaagagaggcatatttgtggtttgattggtgatggagtggatgacgttccttcgttgaagaaagcggatgttggtatcgctgttgcgaatgctactgaagctgcaagagctgcttctgatatcgttttgactgagcctggacttagtgttatcatcgacgcggttctagctagtcgagccattttgcaacaaatgaagcactacacagtgagtgagcaatgctcttattaaactatacacagcgttttgtttttcattttttctgatgttttctcatgtatcagatttatgcagtttcaataaccatccgtgttgtggtaagttaatcaatcttgaatgttttctttaatatcatcaaataatctctgtttatataatctctctttgtaccttttttacagtttgggttcatgttcatcgctttaatatggaagttcgacttttcaccattcatggttttggccattgctttgttaaacgaaggtgagtttttcttctttataaactttgtttacttgctataaaagccaaacaataaaaaaacattattaacaattactcaacagaaaccaccaaggctatcacaatggataatgtcaccaatccttctcctacaccagatagcttgaaactcaaagagatcttcgcaaccggcgttgtttatggcagttacatggctttaataactgttgtgttcttttgggctgcatacagaaccgatatcttcccggtatgtataaacaaatctctcttcaaatctcccataacaacacaagcatactataaagttataacctcttgttttgttttttatatagagaacgttccacgtgagagacttgagaggcaatgaagcagagatgatgtgtgctttatacttacaagtgagtattatgagccaagctcttttcttcgttattcaatcaagaagctggttttttgtcgaacgacctggagagttattgtttctctctttcgtgacagtacaaactgtaagtatatagaaaaacatgattctgtttcttcttttttatttttcattataaagaagtcttcattgactcataaacttgaccttgtagattgcaacaacactcgcggtatacgcaagttgggaaactgcgagaatcgagggaataggatggagttgggctggagttatttggctctacaacatcatcttcttttttccattagacataatgaaattcggaatccgttacatactaaccggaaaagctcagagtctctttgacaacatggtacacttagttttgaacagttatgcaaaactcagcaatggaatatacaaccatactcaagctgaccatacttactcactcttggaagtgtcaactcctccatcccaggacttgagaggcgttgggtgggtttaatatcataccgtggtctagtttgttttgttttagttctttttatttgtttttggtgtaattttttttacttttttttttaattgaaattttagttaaatagaaattagcataatttttctactactccgtcttcaattttaattttcttcaactcttttttttttctttttaagtgtttccttaagttatatcactaaattgaaaacaatatatatagtatacttaaaacagcatctccagtgataacacaaggaagaaccaaatttggtgttttggtatctcaaatctcacactaaaactgaatttattattattttattattaaatctaaaattattttatattttgataaacattatttatttatttttttaaccctcaaaaatcatttattgattatgaatattttatctattttgtaacccacaaaaacaataattattttataactaatataatattataatcggtaattaaaaataataataaacaaattattttagacatgaaaaattgaaccctgcaaactacatgattaaataggtagaccagtattttcctattttgatttatgaatcaattaaaacttacaattacatactagtgtataacaataaacctcaaaaacttgtgatgaatgatgtaggaaataatagtactcttttgaatatcaacttaaatgtattttagcaatttgactaacaaacaattgttcttcacttttaataatcatccaatagaaccatagagaaacttcaagactttccacaaaaattcatcatcatcacataaccaagaaaacaaacgaggaaaaaagcccaaaaaataagagaaaagaccttaaaacgacgagtttcaccgatccaatcttccattgcaattttcacataacaaatctttttctttccccttgctcactccaagtctccaagcccccaaattttttcacaatcaatcatttctttgttgcgaaccaaacttgtgatatggcgacaccgaatcaggaagcaatcgacactttcatcagcatcaccggcgcttctgacgccgtcgcccttcagaaactcgaggtgattcgaatttcttgattcatgtccttgttcgcgattccttatgattcagatgtttgatttcgaagtttgtttagaatcggtaaagtgaaactgaaagttcgatgagacgacgatcgtttgattattctgatgctttttcccttactcgttttgatatttgatgttttggggttgaaattgaagttgattttcagaattttaggttataggatggtctgattgagtttctagaaggatttttgttcttacattgcttttttcgctcaaacgatatctcctgaattctcgcgtttattacttgttcattgatgattgtatgattgtctccaatgttgacagagtttttaattcgaatttgagagctgattttgattactgcaggagcatcgtggtgatcttaatcaagcagtgaatgcatatttcagcgaaggagatcgaaatgtgtatgacatctctatctcactgatgattattttattatccttctctcttgcaaatttatcaatttttttacgttgttatgctctttgtgtagagtacgtgaagcgccggttaatgatgatgatgaaatggatatagatgatgtgattccggctccacaatctcctctctctatgttcaatgcagctagaacaattggccgtcctcccttttcgcttttggattcggactttgctagacgtgtatttgatagcgatcctcttatgccacgccctccgtttgttagtcatcctagagaggttaggcagatacctatagaggttaaggatagcagtgggccatctggacgatctagtgatgctcctactattgaagatgtgacagaaacagctcatgttcagggtccagtaactacccaaggaactgttattattgatgaagagagtgatgatgatattccttttgcaccaatgggacgaagtaggcaagacagacctgctggttctgtagccaataataataatcaagattacaatgatatagaagaagaaatgatcagagctgccattgaggcctcaaagaaagaggctgaggtaagcttctgtaagaaaattggctgtattggggttttgtcttagtgaagtagcaaatttatgaggttttttatattttcttatagggatcaagtaaccctttacttgaagagaggccacttcacatggaagatgatgatgacatagcaatagctgttacaatgtcattgaaggtctgtggttgtctcctctcttttatttttgctgccatctatctttgatcacttttaacacaagttagtgcagtcagcggaggaagaagttttgcgcagtcaagggtataaggcctcaacctcggaaataggagcttctgcagtgactgctgctcaaggacctcaggatacccaggccctgaacggaaggtttgttggttcttctctgtaacgctttgctactgtgttatctatgagcttaatatctgcagttgcaaaaacatctgtcaagcagtttgtctattggtgtttgtcaaaaatcgatgtctaactaatcgtcttttatattgtctagattggcagcacctagttcaccatttgatgatgactctgatgatgttgatgagcaacctcttgttagacacaggccaagacgtgcagcatccggatctctggctccacctaacgctgatcgttcccggagtgggagtcctgaagaagaacatgcaagtattaatccagcggagcgtggcagtgggtttccttctgaggtatccgtaaaatctgttttgtttattacactgaaaccagactagaattccagtattacttattggttagagtagctagtccttacctttgctaatactctattgtgtatgctctagtggggaggcatttcatctgaggaacatgatgaagctgtcatgctcgaggcagccatgtttggtggcattcctgaaactggatataatcatcttccattcttacctcctcagccgagggcccaaccacgtccaccctcaccttcgctgacagctcagaggttgatacgggaacagcaggttaggcaacacttactacctacttgactaaacccctctactatattgagagttatgggttattataaaattcttgagctgttacatcgagcaggatgatgagtatgttgcgtccctgcaagctgaccgagataaagaaatgaagtccattagagatgctgaggcacgtcagctagaggaagaaactgcgagaaaggcttttctggaggaagaaaagaaaaaagaggaagaagctcaaagaaaactcgaggaggaacaggtgcttcttctgttttcatttatatctctctttgtaaatccgcgttcaaacaagtttttgtaaatatgttgactgcggattgttttggaggcttctgctagtggatagagaaagatcagccaaaacacctgcagctttattacatcagaaaaatgtatctctatacaatacaatagctgtgaaaataatctggtttgagttcctatgtaggcgttctcttcgttactgatttaagttttttttttctctgaatgttgttgcaggagctagaaagacaactagatgcaaaagaagcgtctttacctaaggagcctcaagctgatgaagagaatgccattacccttctaatccggatgccggatggaacacgtcggggccgccggttccttaaatctgacaaactccaagtcggttttccctaaatttcatttcacttagttttgcattactcaaaatatattagtaaataactgttggttgcgctcttttgcagacccttttcaactttatagacattgccagagtggtgaaacccaacacttacagactggtaaatcttctacctatgtaaataaatctctctcttcttgcatatagaatactccttataggatgttatgagtgccggttccgcatcaggtcaatgactcattagggtttagactcccggccagccctgtggccatactggctagccagcggttaactaccataatgtatagcaaaagtgatgcttgaccggtttggtcctataccggacggtttaaaatcattagaaaattttcaaggtgtcttaagttttagtgtggtgaaacaggtgaggccatatccgaggcatgcgtttggagatggggaaagtgagtcgaccttaaacgatcttggattgaccagcaaacaagaagcattgttccttgagcttatctagttttaagctcttaaatatataagaagaattacatttgtcttctgcttagaaaactctttaattttcaagttattttttttatctttctttatacaaaagaaaaagtatttgttgagggtggaggattatatggtttataaaaccgtcgtcgtttagtcgtttcagttgtacatacaatactgcctaatgtctgtctctctatctgtctagtagttataatgtttatcacatcttcaaatttgctctttcagcttctgatttataaaatcaagagtttgggaattagatgggtaatacaactccctacacattaaaagagtcacaaattcgttttaaacaatgattccccacgagtgattagcgaaggttttgtacactggagaggagagtcaaaacagctgttcaagttttggtgttttttttttgtgaatgaagaagctttgttacagtctcacagaggcattacataggaaaccttaatcatatttaaccacaaaaaggaaagaaaaaaaagaattcatttaatcgaattgaaagcaaattgatatttaatataatctgttcattcatcagacaatgatactgacagcatttaactcatcaatagaacatgaactgggcaatgtaagcacaacattacaccactcaattttcccataaatctcttgtgcattgcgtctttcaagcgcaatctcagcacaccaaatggtaatcttgttatagccgataagaggacgcacttccttctcccaaaaaatcgcgacctttccaccataatccaccaatctaacatgacgactaactaacactcgaggtaatttcggtagtagttcttccaaaccattcaaaattccccacgagcttccttcagggtcataccattcgagcaacctggaatgtctattgtaatagtagatgattaccttatctatcacgcaaaaagaatcatggggaatccaatggaaatttatctcaaatcctaccacatcccacgttttttctttaggcttgtaaaccaaatttttatccccaaacaggtaaagctttccatctatagctaagctgtttaatccaaaacgcccgcgaatccccgtgctagggcttgccacacactcccatatttgggttttgggatcgaaaacctggatcaaattcgaggagacggaaactttgcatctttccactacatatattttcccatcaagaacactcacctcgttgtactttgcggccacctgcatgcctggaccttcgtgccaagtgtgagatcgacagtccatgaagaagaccgtagaggagaattccccaatcatgtagatattagaaccaagtgtgatgatattcttgagcccaaaccgaggacaataattgcgaatagggactgacaccaaaagtttttcatcaataattgcgaagtgaaccatcgtgagttaaggttaggggttcgagttggtcttcggcacagagtgaaccaatgtcggtcaaatccagacatggattctaggcacacgtaaagacaactctcggtttgtcctaatagctttcggatcttataaagctcaggcgatgccacgagagagctgaatctcttggaaactaaggagagaatcgggtagtacaatctcgagacgcgagctaagcagttcaaaagtaaatcatcaggaagagaagacaaatcaactggtgaattcatcattagcacaaaacccttagacaagtaaatcaaacacaaagagcctttcttgttaaactactttatacctaaacttatatgttccctaaacttattaactgaataagaaccgtgactcttaatgtaatcaatctagatttggatatgtacttattaggaaatcttcaagtgacaggatcgaacaaatatgtaaaatttccttctttattctttagactgttaatgatgaactgattcgcaagatatttggatcgaaactagttaagcttctaaagtattattgaaccattctaaattcacatgaaaaggacttttacacaaaccgaatttgaaacagagaaaagaaggaaacaacacataactgagcaaagtgagatgcattatatagaaaatcattcaatcaaataggaaataaaaaaatggtgttaatgattcattcatcaaacagtaacagccgcaaaattcaataaagaacatgacctgggcaatgtaagcacaacatcacaccactcaatcttcccataaatcttgtttgcactgcgcctttcaagcgcaatctcagcacaccaaatcatcttcttctgagggtctccaccacccacattcttctcccacaaaaccacaacctttccactataacccaacagtctaacacaagtacaatcctttggtagtttaggaagttttttcaaacccttcaaatatctccacaatctttcctctgtgttgtaccacatgagcactctagatcttccgtaagagtagattacgttatctactacgcaagatatataagagggagtccaacgtaaaggcatctccaatcctaccacatcccatttattttctttgggcttgtaaaccacacgtttatccccaaacaggtaaagctttccgtcatagactaaacttcctgttatataactaccacgtatctccgcgctagggcttggcacatgctcccatgtttgggttttgagatcgaaacgctcgatcaaattcgagtaatcgggatttttgcagccttctattacatatattttcccatcaagaaccctaatcatgaagggtttctttttggtcttatccattcttggaacttcatgcaaggtgtgagaccgacagtccatgaacaagaacctagacgagaacgcaccgttggtgaatactctaacaatatagatattagaaccattggtgatacgagtcaactcagacggaggagtaataaaattggaagttgggactgggaccatgagattgttgtcacttgacttcttctctttcttcatagtgtgtggtataaagcaagaagcgaaccatcctgagttgaaattagggttagggcttcgagttggtcttcggcataaagtgaaccaacgcggctcagattcagaactgaaacgtaagttcagataaagacacttctccctgtgtcctaagagctttctgatctcataaagctcaagcgatgccacgagagaacggaatctcttggaaaccaaggagagaatcgggtagtacaatctcgagactcgggctaagcagttcaaaagtaagtcatccggaatataaggcaaatcaaccggtggattcatcattcatcattagccaaaatcccttagagagtaatattcagactttaagagcctttttaactactttaatcgaaaggctaagagttatatattgagattcatcattcgtaatattcgtactcggaatataagattctaatttatagtcctggagaaaaaaatatttcctaaatctaatttgtatcgaaactcttatcttgtgtaacaatttttatattatatagatttagattaggaaatcttcaagtaaacagaatcgatgtagacggttaatgatgaatttatctgcaagatattcaaaataattaaaatgtatttattatcaaatacgctagacaagttttctctctctttttctagattttaaatcgttttaacaaattttaaggtgaattgtttagtccatatgttttttcctttaattcctcttgattgattcaaagtgttctccattaactaattgtttagtggtgttattgacaaaaatgattgtgtggttctaagactttccattattagatgagaaaaaaattagttaatggagaaccacgtctttagaaccaaaatttatggaggtaataagaatttaatctgtacaaaaaaatagacacctctaactgaccttatatatacttgtaacctctttgcacatttattaacttttaaaacatcatcaatttctgattagcaaaaaaaaaaaaaaaaaccatcatcaattctttaacaacaaaatattaaccaaaaaaacatcagcaatttatttattatagcatacaagatgaagaaacccagtcaactatcggccaccattctaactatctttgtgatccttgctataggtttgtatttacacttattataaccatattaaaataaataagttgtcaagaaaatgtttttctcttaaaatttaaattcaactatctaatatcaaatctatatctcacttaatatcactttcaatacttttatatcttaaccttgccaaatataagatatagagtgtacttgttttgttataagacttaaattactggaaccatgtatttttgaaacttctttatacaattttattgtttccatagttttttaatttttacatgtaaattagtaatataattaaaaaataaccaaacctaattggaaaagtatgtgaataagtctttggagggaatagcaaatttattccttagtaatgttgacctttgaaaacccataacgagaagagcgtctggtacatgaattagacaccataattggttagctaggagaacatataattcaattcaaacattaatataatcttcacaaagtttttaattaaaatagaaattgacatctcaatatttatcaataggggtgatggtgaaggaaacattgggacaagcgccgagtacttgttttgaagctctaaaagatgcttctaagggtgcatcatgtgactcggaattgtgtgcctctctatgtaagaagaaatccggcggcggtgttggtacttgtagaacaaagacgacacaacccagtaaaggacaaccagaatgccactgcaggttttggtgtaaatcagatggaaccccctacaagtagaattttcagaccatcaatttatcaagttaaatacatggaacacggagtacctcacatttttcatttgatgctataaaattttgcaataattgtaaataacaatactaaataggtaattataaaaactatatactaaataagtagaccatgacataatcacttttgtgctaattttgtcagtgcatgtcatcacataagtatgaatatacataatgtatgattttaaataaaaattatattgattatcagagatattttgtatattttctttctattaattaattttccatttaaaatatttcaatatttatttaaattttttaagaattatatctgatgaccaaaaatatggaaaataaaacttcaatgataaaaaggtgaaataatttatcatcttagatataataaattattaaaaataaactaaaattgttaaagaaggtaaaaaatatcatagttttttgttagtcactctttttatttagccaaaataataagaactgtttatgttattatcggttatgcattacatttacatatatctgatggagtaagcaaattgttttgaagctggaattcaaatagattggaaaatttccgttaatagttgaaagaatgagtgcattcgttaatcttatgtcgtaatatatgggaaaatggtcaactgatacatcaaatatcaagtagaatacgtatatttcctagtgtagtacttacgttgactgattcatgaataaactaaaacatattttgactagaaagatgattattttcgggaggttttaacaaataccacttttatgtgatcacttttcaaaaccaccattaaagtaaaatatcttcaaaataccactaaaatgagatgatgtattttaaatttactctccttaaaacttcaaacaaatctttacgaaagaagaatccagggtgacaaggggatattttaactttaatatagagtgaagctgcataccttttggtgggttgtaatattttataaaacctcaaataaactgcaagtgcacgattacatagtatttaaagatcaactgaattaaccaaccgatcagtcatttcaagggaagtggtcaatccatcatcgtcaactatcgcttgccaggtctcagtgtctcactgctgctttgtctggtccattgactttctctccacgtttcaccatcttccaagctctccttttgctcctcatttgtcttcctccttgataatggctccaaagtgatccaaatacctaggaggttatatgtaattttcccttgtttttattaaaggctaatgatgaattgatcttttaaatattttggataggacttaaaaactatccatactaaaatcagatgtaaaagactttctgatacaatgatcaaatcttgattctaccaaaaaaatttttaatatattgtagtttgtagttctgcttcttctgcatatgaattcactttcatttatatttttggggatacatgtttgtaattgagacatacagttattagatttttttttttggaaatgagaagggtaaataagtttctacacaaacacagaagggtcttaaacttgtttagtgagaatttgttttggttgattctctactagccatgaccgagtgtatatgtactctagagagtcaatatctcttcaagtgcttaaagtaaccaaatcttatgttttgtgagcaaaagcaaacagttttttatttagatcttggctgagttaaaaacagagtgaaggcacaggagtcaccaacaccagcttccaagctttcaaaactgattgatatataagagtttgcggaaccggctaagtaccttggtaatgacagtttaacccatttttgaaggcagactacgatattggtttagcacccataatcgctaatgatcttttcatgttgcaatctcctaaaatgttttagatcttcggctttatgttgcattcactgtaagactgttttctttgtgaataaattttacattcatacaaaaaaaaaaaaaaagagtgaagtagagaagagaaggaaacgacacatatctgaaaacatatccgaaacagagaaattggtttactctaaaatcattcaatggaatgaaaagcataataatattaatggctcacgtattcaatcatcaaatagtaacagcaataaattccaataaagaacatgacttgggcactgtaagcacaacatcacaccactcaatcttcccataaatcttgtgtgcactgcgcctttcaagcgcaatctcagtacaccaaatcattttcttgtcagagccgacaacacgcactttcttctcccacagaatcgcaatctttccaccataatccaccattctaatacaagaacgacgatgtcgtaatttaggtaatttttccaaacccttcaaaactctccaatatcttacctcggagtcgtaccatatgagtcttttataaaataccatataacatacattatctatcacgcaagaagaaccatagctaaccaaccacaaattcatatcaaaccctaacgcatcccatctactttccttaggcttgtaaaccacatttttatccccaaacaggtaaagtttttcttcatagactaaaccttttgatatatacctcccacgcatctccgcgctagggcttggcacatgttcccatttttgggttttgggatcgaaaatctcgatgagattcgagtaatcggaacctctccagccttccactacatatattttcccatcaagaacattcacgagtggggactttcgggctacctgcatgcttggagcttcatgccaggtgtgagaccgacaatccaagaagaagaccctagatgagagcacaccatttatgtatcccccaatcatgtagatataagaaccaattgtgttacaagtcaagccagacagaggacaatcattgctagtcgggattgagaccataagattttcacttaacttcttttcttccttgctagtggccctagtgagatttgttaggattggtctaaagcaggatgtgaaccatcgtgacttaaggttaggttcagggctaggggttcgagttggtcttcggcatagagtgaaccaacgtgggttagatccataactgaaacgtaagctcagataaagacaattctcagtgcgtcgtcctaggagcgttcggatcttgtaaagctcaagtgatccaacgagagagcggaatctcttggaaactaaggagagaatcgggtagtacaatctcgagacacggcctaagatgtttaatagtaaatcatcaggaaggtaaggcatattacacggtgaagactttatgccgttcatcatagattaccaggaaacgctaagaatgtaatcaaaaactccaatagccgtatttatattggagaaataaatatttcctaaatctaattgaactcctaaatcttatctcgtaatcaatataatcgagatttaatttagatattatctaagtgctattaaagcttaatatgtctataacgaaatttatgatttagatggttaatgatgacttcctctgcaagatattctgatcggactagagcatctaaaatattggtgtattttttttactattacttaactttaccaagattatgttgggctggactaaaatatgtgaaaatacatttatgcaatgatcaaatgttgaatcaaaccgaatttgaattataataaatgaaccaaagattcaaaaaaatgtgttagaatttaaaattaagtttgaatttatttttttcctgatcaagaagtacgttccattcatactacacatggacatgacacatcaaagtgaaaggtttaggacaattctaggattcaccttaggagtaaacacaaggattcacttcttttagtttaaggagaatatgcactaaatgactatgaaatcaataatattatataaattaaccttaaatcacattactttgtcggaaacatgttgagaacacatataattacgtaaatatcttttttaacatgtttttttccgaaatacatgcgataacataatatcctcttttatcttgttattttctcttattacatagtacttataaaaaacatatggtattttttgggaaaaacattctattcagtttaatatctctttttatcatgatattttgtagtaatacactttttttattaagatcacacatgatttctttaaaaatatattcttatttttcagtaatacacggtttttattaaaatcacatataatttttttttttgaaagattctgttcatgtaaaaaaatttcataacaatgtattttcttaaaaaatcatgacgttttttgaaatatcatgtttttaaactaaatacaacatgtgaaattttaatgttacatgctattttgaaaaattacacggatgtatttcgtttactgttcatcttgcaacaaatgaaggataactttgttatttcatttcttccgacaacgtgggtccatggttattttgcaacaaaaatctttctctctgctagtttcttaatttgtatgttttatttggttatctactaatattaccctagtttaagccaatcattatgtcatgttatatgatatataaatagaaattaaaaattaaacaattcaaacaattagtattatctaaataaataaaaataattcattaaaactctataattgaattagttataaaatctaaactctaactattcttttataagcccaaacgacatataatctcatttaattaaaccataaccactattttataaatttaaaccgacatataatctcatttaattgtaaaatctaaaccttaaccactcttttataaacccaagccaataaataattttcattgtaaaatctaaaccgtaatccacatttgtaaacccaaatcaatatataattttatttaattagaaaatctaaaccttaaccactcttttttataaatccacatcgatatttaatgttgtttaattgtgaaagcaaaccgtaatccatatttataaaccataatccacttgttttaattaaaatttaaaagtatacagattttgtttcatttactattataaaacgtgaaataatgattggtttaaactaaaagaagtgaatacaatccaagtatttttcaaaggtttataggtttttatataaaatgattaataaatctaagggtaagaatatatattttcatttatttttttatcaaacaaaaatattagttttcgtcatggttttcttaatacttttcattctatcggattttaacttgaatggtaataaaatgacggtagtaatagtccttaatgacatattgacattagtaaatgattctgaagaaatcagacttgttttatactttcgatgtaatagttggaaactgctaatagagatctggaaattacactatttaatacgtttacattaaaataaataaaatttgttgtaaatctaataattttgacgttcataaacatacacacacacgtgagaggcaaaaactgtatctcagccgcaagaatctcgtctcctgttttattacaaggtcaacttctggtctctctcttcaacttcttaatcttaacttaatttctaaaaatctaactatttattagattctgatttcaaatctaaaaccaataaattaattccacaaacgaaacttcaaaaattcaaaataaataataataacaaatatctaaaacctcggttttgtgatcacacacctcacatagaagcttctttctccttcactataaaatctaactctgatcatcactaaaactcataccatcacgtgttctaagatttgcaacaatggcgtcgatgatcagttcctctgatcaccgtctttcgacaagcaagagacgtttgaagccattgctgttaagagattacttactcgatgatctcagttcttgttcatccaacggtttcaaatcattcccacgccgtcaaactccttctgcatcttccaccgttcgtcgtcttcttgacgccgagatcaaacggtcaggatttatccatcatcatcatcacaccaagcaaccacgtctcactagaagatcaagccatacaacttgtggaacggcgataagtcacgccgttcataaagcttcaacggcgtttcttaaacttttgccgttcccttcttccaccgttaaaaaacaaggcgttttctctagaagcttctctaaacggcttttaagcataagcttctggagaaaacccgttgtaggtcaatctcgccgtgaagtaaccggagatggagacggagagatccaatggtggagatccgtcgcgtacgaagagagtttagatcaacaatccgatctgttttctcaaatctccaccaccgacgacaaaataacattttcaacctcagccgctgcgatcactgtcgtggaggagtttatctccggtgactcatcgagttacggtagcgagtttttcacaaactcatcatcggaggttgtacagtcttcttcctcatcgttctcttcttcgtcgagtggtgaatcggaggaagtctccagcgagatcgacgccgtggaagacgggaaggagagcggagatagtttaaaggcacacgacggtgacggatcatctgtcaaccgcaacaacagcctgtgtaacagaaaggttagttagtcaaaagctcgttttcaatctttattacaactgtcacaagtgttgaaagcatttggttttgtcttttcgtatattaaaaattgaggagattttgaaacttgtcggggaaagcgtgcgagtcacgtgaggtgtgggatttagagtttaatgggttataattaagattcttcgacgtagcttctaatgcgtattatacggcacatgatcccgcgagagttcatggtacttcacgtaccatattattttacagacgatgtaaaattatcgtacacatttaaatatactttacatatatattattagatacgcagatcttcacacatttatacgtaggagtacttttaacattataattaagagttaattttatattatcacccatgttcatgattttttttactaaagtaatgaaatcgcgcgttggttatttttattctttgatttgtataagaaatattctcaaataattaattaagtaaccccacataatctcaatcaaaacaaaagtgaggatacgatcattaattagataggggcataaacaggtagatagataaatgatgttgtcatggggttagtgtcactattatttctcatatcgttatgtttttgttcttgttgagaccacttttagtttagttattgtttgcggtgttgattacatgtttaacagatttgatttctcatatttgattattgcgatattctttaggaatgtgtgaatgaagagaaagaacaactcagtccagtatcgatcttagaatgcccttttaaagatgatgacgaagacgatgaaatcactgaccaaaatggtaattttatcaaatgactactactcaataatatttagcaagtcgttatacatcacaagagaaatgtgaatttaacgttataagcaattaacatttgcagatacatatgagaaaattgctagaaaaagcaggagattaaatggtttggtacggcttgagccactagacttggataaacgcatagagaggtatgtagagagacaagaagagtactcatatcacactctggagacggaagaggacgaatcagaaaatcaagcaaaccgcttgtttgctcttgtgaagttgagaatcggcgaaacaaatgacctactagcttctaaagtagcggataatctattgttagactatcttcaagaagataacattgggccaaaagaggagacattaatggtgaagaaagcagaagattgggttatgggtagacaagatgagatgtttatgagttgggaagtgaaaacgaagagagaggtttatgtgaaggaaatgaagtggggttgcattaatggagatgagagagagaatgtggttgaagagttggctaatggtttcttcacttcctttgtggatgaattcatctacgacttagtgttgtgataaagttagtgttttgggaggaaagttaagattttgattagattcataatgtattagatatatgctatctcaataaaactatatgtagttttgcataaggggaatgattcgtataaaaacttatgtaggtcatatgttcgttttccatttttaaaatctagaatgagagttaagagtccatagtcatttatgtgttgtttgtttttctaactagatcttaatatgaattattagttttctttatggtttatttttcgaattatctaaatcaaattcaatagccaaaatatttgaaagtcaaacgaaaactgtgtccttactcattgtatgatttaaaaaaataaactgaaaagacatttataatgtttcacaatcttataaaaccattattaactctaaacaaaatgttatgttcaaataagtgttaaactttgtataaaaaattttagtagccatttttgtaccagagatgtcaatcagctttcttacatcatagtataacttaaagacttgagatctcaatgaaatgaacacatttgaccaaagttatgtttttggaccttttcttgtttattcgagtattttcagtatctattaatatgtttttttcactattttcgaaatacatagatgcataattaattaacaaatgggtgtgctctgtataatgtaggcagtcacccataatccagcatctaaaacgtttaattaaagtttgttattttatacaggataagtgttatatcataatacaatatattttttttttgtcaaaaacataatacaatatataagatatataatctaaatatcttagattatttacggaattagtcaaatggttgatcagtagtggttgtgtttttgggaaaacatcgaatatactggattttagacccaaatatgagaaactcggtcgtgaaggaaaatcattctttatgatgcgatgccttgttgcatcttatttcttgggaagaagcatttgcgaggcccctaacatagtaaaaaatgcatctattcatatagagattatatctcaacaccaattgagggagatgatgattgtttagttgagagttaacctcttaaaagtctcgacaatattttttaaagcaaaccattcagattattttacgaatagttaataataataaaaaagtgtaaaggtatgattcaaacttctggtttagtttgatgtcgacttggttcagctggttaaattgttaaattacggtttaatgtcgcttagacattgattggagaagaatgacttcggttttggatttacaaggaatcaagagaaagactcttctggtatagagggtttgactttgacctctgcatataaatagtcttcgtcttcttcctttgttcgttgtaacagaaaattcttatttcaattcttctcccttgtaacacgtttttgagctctgggttttgagcttaagtaaacattgattcatagtggattgctggattgaatccggctccagacgtaggatcatcacaccggtgatctgaactgagtaaacaatcgtgtgttcgtttcgttctttgtttgattgcgttcttgatcgatctattgagtgttccgcgaattgaagcttgatcgagttgtgttgtgttgaatcgagttgtgttgaatcgatttttgagtcatcagattgtaacaaaaagaatagttgcaattttctaactttatatatctctatcatttcaccaattggctattttcaatttttacatcggacatacaaacctgaaacctatgtaaattggaaaaatcatttgtccggtgccctgatatatatttttcttcttaccaaaatcggatttgttagtaacaaacctgtcaatcaaagtgtttcagcttctccagcttaaacatcagaaaatgagtgtgtttttagtgtgtcagacaaatccccgtgaaccttgccttaaaaataaaataaaatcactccaaaatagaaattatttttacaaacaaaaaaatgaaaaagaatgcttattagtattttccacaattgaaatttaaaaagtatatttcccattatttttcacctaaaaaaaaagcatctaaaaagaagtattttttttgttcttctctttttaaagttcgtattttttttttaaatgtttatgaagaaagacacaaaaaaccctaaatataatttcacgcagctgcctctcttttcttcttccgatcctccttccgccgagtgaagccgcgactgtgaaatcatgagaggagtaaaacgcgccgccatctccgaatcgaatgactctcccgtgagtttttccttccgattgttttcgcagttttgttgattgaatctcgtgataaattcagtattgtatcgattctctgtttcgggggtagacgagaaaaattgacactttgggtatttcttggtggttgattgatgattggtttagctaagtttctatagattttgggtgattattgaataaagtcggcaactttataatataacaagttgtgggcattgtgcataatggtatggaactataggatttagctcaaggtatttgctttagatccattaccgagttagttgatgactggtttagctagtgtctacagaatttgagtgattatcagtaaagtcggcaaatttttaatgtaacaagttgtgggcatcgtgcattttgatatggaactataagatttagttcaaggtgtttgcttgagattcattactgagttcaattttgagcaattcgatattcaaatctgtgaggtcatattcatggcaatatctagtggagctgcttttggaattaattttgaaagggaatttttgcagtttaagaatgcaaaaccagtggaaggaatcttttttggtactcagaagaatgtggtaccgatgcagcagagttcagtaacatcagcatcattggataaacagagggctgagttagctaggaagcatgtgagagctcttaataaccaatttgtaaggtgaacagttgtgtttttgaaaaatattatctttgcgcttgttgggtattctatatagtttatgaaaacatatttgacttgttttgtttaaaacttcaatgagaaattgcgtatgctttcaatgtgaaaacagttgggtgcagttacagctgaagaatcatcctgatgaactttgggaagatgggatgaatgactacattacgcatgcttcaaacattctggtaaatactataattacatgactcttcagtaggatggttttgattgactcaccaagaatgctaatcttctaatatgtcttcaatctcttacttgttttgtgctagacctgttgtttagtacactagctcatcagttttcaaattcaattcaaatctcgtgtaggaaaagtttaaggatgtggtcagctggcttaaagaaaataagggaaagggggagaatttatcccctgaatctcgtggagcagaaaataaattagtggctgaagtcaagaataccaatgttaaatcattttcaaacaatattccttttgcttcaaacaatcaacctgggatcttctcaaacaatcaatcttccgatttttccagtagtcagtctggtttcttttcaagccaatctggagcattctccagcagtccttctggtttgatatccaatagccagactggatcttttagcagtggccagtttggtacgacaaaaagcagccaaccaagcctattttccggcagtcaagccggagcaatctctaatagccaacctggaactttctccagcagtcactctggtataacatctaatagccagacgggatcttttagtagtggccaatttggtcagacaaaaagcagccaaccaagcctactttccggcagtcaagcaggagcaatctctagtaaccaaccttcttttcaattttctaacagtcaatccccttttacatctgcaggtatctacttttctattagcagaatacatttattggacttgtcattgaccagctttgtatcttgagaacaattgtttaagagacctaacctctactttccttgtttgctggtatcagtacctccagtgtccataccggcaaagcaggatcactcagatgatgcggatggtggtgagttagtcatatactgttttcttcctattttggtttcgggtttctttgaaaggttatatttggatttggaaaaccacttcaattattttcaaaccacgatcttgaatccttgaggaaataatatattacaaatcttgaggcataaaggcctagtaaacattaggttcttttgacttggcaggagacgaacaatctcaaccgagcagcccatctgtcaaaaagacggaagaaaagggtattactgtggttcatgaagtcaaatgcaaactttatgtcaaggtattcatccttagagtcctcttaggtgtcatagtgcttgtgaagtagtttatgtttctctactttagttaccttgacattctgtttttactgttgacgatgtaagctctgtatccatgatattgtgcagtcaagtgacccagcagataaagggtggaaagataaaggaactgggaatctctacataaaatgcaaagaaggagtcgacaaggggacaaaagaatcaaaacccacaattcttgtccgaaacgatgtatgactcagtagacacactttacattctacttgttctacagatttccaacattatgaaccccttttcttgccaggttggaaaactgcttctgaatgcactactgtacgctggaatgaagacaagcccacagaagaacgctcttgttgcaatatttcactcctcggtaaattaaacgcactaaagcttctttagcattttcatgttcgttttgtagtttcactgattttgcctacctgcaacaggatgattccaacgagaatgtaacaccgagaacctttctgataaggacaaagaacgcagaagctagagataatttagcaacggccatccaagaatacgccccttcttcatagattgcccaaagccaggttgagatcttcactgtaacttttaaaagccttatcgagtcgtcctctctctatattttttttcctgatttgtaatattaggaagggtcttaagagtaacgtaaagctt

SEQ ID NO: 570 - DNA, 90824 bp, Arabidopsis thaliana
aagcttctggagaaaacccgttgtaggtcaatctcgccgtgaagtaaccggagatggagacggagagatccaatggtggagatccgtcgcgtacgaagagagtttagatcaacaatccgatctgttttctcaaatctccaccaccgacgacaaaataacattttcaacctcagccgctgcgatcactgtcgtggaggagtttatctccggtgactcatcgagttacggtagcgagtttttcacaaactcatcatcggaggttgtacagtcttcttcctcatcgttctcttcttcgtcgagtggtgaatcggaggaagtctccagcgagatcgacgccgtggaagacgggaaggagagcggagatagtttaaaggcacacgacggtgacggatcatctgtcaaccgcaacaacagcctgtgtaacagaaaggttagttagtcaaaagctcgttttcaatctttattacaactgtcacaagtgttgaaagcatttggttttgtcttttcgtatattaaaaattgaggagattttgaaacttgtcggggaaagcgtgcgagtcacgtgaggtgtgggatttagagtttaatgggttataattaagattcttcgacgtagcttctaatgcgtattatacggcacatgatcccgcgagagttcatggtacttcacgtaccatattattttacagacgatgtaaaattatcgtacacatttaaatatactttacatatatattattagatacgcagatcttcacacatttatacgtaggagtacttttaacattataattaagagttaattttatattatcacccatgttcatgattttttttactaaagtaatgaaatcgcgcgttggttatttttattctttgatttgtataagaaatattctcaaataattaattaagtaaccccacataatctcaatcaaaacaaaagtgaggatacgatcattaattagataggggcataaacaggtagatagataaatgatgttgtcatggggttagtgtcactattatttctcatatcgttatgtttttgttcttgttgagaccacttttagtttagttattgtttgcggtgttgattacatgtttaacagatttgatttctcatatttgattattgcgatattctttaggaatgtgtgaatgaagagaaagaacaactcagtccagtatcgatcttagaatgcccttttaaagatgatgacgaagacgatgaaatcactgaccaaaatggtaattttatcaaatgactactactcaataatatttagcaagtcgttatacatcacaagagaaatgtgaatttaacgttataagcaattaacatttgcagatacatatgagaaaattgctagaaaaagcaggagattaaatggtttggtacggcttgagccactagacttggataaacgcatagagaggtatgtagagagacaagaagagtactcatatcacactctggagacggaagaggacgaatcagaaaatcaagcaaaccgcttgtttgctcttgtgaagttgagaatcggcgaaacaaatgacctactagcttctaaagtagcggataatctattgttagactatcttcaagaagataacattgggccaaaagaggagacattaatggtgaagaaagcagaagattgggttatgggtagacaagatgagatgtttatgagttgggaagtgaaaacgaagagagaggtttatgtgaaggaaatgaagtggggttgcattaatggagatgagagagagaatgtggttgaagagttggctaatggtttcttcacttcctttgtggatgaattcatctacgacttagtgttgtgataaagttagtgttttgggaggaaagttaagattttgattagattcataatgtattagatatatgctatctcaataaaactatatgtagttttgcataaggggaatgattcgtataaaaacttatgtaggtcatatgttcgttttccatttttaaaatctagaatgagagttaagagtccatagtcatttatgtgttgtttgtttttctaactagatcttaatatgaattattagttttctttatggtttatttttcgaattatctaaatcaaattcaatagccaaaatatttgaaagtcaaacgaaaactgtgtccttactcattgtatgatttaaaaaaataaactgaaaagacatttataatgtttcacaatcttataaaaccattattaactctaaacaaaatgttatgttcaaataagtgttaaactttgtataaaaaattttagtagccatttttgtaccagagatgtcaatcagctttcttacatcatagtataacttaaagacttgagatctcaatgaaatgaacacatttgaccaaagttatgtttttggaccttttcttgtttattcgagtattttcagtatctattaatatgtttttttcactattttcgaaatacatagatgcataattaattaacaaatgggtgtgctctgtataatgtaggcagtcacccataatccagcatctaaaacgtttaattaaagtttgttattttatacaggataagtgttatatcataatacaatatattttttttttgtcaaaaacataatacaatatataagatatataatctaaatatcttagattatttacggaattagtcaaatggttgatcagtagtggttgtgtttttgggaaaacatcgaatatactggattttagacccaaatatgagaaactcggtcgtgaaggaaaatcattctttatgatgcgatgccttgttgcatcttatttcttgggaagaagcatttgcgaggcccctaacatagtaaaaaatgcatctattcatatagagattatatctcaacaccaattgagggagatgatgattgtttagttgagagttaacctcttaaaagtctcgacaatattttttaaagcaaaccattcagattattttacgaatagttaataataataaaaaagtgtaaaggtatgattcaaacttctggtttagtttgatgtcgacttggttcagctggttaaattgttaaattacggtttaatgtcgcttagacattgattggagaagaatgacttcggttttggatttacaaggaatcaagagaaagactcttctggtatagagggtttgactttgacctctgcatataaatagtcttcgtcttcttcctttgttcgttgtaacagaaaattcttatttcaattcttctcccttgtaacacgtttttgagctctgggttttgagcttaagtaaacattgattcatagtggattgctggattgaatccggctccagacgtaggatcatcacaccggtgatctgaactgagtaaacaatcgtgtgttcgtttcgttctttgtttgattgcgttcttgatcgatctattgagtgttccgcgaattgaagcttgatcgagttgtgttgtgttgaatcgagttgtgttgaatcgatttttgagtcatcagattgtaacaaaaagaatagttgcaattttctaactttatatatctctatcatttcaccaattggctattttcaatttttacatcggacatacaaacctgaaacctatgtaaattggaaaaatcatttgtccggtgccctgatatatatttttcttcttaccaaaatcggatttgttagtaacaaacctgtcaatcaaagtgtttcagcttctccagcttaaacatcagaaaatgagtgtgtttttagtgtgtcagacaaatccccgtgaaccttgccttaaaaataaaataaaatcactccaaaatagaaattatttttacaaacaaaaaaatgaaaaagaatgcttattagtattttccacaattgaaatttaaaaagtatatttcccattatttttcacctaaaaaaaaagcatctaaaaagaagtattttttttgttcttctctttttaaagttcgtatttttttttaaatgtttatgaagaaagacacaaaaaaccctaaatataatttcacgcagctgcctctcttttcttcttccgatcctccttccgccgagtgaagccgcgactgtgaaatcatgagaggagtaaaacgcgccgccatctccgaatcgaatgactctcccgtgagtttttccttccgattgttttcgcagttttgttgattgaatctcgtgataaattcagtattgtatcgattctctgtttcgggggtagacgagaaaaattgacactttgggtatttcttggtggttgattgatgattggtttagctaagtttctatagattttgggtgattattgaataaagtcggcaactttataatataacaagttgtgggcattgtgcataatggtatggaactataggatttagctcaaggtatttgctttagatccattaccgagttagttgatgactggtttagctagtgtctacagaatttgagtgattatcagtaaagtcggcaaatttttaatgtaacaagttgtgggcatcgtgcattttgatatggaactataagatttagttcaaggtgtttgcttgagattcattactgagttcaattttgagcaattcgatattcaaatctgtgaggtcatattcatggcaatatctagtggagctgcttttggaattaattttgaaagggaatttttgcagtttaagaatgcaaaaccagtggaaggaatcttttttggtactcagaagaatgtggtaccgatgcagcagagttcagtaacatcagcatcattggataaacagagggctgagttagctaggaagcatgtgagagctcttaataaccaatttgtaaggtgaacagttgtgtttttgaaaaatattatctttgcgcttgttgggtattctatatagtttatgaaaacatatttgacttgttttgtttaaaacttcaatgagaaattgcgtatgctttcaatgtgaaaacagttgggtgcagttacagctgaagaatcatcctgatgaactttgggaagatgggatgaatgactacattacgcatgcttcaaacattctggtaaatactataattacatgactcttcagtaggatggttttgattgactcaccaagaatgctaatcttctaatatgtcttcaatctcttacttgttttgtgctagacctgttgtttagtacactagctcatcagttttcaaattcaattcaaatctcgtgtaggaaaagtttaaggatgtggtcagctggcttaaagaaaataagggaaagggggagaatttatcccctgaatctcgtggagcagaaaataaattagtggctgaagtcaagaataccaatgttaaatcattttcaaacaatattccttttgcttcaaacaatcaacctgggatcttctcaaacaatcaatcttccgatttttccagtagtcagtctggtttcttttcaagccaatctggagcattctccagcagtccttctggtttgatatccaatagccagactggatcttttagcagtggccagtttggtacgacaaaaagcagccaaccaagcctattttccggcagtcaagccggagcaatctctaatagccaacctggaactttctccagcagtcactctggtataacatctaatagccagacgggatcttttagtagtggccaatttggtcagacaaaaagcagccaaccaagcctactttccggcagtcaagcaggagcaatctctagtaaccaaccttcttttcaattttctaacagtcaatccccttttacatctgcaggtatctacttttctattagcagaatacatttattggacttgtcattgaccagctttgtatcttgagaacaattgtttaagagacctaacctctactttccttgtttgctggtatcagtacctccagtgtccataccggcaaagcaggatcactcagatgatgcggatggtggtgagttagtcatatactgttttcttcctattttggtttcgggtttctttgaaaggttatatttggatttggaaaaccacttcaattattttcaaaccacgatcttgaatccttgaggaaataatatattacaaatcttgaggcataaaggcctagtaaacattaggttcttttgacttggcaggagacgaacaatctcaaccgagcagcccatctgtcaaaaagacggaagaaaagggtattactgtggttcatgaagtcaaatgcaaactttatgtcaaggtattcatccttagagtcctcttaggtgtcatagtgcttgtgaagtagtttatgtttctctactttagttaccttgacattctgtttttactgttgacgatgtaagctctgtatccatgatattgtgcagtcaagtgacccagcagataaagggtggaaagataaaggaactgggaatctctacataaaatgcaaagaaggagtcgacaaggggacaaaagaatcaaaacccacaattcttgtccgaaacgatgtatgactcagtagacacactttacattctacttgttctacagatttccaacattatgaaccccttttcttgccaggttggaaaactgcttctgaatgcactactgtacgctggaatgaagacaagcccacagaagaacgctcttgttgcaatatttcactcctcggtaaattaaacgcactaaagcttctttagcattttcatgttcgttttgtagtttcactgattttgcctacctgcaacaggatgattccaacgagaatgtaacaccgagaacctttctgataaggacaaagaacgcagaagctagagataatttagcaacggccatccaagaatacgccccttcttcatagattgcccaaagccaggttgagatcttcactgtaacttttaaaagccttatcgagtcgtcctctctctatattttttttcctgatttgtaatattaggaagggtcttaagagtaacgtaaagcttgataaagggcacaaaaatgttgtatgattgtgtgagagagagagagggccaaaggaggtatttcgtagcttattagagaatgttgtgccaatcttctttgtaacttaaaaaccagaaacaataaaatcacttctttttatagcaatttatctgattttaactatgcctaagacaagtatgcagaaaactggaattaataacttatgaaaaggcatatattctatcaattttcattcatcttaaacaaaaagcagagaagctacattatattctaaatttatacaaaagagagcgatacaatcaaaaggatcagtgaagagctaatcaacatatctaacattctccgttttccttttgtgatctatgaatgacgaaacgatccactatctttacggtattaacagggtcttgttgtgatgttgaggcaccccatttacttggaaactctctctcatagctcatcttgaaactctgtttcggctctgaatcccagtctttgtccagtttccagtcttttggcacctaaactcatatgatatacacatctttacttaaactttcttaaccatgcgtttaacaagtaagaaatcaataaataagaagaactaatgacagaatccataaaagattggttcattagtaccagcaagcagcattatcaggtagcaacggtctcaagtagagttttttcttaccttatcaactgcgagcgtgaaaacttcaatatctccatcttctaggatgtggaaccgggtgaaagatttgtaattggcaatgcggagtgaagagaaagcttcatcaaagtgtatgtggaaccagttgatgcagatatacaagtagcttccaaataccatagacacgacaggagttgagaagacccaaaagtaaaggaaaacagaagcataatagataacagctccgcttcgggaaagcgattccattccatgtttgcaaatgttggtccgggtaaccgccatcacctgatgttaaagtactcaggttgatgtttcaaatgggatctttggttaatcaaaacagagacagaacacagtacattatttacctcaggaacatcaaatgctgacataagatacttgatgcacgcaggatataagccaaatgtccattgttcgatacgggctcgaaggccagtagggtccgggaaatgctcattctccactgatttgtaccactcatataatgtatgataccctgcttaaacaataatgtaaagagtcacaaaatcaatcaaggctaaatcacagaaaattttcacccagtcattattatctattggcgtcgatgacatcgtgatgagtcaagatggtagttcagtatgcaaataaaacaatgcactttggtacgaaaacccaaccagcggtatatggaatggacactgaccagaatttgcaagaagattatgctgaatacagatttctatgcccagttccaacatcaacatgagaatcagagctgccatcaggtgagcagcaacatgaagaaccccaattacaacccttttcttcagagatacttttgaggggacaaatgtgattgcagttatcagcaacatcaagacaccggtaaaagacacataagattgttccatcacatacgcaaaggcactccaaactgtgcctaagaaactctccaggtgaccagaaaacgaatcacctcgtaagacgtgagctagcttacactgaaacaaaggaacaaaaaagaatgagattgcagtgttcctgtgagcagtgagcctacatgattgtttcgaaggaaaaaaaaatctacgtataagcaaacctaacaaagagaactgctatagcatataaaacacctatctcagctacacaatctattactggatgcaatgtttaaataggatgaccttaacacgcacctgagggaacaacgaaaagaccaagataaagtatataataccaccaatgaaatcaaattgccagttctttttccggaatttcaaaatatttcccaaagcaatctgcaaacagcagaaaacaccatttaatatccgaatgctatgaaaagctgaaaacaaggcaatttactgataggaaacttactttacttgaatcatcaaaagaggggtaggcaaccttgcttccataagaggccccatagaactttgaaaacttgctgaacacatgggtgggatgcagaaaagctcctccacagccattaacaagaagatgttggacatgggcaggtccatccgattgattacatgaatgtcgcatataatgatgcaaatcccctgccattctaagtttgcacctgtatttcaacacgtcgcatatcagatgtctcacgttctgccctgtatcaccgctccagtaccaatcaagaagccagttgggttcatgcgtgataatgatcacagcatcactctcaccaacctgaatgagaaaatattaactttattaaagaaaaaatgaaaattgagtaatatgaaaaagacaagccactaaaatatagactaatccacttgttaatggcacttcagaaacaaaagaaatcacaaatctatacccgagtaatacagtatatagtaagtacacagtagttagccaaataatggtaaaactctaactaggtgacagaaactatttaaattgcatctataaatctatataaagcatgggaaagcaaaatgttacacaaactaccttgtccttcaccaattcggaaaaaaatttgaactggtcgacatcaatatcaccatgaagtgcaagatccaaaccaaacacccaccaacccttggggagctgcagggcaaaatagcttttcttctggggcattagccagccgcctaaccaactcttatggcaaatatacctcatgaaagtattgagtccgtcaaaccagtctacaaaataataatcaatatagttagaggagatgaaagaagccactggtatgtgaaacaacttatttgaaagataaatgcagctgagacctgaaactcaccatggtttccagggatgagaaaacattgaggaccttcataactcttcagatcagacactccattgggtaattcaggcttgtcaacagcaatagagtcatttttataccaacggggaggctgcagcgcatactcaaaaggacaaaagagacgtttttcatatgtaaaagatgacggatttgggtatctggagaaagacatccatggttagattcgacaaaagcttgggaatctaaaaatatttacatataataagtaaagcacttacgcaagatctcctccaataagcagtacatttcctcgtggaagagatataaaattattagccactggcactctgagagaaggctgggcaagaagttttgcaacactatatgatgaattcccaccatcaccagtatccgccatgaaatcaaaccaaaaatcttgcttttcagcaaggtggtcatacaaaagttccttcctcccactagcatcaccagatttggtcattgcagcctaaagatttggcacaagggaaagcagcaaaaattaaatgcaattaccgtaaatgtctatctccagaaagtggaatggacctgatcatatcataaatttaaaaggtatacctgcagcatccgcatgtcaaagcggccaagaaatactgtcactgacacgaggaggtcaaacacggttttaaacaaatcagccgatgttctgaaatatataattagataggtcagcacctagtgaaactgccttcatcgtttactgaccacattgaaacaatggtaagcaaaaaggggaaattttagtgtagcattgacataccctgaataccaaggaaccatatctaagaaatcaggtttcaattgctgattcttcagcttctcatatttgtcgactgacagaggatgtgttagagcccacctaaacagcatattaaaactttaagataaacatgccatttgaatgtaagaacaaagttgttcatatgaatgtactgttgatcctcaattgcaatattaatttgacaggtattatgccatagataacttaccctgttgatctctccactacataattggcaatgtaaagaccgataaatgtggcccacaacgagtatataggagaaatttcgtcagctgaatcaggacatgatccgttgcatgcaatctgcaaataacagggtaggaataggaaaaaatttaaagggtgaacaaataaaacatattcacaaagaaagtttacagaagagatacctccccgtagatgaaccatttggataacagtggataatcacttgcagatccaactggagcaaaccacgatgaacacacttggtctttcagctcattcatacgaatgaattttgcaagccaggtattgtgcctatgttctcttttccagaacgaaaaccagcttgtatactgtcttccaagtggtttttgcctcagaacagctcgattaccacaatggctataaaatatacagcaagccatgctaagaacctgcatcgatgaaagacatgaagacaataatttttatacgaaactacgaaagacaatattttaagcaaataagtggctttaatgtgcaagactggcaatggtgaacttacagcgcagttttgaagaatggttaagatctctgggcgtcttccagccacgcgagaaacaagaccaacataccaaaggccaagaaaaatgatgtggaagacaacaaggaagagtatggatgatatgtaaattgttagaaacaaggacaaattcatcctcaaatccaaacccattgactgaaaattaggaagatgatacaaagctgcaactaaaatccaggcaatgtacctacaccaaaacaaagaattaggaaattttatagagtgaaatcaatattagatattttcagaagatggaagtaacggttgcttaccaccgactgaagtttgaataatttggtctgatagtcttctggataaatggggaagaaaagaagtagaagaatccgagcaagcatgcatacatggaccaccacttgactgaaaacttttctatgagggtttgcatgttatccgatgaaataaagaataggcaaccaaacaatacagcaatgatagcatgacgtgaatgctcatgcggataagggtaagtatgggttaaaatcgttctgaaactctccattgggagggaattatataaacgagcagaatgcctttcagagaccatagcatgtgattcctataagtttcggccttgaatttcttgatgacagtaaaaatcttgacagggcaaggaaaggttaatgaataaatttgagcttccggtttgacaaaaccttgtgcctaatgaaacaagaaaaagaaaagaataaagtcagcagtgtgattcagtaatattaacagtaatacagtatccatgatgcaacaaattaataatgatggagaaaacagctacaaattcaatgaaatcctgaattacactagtgccaacactaacaacaaagatacttggcatcaaatttcacttaaagagaagctgaactgctatctgaaatgaagatactcttgatccgttaattccaaaagttcgtcactgatactagaacagctactagccactgtacaacacccacgaagatgaagaaacatactagaaaccataacgaagaaaacagcataaagcaacccaaattgttagccaagaactcaaatttcctcataattcttgtatgccagttatatctaatcaacatattcccaattacacaatttttgtcaacaaccctgaagttacttaagctcctcggttttatcaaaggaaatggtgaaaacacttcaactaagaactgaacaagtaactatcttcatacaaatcatacagaatcactaagaacacacaactaactccatagagaaagctaaagaacaaaccagaattggcaaccctgtgactcttttgttgcagaatcccaaaaatgggaaaaaaataaaacttacatcattagatgatcttaaattcaatagtaacccatcaaaaacgaaaaccaatcgcaataaattaagattttgaaaatcagtaacatgcaaacacaatccaatttcaaagcccaagactttattgaactcgagaatcgataaaaaccatacctttacgcagcggagaatcggaccgaagaagaaacgaatcaaggtaaatctctgtttccagctaaatcaaataaatcgaattctctaattgatgaagtcagtcaaatcaatgtagtggtggtgcttaagagagagcttaccccaaaattcaaaagaaccctaaaaagaaaaaattgctttttgagaaattggaattacagaggagaagattattaatatcaatgaatgatctcttctttaatggagtcaagcaggcgtagaaacgaatcacgtggctttgttttctttatagtgcaattgttgaaaattctcttcttccttttttttttagacggttaccaaaatgatcgccatttttgttcaaagctttatttttattttatgttaaataaataagaataaaataaagggtgaattaaggcaataactatttatgataaaatatttaaggatatagcactataacttgcgaaattaaaagaataatatatggactttatcaatgacgattttaacctctgttgtcaaaaatttgacgatattttagtagtgatgacgtggtggttacgatggtggcagtgatgatgttgtgatggtggtggtgactttgtgatggtgatgacaaggggatgatggtggtgccgtggtgtcggcgatatccatgataaagcaacggtgtggacgtgtggtggttttaggtagtgacgacgtagtggttacgatggtggcggtgatgacgttgtggtggtgacggtgactttgtggtggtgatggtggcggtgctgacgttgtgatggtggtggtaacctagctttgtgatggtgatgacatagggatgatggtgatttcatggggatgatggtggtgccgtggtggttgcgatggtgatggtgagggactaagggcataatgatggtggtgccgtggtgtcggtgatatccgtgataaatagtaacggtctggtggttttagtagtgacgacgtggtgattacgatggtggtgatgatgatggcggtgatggtgatggtgactttgtggtggtgacgacgttgtaatcggtaccggcgagttgattggttttatcttagggtcagttatgtctaaaatataggaaatacacacaatatcattggactatttttttttggttagttatctaattataatatttttgtatgttataaatgtaaatttccctaaaataaatgaaaatagtattattggaaggaatcaacgaataattccattgttgctatcttcaaaatgtccgaatcttttttttctgcgagattcaattcattacaagataatttgtgtgtacatttttatacaacttgtaatggaagcaatgtaagtatttatataatctattgaggtgtatcaataacaatacttttataaaaatgagacgtgtcaaaatatgattggtcaggtgacttgatttattgacgtgtggtttataaaatacaaaatcttgttgttggcaaaataataaatgacttgtgttgacgaaaacaatagtaagacttctttgaaactgaaacttctatagcaaactaattgggggggataaagattagattaaagcatgtcaaaataagagagtaacacgtaatgtgagtatgtgtgagtcaagagataaacgcgttaggtaaaagaaattgcaaaaattgatacactcaaaacacatgcaatgtctttgggctttgcacattacatttaattaagctgcacagtcattaacccctccatccaactacatacgaatcaatttcttctcttctagtcctgtttgtttgatcatttggcatttacatccaaatgatccatttagatgatgcatttgaatgatgtttgtttgatgatttggtattttatctaaatgatgcatttaactgaatgtttttttgtttgatcattttgtaattcatctacattctcattctaataaaaatgactaaaatgcccatgttataattttaacaaatgacaaatatttaacatcattaccaaatatatcatttttaatctttaattttagttatattaatttaattattgatgtagaatacatttacaactaaataaattattattttaacataaaaatatgatttgcggttggcggaaaatatactttgtagttttagcgaaaaaatatgattttacgggtttgacgggaaaatatgatttttggttactgcgggtgactgtgattttgcagttttggtgggaaaatgtgattttacggttttagctcgaagaaatgattttacgggtttggcgggaaatgtgattttgtggttttggcggaaaaatatgattttacgattttggcaggaaaatatgattttacagttttggcggaaaaatatgattttacggttttggcggaaaaatatgattttgcggttttgtgggaaaatatgattttaacactttgacagaaaagtatggttttgcggtttttggcgagaaaatatgattttacagttttggcaaaaaaatatgattttacggttttggcgaaaaaatatgattttacggttttggcgggaaaatatgattttgcggttttgtgggaaaatatgattttaacactttgacagaaaagtatggttttgcggtttttggcgagaaaatatgattttacagttttggcaaaaaaatatgattttacggttttggcgaaaaaatatgattttacggttttggcgggaaaatatgattttgcggttttgtgggaaaatatgattttaacactttgacaggaaagtatggttttgcggtttttggcgggaaaatatgattttgcggctttggcgggaaaaacgaatttacaattttgacgtaaaataatagtcagtgatttacaatttttagagttttttggtacaataagtaatttaaaaaaatattaaataagaaatttattaaaaattaatattattaaaagagggtatatttgtcatttgttttttggactaaatcatctccatccaaatggttctaccaagtccatccaaatgagtttcacaaattagcctaaatttacaaagtcattcacatggaacatccaaatgattcatctaaatgatctgttaatttgtaaaaaacaaacatcatttttcatctccatctagatgatccatatggatggagaaacaaacaaggcctagtaactttttggatttgagctctcactttttatttttgtcaatatcttttagatttcgattatgttttcatggattcaaatcatttgaatgagatgttaacaatgtttaaaaaggtttcttaattatatcatcaactattcaactttattcttagttagttatatctgtaactttatattttagggaactttatacattattggctttagaaaacaaaacaaaagtcttacgagttttaaagttatattaagctatcttctaatccacgtgggtgcattgctcaaacaaagaacagaagaacttattattggcttattaatttactactacttttgatatctttttcatcacatgactgatcactagtcattgtttttgttaccaccgatattgcgaatcgtggaattgtcagagtaacatgtaggatcattatatcaatatctaatactgatagctcgaatatattgtgtttcttctggttgttcgaattttttttgtacataacacaattcgagattcaaatgatcagattttagatttctagttactcctaagaaaaaaaaaatgcttagcaaatcagattttataacattactactataccttttttgttttaatgattacttcgaatgattactttcgctgatataaaaaaataaatcgtgatctaaactttcatatatctactggaattttacaaaagctacgtaacaaaattgataaagtgatgagcatgttacgttgccacgtttcattttttctataataaatagaactgttcattcgacaatgggttagtggttgtacgtatatatatatatgctcgctaattggacggtgcgcaacttcaagcgttttaaattatgtggcacttaacttgtctgtcgaattagtaattactttcgctgatatatatcactctccgagcataattaatttcatgctatcaaacaaaaaaagattcatgttatacttggtttggttgaatagaaactgcgtggactttaaattgatagataactttaagtataaaaataagaaaattaaactgctgatgtctccaaaaagacaaagtaacacatctaaaatctacgtatgtggatgtcatttgatacacgtataaacaaggtgtagttaatccaattaattaaaggaggagaaagtggtacaatggaccaatatggatatattttatgctttacaacgattgatgcaaaggtatcttcgtgttacacttcattattacatttatagattggacttgggcctttgctgattgtgaggactgatgactgatgagaagcatattggttgggttttatttgaatcataaagaaattaaaagagactagaatatgacccgcggtatatcgttatattctgtagtaaaaatataacgattaaaagagattacatataattgcattttggtaaacaagaaaaaatattataattgtaacttgttatttagatttctgtataatgtcttataaatatttgaatactgtaatttactcgatataatattgtaacgaaccttaattttttgtagctataatatttttgacaccgatacatagaatttaagaaactataatcgataagttaacattacatggtagttaaatttaagttacctttttaacaatgcttgtccaatattactacctaagaagatattcaacgaaaaatagattgttacaaatctaaagtttaattttgaaaattttcttctcaatatatacacaaaaagatacttattcaacaaaaactcatatctctcctatctcaaaaaggaaataaaaataaaaggataacgacacaaacatgaatctctatccgaatctatctgtcccgtttataaattaccccacagagctcagggccattgttttttttttcttggtgaaaatagggttaagagaaaacccgaaatattagcgttattgataactaagcaacagagaaaatctggggctctctttctctctgggcttttgctatataacttttgaggtatatagtctcttgatttttttttctgtgcatgaaaaaaatgatgagtttttcagtaatctttcgaagccgaatttgaattctttgaagattgtgacatttattgtagttcctcctccatttaaagctggtaaacaaaagtgctcttcgttgtttgcattttggttttccccattttgctgccggagataacgagggaaattataactcactaggatacatatttttttttggttttattgaattctttcatttgttttcttgttgcttattttattttataattttgtttttcctctggaatctgttgtatatgctgagaaaacactggaagatgccaataaaatagaaaaatctcgtttctttttgttaaaagtcgtcgttattacttatcacgagtattatgtgatgctagacactcattatcaaatagccgttttcttaaaagttacaatttgtttaaagctgtgtatttaatcgaaattttcaatttatttctctttgtgtactaatttcttctgcttttttcagaatctaaattcaccaaaaatacgaagaagaacgagaacaacaagaggtaccacacatttgtgattttgcttaacttttgtttgattataagttgactctttaattaaagaaaatcaacaatcaagttaataacttttgacttgaaaattttaagtccaaattgatacaaaggtataaacaaagaagtttgtagtatatatatacttgtataacaagtttagtcttaatgtaactagtctttctctagacatgtctctgattcttgttttgttgtagaaaatggtcgcctttggaaaaaagctcaaggaacgtagcattgaagaatggcaagagtatgtttctataatattgaagatttgtttgatactaagtttatggcaatgtgattcatgtacttgcttttttcgattcctatgtagatattacatcaattacaaattgatgaagaagaaagtgaagcaatatggtccacaaatcgaagtaggaagtttagatcgccgccatgttcttaaagatttctcaaggatgttggatcatcaggtttttttcattttcattcacaaaacttcgcggtttgcataaaaagtatcgaactgaatgcatacccatttcaccttgtagatcgagaaaatcgctcttttcatgttggagcaacaaggtttgctttcaagtaggttacaaaagctaagggaatggcatgatacacttcaagatgagcctgacttatctcagatagctaagctaagagaggcttatagagccgtgggacaagatcttctcaagcttctgtttttcatcgatatgaatgctattggtatccgcaagatactgaagaaattcgataagagattcggttatcgattcacaaactattatgtcaagactcgcgctgatcatccttactctcaacttcagcaagtgtttagacatgtggtaaggtctataaccctcacaaaccctaatctgccattatgactaaagcttaatgtctccattatatcgaattttttagggccttggagctgttgttggagccatatctcgcaaccttcatgagcttcaaaacaatgaaggaagctacttatccatttatgaccagcctgttcttcctcttcaggttctttcttattttttatttttaatgtgacattaagaaaaaattaataccatttcatctatgaatttatgtcatttttcatacaaaagtagtaataaaatataggacaaaaacaaaaatcagtgggggcatgcacgtgcacccattggtacctaatacgttcgcccttgtgacaaatgtacatcaccaagctttgccaatgcaaaacctataagtagtttagtttcatctttctcttttgtgttttgtattgtcttggcaggatcctgtagtggattcgattaagaatgcagtggacaggctaacacattcaacaaactttcttaatttcatggctcaacatgctttaatcatgcaagacgatgaagacctactaatgcttcctccagacgagcaagcggaaaaagaagaaggaagatatcacttcatgtcactattgttaaacttggccaacacgtttctttatatggtcaatacatatatcattgttccaacagctgatgattactctatgagccttggagcagccgcaacggtttgtggtgttgttatcggtgctatggccgttgctcagctcttctcttccgtttacttcagtgcttggtccaataaatcttacttcaagccgcttatatttagtagcatcgttcttttctttgggaacttgttatatgctttggcttatgactttaattcattagcacttctcttgattggtcggcttttttgtgggtgagtctctttttgaacttgtgttatatccttttgttttcatgagacattgatcatatttatacattttgtagatttggttcagcgagagcagtgaaccggagatatataagcgattgtgtgccgctgaaaatccgaatgcaggcttcagcgggttttgttagtgcaagtgctctaggaatggcttgtggtcctgctcttgctggcttgttgcaaactgatttcaagatcaaaaatgttacatttaaccaagatacgttacctggttgggttatggctgttgcttggctattgtacttagtctggttagctatttcgtttcgggaacctgcacgtgagccagaagagattcatacttcacaagagtctacctctggtatggaactaaagagaaataggtctgttttttactatattcttatctgattagagcaaatcttttgtggtgaagctgatcaagatggaaatatagagaaaggtcttaaaaaaccgctgttgcttgcatcggaagaaacagaacatgatgaagaagatgacggtgatggaagcgaggaatcttctgatgattcccgtaaacccgctaactcctttgtagctgcttacaagctactcactccttcagtaaaggtataactaaaacttaatttatctctataaaatgtcgatttactaaatctttattggttttaggttcaattgttgatatacttcatgcttaagtatgcaatggagattctactatcagaatcaagtgttgtaaccacatattactttggttggtccatgagttctgtttccatcttcttgttctgtctgggtctaaccgttttaccggttaacctcgttgttggaagctatatcagcaacatgttcgaagatcggtaaggatccttgtatatattattttcttgcttttttcgccttggagtttacctaaaattgtgaatttgttattacaggcaaattctgttagcgtcagagattatggtctgtatcggaatagttctcagcttccatgtagtaatcccttacactgtcccacaatacgttatctcaggatttatcatgtttgtttctgctgaagttcttgaaggtaaaaaatgattgatgaatcttttacgttctttaaggtaaaagcttgaaacattccctctttatcatttgaaaacatgttttttgtggcggggattttgtaggtgtgaacttatcgttactatcgagagtgatgtcatcgaggctgtcccgcgggacttataacggagggttactgtcgacggaagctggcacgattgcacgtgtgatagcggatgcgacgatcactttggctggtttcttgggacagagtatgcttttgaatgttactctgcttccttctttgatcatctgtgttttgtctatcctagctacttgttatacttataactccttgtattagtgccccataggaatccagcttttgagattattaagctaactcctaggttccattgtttctcttttcttttggcttttactttgatctcttagtgaaagttttgtttgctatctatctatgtttattctagaaccgttaatgataattatatatttatctgattataagagcaaagtaatatttggtgaagctgttgaatgtggaaatatggagaaagatttaatctcattcttcaacacattgctagatgtgacattagttcatgcaacaaactatctcagctttcttcaaggtcaccttctagactgcgatttgccgttgttcgactctcggtgagttctagatcggatcctatcctactttcaccttcatgcaactagtccaataagatcggagttgtgccttgactcattcaccttaaggttggtttactgtggcttttagtaacccttatggacttagttaagaacacaaacatacaaaatagagattccaataatttccaaattatcatttgcatgagagagtaaatcaaacagtaaataaaaacagagaatacattccttctttgtccctaaatcaaagtaacaacaaacttataaaacgattaaaatggtgcaagtaaaacataacattttcaggtgactttttatgatttgttccttttcaagaatcagtgtccattggctacagatccatcttcacctttcttgccatagaatctccggtacaaggaatcaacctctttcagataataagttcccggtgccaaaagatctataataccctccttggttgtcacaaagtcctttgctccatacctatgttccattagcttcattgtctccacaaacttctcaggtgcatactgcaacaaaacaaagccccaagtcagagatcaatgatacacgattcatttcttccatattgaaactaaaatcacttcttgtgttatgttacctcatgtctagctttcaatttaccgccaacatccattacagatgcaatgtttgaaatgctgaaaggaggcttattgtcgttgaggcgtaatgagaacattgttgcggttgagccacttccataagagaacataaccacccgctttcccgcctaaatcaaccatacacatgtgtaacaaacttcaaaccaaatgtaaatggagttcaatatagccagaagaagtaaagtttgttttcttttattaccaaatcattgtgtttcttgtggatgagggaagcaaatgcagcgtagagagaagcagtgtacatgttaccgacttcctttggtattaaagtcgttggttgcactttagcatcataaaacggtttcgcaatttgttgtgacacctgcaaaagagacaacagattgagctataaatcggttttctctcagtatcaaaagcaaaagaaaagagaaatgatgagaaccttttcaagatcacggctttggtaactctcgtcaagggtcaaagatgaataaggggtgaacttttctttggcagcctcgtcaatggagctgcaatagaggaaagaaaatgttcactcacatttaacaagtaaagaactttcaatctgaaaacgtagttaataagcaagaaccttgcgtttctcaagaagtcgttgtacaagagacgagcaaagcttttctgtacaagctgcaatatcatagaggagaagactggtaagagacaattcaactagaacaaaactattgttggaggattaagaaattactttattgtatggagaatggaaaacaatgtaatcagcatcatttatggagaactctttgccctcgatcttctcgaacctaataaaaaccaaagagtcacacaacaacagaagaaagaaactgagtttttgtaactgtgaaaagaaacacttacttgttgcataaatgtttatagcaggagtcaagagccatgaggtagcaagtctgtgaaagcttaccatcaacaacctacaagtacacaagaaacaataacatataagactttgattctctgttcgaaatacttaatatcatgcattgaagagttaccgggtactcgctagcaagattgggcttgtaaaagtcatagacatgagccatgtggcttgctctcaatttgctttcgaaaacgataggagcatcaggtcctatcaacatagcaatcgctgcagctcctccagtgggccttgcgggtccttctgcataaacctgaaagcatacaaaatataaacaagtcaagaattatgcaaagactcttaggcataacaaaaaaaacatttccatgtaagatgttataccgcgctgtcagtacaaatgacgaggccataacgtccatcccaagagttactctcaacccaattgacacagtttaacaaagctgcagttccaccatagcaagcattggtcgagtcaacaccttcgacatcagtgtttccacatttctgttcattcccaacatacaaagaaacatgagcggtccacgtatttacaatagcaatccaggtcaaaagaaagtacgaatacctcaaagagctgcatcaagaaggtcttgatggacttgcttttgtcaataacagtctcacttcctacttcaagacgcccgatttggttagggtcaatcttatacttctcaaaaagtgatgtcaccgcattgaaactaaaaaaacacaaccaagaaatagatcaattcagtcttttcatgagtttatgatacatatgcaaacaaaaaacaattagccattactgaaaagagacagaaaacaaatacctcatagagataacatcttcaagctcagtgcaaaaagctaaacaatcttggccaagtccaatagtgtatttccctttacttgctccatcatgtgcttccaaagcttcctatataaccaaaaaatgatcaacaagatcagattcacaaaattgtacctttttcagtttttccaattgagacttatacgataaatctcagtataaaaaaaaaccctttcaacctttcaaagtcctcatttcaatcagatgcagagatctcgagtttgagaatagagaaatttaataaaaatccttttgtttcttaaatgaaaattaaaaattgagcattttctgtcttcatcggatacaaaactccgccgccattacagagaagaaagaacaaaaaaacagagacaatgaaacaagtgttcgtgtgtgtgtctaatctaacgagattttcttggattgattctcaaagccctgttcgtaaaatctcataaagtttgaagatttatgaaaccaaacgtcaaaaatggagaattaaaacggtacacaaaacagaaagatgctctgataaaaacagagtatcaaatgcaatagctccaataataaacagagagaataaaaaaaaaaaagcttggagttttgttacctgttgaacacaggtgggagggaaatagatatccatagccaaaatcccaacgttcttcgccattgtttcgatgaaaacgaaagaactctgaagagactgaaatcgaaaggttcgatctttgagaagagaggagaagagagagagatttatgaagaagctgtagaggaagaagaagaaagatatgaatcggttgatgatgaaaactcaatttgtttttaataaacaagtccacgagaaaaattagcagattttctttctttattttttattttcctaataaaaaaatttaatttataattagttgtgaattttttttaaatttggtcaacaaaatacttgtacagttgttcttcatttttttagttataaattttaaatttcaaatttgatggttttgtttaaactaactgaaacatgccagatatatttattggtggaatcaatacttaattataaaatttttggtgtgtaattaaagaaactttttggttcaaaattaacctattttatatttttctggggacaactacatgtgaacaaacaaaaaagcctaccaaaaaaaaaacaagaacaaaaaaaaaaaaaggtgtcaaataataattacctggaaaatggatatgttgtgacttgtgagagattggtgcagtccggaatctggacaacgcagacttcgtgagttagctctccctcgtgcttctttttgtttccttttttacccttttcttattcgttaatttaccaattcgctactcctaaattttggttttggttttcttgttatggtttttggtttggtttatgttttggattcaattggtttgttgataagtatgatagagtagctttctgatgtaacttggtgagataacttggagttaagttcaatctatttggaattaaggattgtttttgaataaataaaatggataaaaaagtattaaagataattaaaaaatatagtataaattactttttttttttggtagaaatatagtataattttacttataagtctgtatttgaatttcttttcgttgctttttatcttttcttttttgtttcatatttaagaaatcataaattagaaagagaaaaatagatttaaattatagtttaattttgttaggaacttcaactttcatttaaataaaaaaagattttgtaaaagaaaaagaatatgatttaaagaaggagattaattaatacactcattttccatacgattagatatgtttttgttttcttctcttaattaaatacactcatttttcatgcgattagaaatattgatttcttctaaaaaaatagaagtaatttaagatatgatattcggtaaattaaatggaaaaagattttgtaaaaaaaaaagaatatgatttaaagaagaggattaattaatacactcattttccatgcgattagatatgtttttttttctctcttaattaaatacactcattttacatgcgattagaaatattgattttttctgaaaaaatagaagtaatttaagatatgatattcggtaaattaaacctacgacctggtggattgctaatgtgtccgataccattaattgattagattaactccgaaccaactcaacaccatgaaaaagtcatgagttatacattaattcacactatcaataaacttccttaactaattttgttttttatattctaacactagtattgattctctttgtaatctagtttattaatagggagattttgaaatgttatagtcctcaacaacatgaaaagtggaaacatcacgtaaaaacaaaatattattaacaacaaaaaaaactcaaccaaaaaattaaataaataaaacttaagttttatagattagtggttcccattttaggtgtaaattgttttatgtaagtgtaggacagagatcgattcctttcagataattcgaaaaatttatacatgatacagtaatattttggtgattagctgttaactagatcagacagaacatggtgtgatttggaatcaatgagtttggactttgaaacatgtgaaaacattgtcgttttcctaaagctaacaacaatctccctaagaccttggaatctccgccaccgtccgattgagatctcattatcatcctgaccgtccgacttggttactaaaaatggtcaaacatcattaaagaatgtaccaatttcagaccgtctctgagagatgagtcggattacgctgacgtcacgattttgtgggacataaaagtgatgacacgatcgatggttgcacaaaactcgtggttatacacgtgagcggggtaggtaggttcgatactatttcactatcttcgcttaaaagaaagatacacactttaacaaatatattaccaacggttgttatcgggccgaaggcccataacatttgcccccttaaaattggttatgggtttatggctaaacaaagtaacaaactaaataattagtcccaaatttcatacgattaaaaataaaattttaagaaatctatttcaaagctaataaaattcatcttttaggttggggaagcctgccaatattcaagagtttatgacgtcttaatcatctcgaaacaatatgtcttaaatttcacattgatatatcttgatgcttgagtaaatattattttgaaacaatttttaatattttttacttaatcaatagataaaactaatttaaataaatttcattttatatagaaacaaatttaaatttaaaattaatctattgaaaataaaaataattttttttgtaaacaaataatcagaccggaagtagcagtttaaaccaaaaaatatatatccaaaacacactatgatagatcaattgaaatattgcaataaatattgaaaatcttcaagatcatctatattcatctatgtggttgttggttaatcacgccaatttaattagagataagattttaaaataacttaccaaaggaaaaagaagtgaaaaaagaagtagatgtgtggcattactaaaagatgatggactcaaaaaatgtcaccatttttttactacgagctctttgatgtgagagtggctggctcatccgaggtcactctgaaagtatctactgtaaaaggtgattgttgttatctactttaagtaattctcgtaattcttccatttgttatgtatcacttcacccgcaacaaaattagatagaagacatataagttctagtgcggccctaacgaaagagcttttggtattatcaactactgccacatagtatatgatgcttaaagatgagtaaaaggctaatttcaatatggataatttcgaaagtgctatttatacattaattttgatagagtacagattttaacccgaactaaatagtttttcaactttcttacctagatccgccactgtgtacatgtggcatcagactctagaaaaactatttacatggcatgtgagtcatcatgattgaccaacactaatatggtcaatgttgattttgacacaaattttatagttcatatatatagtttatttgaaaaaaatgtttagtcagtttgaaatttacactctatcaaatttgagacataaaatagcacttcgaaattggcccttttacccgcttaaatatatgtacgtataatattgtggccaaaatttcaatcgcctaaatttaaaattgtaaaaaatctatcctaaaactaataaactcatacttaaatcatgcaaatattcaagagtttgtgaaatcttaatcatcacgaaaattatgtcttaaatttcatattgtcatatattgatactttttttcttttgagcagtcgaaatagtgccatgattttgatttaggtgcattagaaataggcttcacttaccgtagggattagttgggtgctaaaagttgggattaaccttggttataaaaataaatttataatttagataggctaacgaagtagcagtaacaaaaagaaaaaactccaaaacacacactacgatagatcaatggaaataattgtaatgaatcgatgtacagctcataaatttgaaaagtacaactaggaccctaaaagcacacactttcattcagatcacacagagttagagagatttcttgaagtagaagaaataaagaacaattgttgacactataaggtaagttttcagatggtgaggttttcttgtagagtaaggaatgatcctatgatcttgccaccgagatctgggaatgtctcgcatccaggaagagaactcactttgcctgttttatcgacttgaactggatacttaagaagatgacctgacatctctgtgacttcctctgctgcatactgtccccaattcagctcactcaattgcctaactcgtctcacgcattccatgttctctggttcctcgaattcttgctctagaaaccctagatgttctgcccataacgacattctatatccaaagatctgcaagaaattgagacaaaccagggttcagacaagtttaagagaacatacattggtgggtttctagtttttcgtcttagaatgctatcctagattgagaagtagaagtctctgaaagtcttatttacctgaccacgaggacgagaacctttcttagcccatgaatgatgtggctgataccctcccatagcgatttcagtgtctctagttccttccaaggatctctggttgatattcgcggaaccaattaagacaaactcatcatccactaccatacctttggaatgaacatatatcatgaatcttcgactcttcaaagcttgcacctagattagtttgtcgtttcagtgaatagacgaggccattaagccgaaactaaagatttcaaaagaagacatttatatatgtatacctgtgcagcatttggctgaggtggcttccgaggacaattatatacattaactgttccatcaggaacctctctggttccaacctctctgtttccaagacagaagaagttcaaaaagtcttgtggctcaagctggccatcaagaccaacttccagaagtgccttgtagatggtttgatacatcatttgcatggttttgtgctgcagaggttgtgaaaaattccggtataaaaaaggcgagattgggttgttctagcaaagaatcaacagattatttacctgccagtagagaattctttgaataggcttacttgttggagcaccttctggccacattggaatgacaatataagcagcgaaattctccctcgctctaatcttattagcaatcttaagcgcgatttccatcgggattagattattagcacctgcaataccaaaattctttgtttatatactgcaagcatccattattaagcttgccttcaaaagctttcaattttcttacccaagtccttgtttgaatcccagttgaatgaagatccaagaaaatattggttctcaatgtaaatgaagtgctgagcagatcgtatcgccttaacataagctgcatgtatgctcatatctatgagaatgttcttcccacatagaagattctgttcacaaatacataataagtagagaatagcaacatgacgacaaactataacagttcagagttgtgcttactcttccagtagcttcctctgggtcctttggaaaccctttgactgaagtcgaatcaatagaacggaaaacctaaacattaatatcattggaaaaaaaaatgagattccttgtcaccaccacaaataacaataactagcaaaaaaattagacttgctaaattacctgaacatgccaagactctggatcattatcattagcagaagaagcttcagaaagtcccatgatgtcaggaattctgtttatcctaagcaaagaatcgtcaaaagaagttcttcctttccctattccacgaggttttgaagccatccagcgttcctcgaaattagcaagcacatcatatgcagctggaccatcaattttgctgtgcagatcatgccatggttctcttggtccaacatcctcagtagtctaatatgaaaacatattttacacggatcaagaatagtggcatccagttccaaaattataaccaaacaagatttttcttaaatgattaccacaaaatttgggttatggaagtcatctttatggagtgtctttaatgtcccgaaaagagaatgcttgggagtatcaaatcgtccgttgcacaagtctagccctccaacaaatgctacaatctttcttcggttctgagctgcttcagcatctacaatcatagttttctgatgatgcgtgtagattgtttcaacttcctgatcatcataatgacactcaaattttagactatgaagctatacacacatgagtttacggagtaatgaagtaactaataagcatcttacagatttttttatgaagctgtgacctttccccccatatctaggacaaaggagaacttgcaccgatgagtgcttgaaaaaacggcgagtctcctcatcgcttgtgttcataagtcctttctacatgcaacaaaacaccagctttcattaaatagatagaaggattgttgctaagttagtacagacatgtataattatctaattgaagcaaactcatgctttccaataagataaacagaaaaagggtcagaactgaaacaaccaaatatgtgactatgtgagaagttaagaacaacacattacaccattcaaaattgtgtacaaacagagagctccatagaattagttaagtgataagctataaatcaaaatttgaatatatatatatgtttgattatatataagcgataagctccatgaacaattcagagtggaaatttgaatatatatatatatatataagtttgattttatgggtaaacaataatagaatgtcttaatcagaaaaaacagagttatgtagattcttactgtactgaatcccggaaaactcattgaagttggatcatcccacaccaaaaccaacactctaacaccttcttgagatttgactttaagtaactcccctaatgtaccttcggtcggatcattgttacgacgaaccagcctaaccggatggaaaactgaccaacctgtgatataaatcagcctccttgcccgtcgtatcgcatcagccatatcctcccagcattttccatgtctatactgaatcccaccatcaagatgtacactcggaagagtaccgtcatcgacatgagcatcctgataaagagtaaccctaccgcctttcctcaaagggaagtatgtaccgggaactcctacacactcaacaccagaaccaacacccttttggtaaagtctcattctttccattggagtatactgaatagacagactcaacatagcaccttttctacaaggcttcccactactgttaagtatcggaaacagcccttcgattctattcccggaacacaactgcttggttggtattccaacaactcctatgatctttgatccaataggatcattgtctttcacaacaaaatgtacttcagcagcactatgagcaacgggtacatcgaaatgctgcatccacacaggattctcactattgctaataacaaaagttctaccaatgacagcaccagagatagagacagtaacataaggatcacttgtgaacttagaagacttctcaccatccactttacgaatcctccgacctaactcagaaaacgaaatcccaccaacaagcttgttacggtaacatatcatgttaggaagatgtttagcttccttaacccaaatgtctaagttaccatgtaacaattcaaccatcaaagagccactactcgtagctaacggaacgagttgctggtcaagccactggccaaactcgtggtttgaccctcctcccattgacatagtctcgttataaactggatgatacaaaatcaaaaacctccaaagcaggaaacttttagttgtcagatcaaatttcaagcataaccaagttcagtgagacaaaagatcgatcacttggtgcttggtggggactaatcgaaagatcaagattcaacaaaaggataaaactttgagataatacaaactcagatcaaatctatatgaataaatgtgggtctaaaaatatgggcaaattcaaatttaaagttcagatttttgtgaagaagaagaagaaggtaggaggaagcgaaggaaaacgttgacttgcaacggaagaatcggaaaaatttaaagattttggatgccgttgttgaatcgtttaactttagccattaataacacaaatttaagatctttaatcattaattaaagaacttaattaaacacaaatgccgaataaacaatttgtgttttagtaacgacgactaagaaagaagacttgcccactttggtttttggctgctcacaaagctctttctctctggcccttttttgatgcaacttcattttgattggtgatattactattcttatatatcaacaagaaattaaacattctacataatcactaaattatatcatttagtagtgtaattaataaataaagcatgacattttctttaaatgaaatcatattaaagatgatgttaccctttagaagtttccatccgcagacattttccgtatagcaccaaggtaatcatcgtctattccagcagcaacaccacgatacgaaactcgaggctcgaaagaactgtaacataaacaatctgagtcattgataataggttataactgaaacgtgtagtcaatgtcgtaacacaacaaatcatgccaactagtcctctatgaagtgctaatcaccgagagtatcgaaaagacacatgaatgaaacctatcaaaagatctatttagaataaaaacagagcttgtaaaactattcattgataaactacatttcaaactggatcgcaaaatattcacctttactagtaactgacatagccttgaattagtgtgacacattccaatcaaataaaaactataaatctgcaacctttcttattcaactgagcaatagaagatgatcaattatgaatttctaaaccctaatttctcgaacaaaatcagaaaactagtaatcaatccaataattatatccaccacgatccagtgaaagtcaaacaaatgcaaatcagagagagagagagaatacatacccgaatagaaacctagacgcaaagggagcagtggcggcggaagagaaggaagatgagtgaagactgtgcttggattgagatttcttcagtagatctaaaactatagctattctcgccattactaacaaacccaagcttgattcgatcgaatacacaaatctctctctctatgcctcttaatctcaattgaagtaatcttcctcgtttctacatcggagactcgtccgagtggttccgattaaactccaaatcgcctccggtgtagcctttgaagagaaacgcgtgaaagagagagagaaacacgggagtcgatttttattttctctttatatattttcccttcacccactcacacaacgacacgtcacccgtctcttagagattcttttggcaaacagaagacttttacctgttgctctggatgatttttggtctgagattcagaatgggaaagtttcttgaggaaggaagcaagattgttctaaccacatcaagtgaaattgtctccacagtagcaaaggatgaaaaaatctaccaaatgaagaatgttgggagctgatctctagatttccttttggaaatataatcaaccaagaactagaaggaattgggaaaaggattgcagaacagtgtaaggtcttgaacgagccattgcatcaaagaatttctcaagctacactaacagtatccttccagtacttaaaccaagctatgactctcttcctcctcaacttaagcgatgctttgccctctgctcaattactgctgctatggatggcaatagacctcttataccaaccaaggagcagcacaagattggaaaaattaccttggtgatttagtttgctcaaatctttttttcagagattggatatcaccatgacaagctttgtgatgcatgatcttatgaatgatttggcaaaagctctttcaggatgacatttttcattttctacaagccaatgtgatattgtaatcatatagtactaaagatatgacaacattactaaattaaatcatatagtaaaaatccacaacacacactttgatagatcaattgaaatattgtaataaatagatttacagctcataaatttgaaaaactagaccctaaaggcacactttcaatcagatcacactcagatagatttcttgaagtgaaggaaataaagaacaaatgttgatcactacaagcctacaaggtaagtttcatatggtgaggttttcttctactacaaggaacgatcctatgatcttgccaccgagatctgggaatgtctcgtatccaggaagagaactcactttgcctgttctatcaacttgaactggatacttaagaagatgacctggcatctctgtgacttcttccgctgcatattgtctccaattcagctcactcaattgcctaactcgtctcacgcattccatgttctctggttcctcgaattcttgctctagaaaccctagatgttctgcccataacgacattctatatccaaagatctgcaagaaattgagacaaaccagggttcagacatgttaaagagaacatacattggtgggtttctagattttcgtcttagaatgctatcctagattgagaagtagaagtctctgaaagtcttatttacctgaccacgaggacgagaacctttcttagcccatgaatggtgtggctgataccctcccatagcgatttcagtgtctctagttccttccaaggatctctggttgatattcgcggaaccaattaagacaaactcatcatccactaccatacctttggaatgaacatatatcatgaatctccgactcttcaaagcttgtacctagattggtttgtcgttttaatcagtaagcgaacccattaaggcaaaatcgaagatttcaaaagaagacatttaatatatgtatacctgtgcagcatttagctgaggtggcttccgaggactattatatacgctaacagttccatcaggaacctctctggttccaacctctctggttccaagacagaaaaagttcaaaaagtcttgtggctcaagctggccatcaagaccaacttccacaagtgccttgtagatggtttgatacatcatttgcatggttttgtgctgcagaggttgtgaaaaattccggtaaaaagaaggtgagatcgggttgtttttagcaaagaatcaaaaaattattttacctgccagtagagaattctttgaataggattacttgttggagcaccttctggccacattggaatgacaatataagcagcaaacttttcccttgctctaattttgttagcaatcttcagcgcgatttccatcgggattagattattcgcacctgcaatgccaaaactccttgtttacatattgtacgcatcgattactaagctttccttcaaaagctttaaagtttcttacccaagttcttgtttgaatcccaattgaatgatgatccaagaaaatattggttttcaatgtaaatgaagtgctgagcagatcgtatggctttaacataagctgcatgtatgctcatatctatgagaatgttcttcccacatagaaggttctgttcatgaatacataatcagtcggagatagcaacatgatgacaaacaaaaacagctcagagttgtggtgctatcttactcttccagtagcttcctttgggtcctttggaaaccctttaactgaactcgaatcaattgaacggaaaacctaaagattaatatcattggagaaaaaatgagattctttttgtcaccaccacaaataacaataactagcaaaaaaattagacttgctaaattacctgaacatgccaagactctggatcattatcattagcagaagaagcttcggaaagtcccattatgtcaggaattctgtctaacctaagcaaagaatcatcagaagaagttcttagtctcccaattccgcgaggttttgaagccttcatccagcgttcctcaaaattagcaagcacatcatatgcagctggaccatcaatcttgctgtgcagatcatgccatggttctcttggtccatcatccgcagtagtctaataagaaaaacagaatttacatggatcaagaatagcggattctaattccaaaattgcaaccaagcaggttttttcttaaatgattaccacaaaatttgggttatggaagtcatctttatggattgtctttaatgtcctgaagagaggatgcttgggagtatcaaatcgtccgttgcacaagtctagccctccaacaaatgctacaatctttcttcggttctgagctgcttcagcatctacaatcatagttttctgatgatgcgtgtagattgtttcaacttcctgatcatcataatgacactcaaattttagacgctgaagctatacacacaagagtttacacagtaatgaagtaactaatgagcatcttacagatttttttatgaagctgtgacctttccctccatatctaggacaaaggagaacttgcaccgatgagtgcttgaaaaaacggcgagtctcctcatcgcttgtgttcataagtcctttctacatgcaacaaaacaccagcttttaattaaatagatagaaggattgtagctaagttagtataattatctaattgaagcaaactcatgctttccaataagataaacagaaaaagggtcagaactgaaacaatagaggaaagtatgaaatgcaactgaaacaaccaaatatgtgactatgtgagaagttaagaacaacacattagaccattcaaaactgtgtacaaacagagaggcactccatagaattatttaagtgataagctataaatcaaaatggagaaacaaaacagagaggcactccataaaattatatatatatatatatacatgtttgattttatgggtaagcaataatagaatgtcttaatcagaaaaaaacagagttatgtagattcttactgtactgaatcccaaaagactccttgaagttggatcatcccacaccaaaaccaacactctaacaccttcttgagatttgactttaagcaactctcctaatgtaccttgggtcggatcattgttacgacgaaccagcctaaccggatggaaaactgaccaacctgtgatataaatcaacctccttgcccgtcgtatcgcatcagccatatcttcccagcattttccatgtctatactgaatcccaccatcaagatgtacactcggaagagtaccgtcatcaacatgagcatcctgataaagagtaaccctaccgcctttccttaaagggaagtatgtaccgggaactcctacacattcaacaccaaaaccaacacccttttggtaaagtctcattctttccattggaatatactgaatagacagactcaacacagcaccttgtttacaaggctttcctctactgttaagtatcggaaacagcccttcgattctattcccggaacacaactgctcggttgggatttcaacagctccaatgatctgtgatccaataatatcactgtctttcacaacaaagtgaactttcgcagcactatgagcaactggtacatcaaaatgctgcatccacacaggattctcactattgctaataacaaaagttctaccaatcacagcaccagagatagagacagtaacataaggatcacttgtgatcttagaagaattctcaccatccactttatgattcctccgacctaacccaaaaaacatcccaccaacaagggtgttatggaaaccatccatgttaggaagatgtttagcttccttaacccaaatgtctaagttaccatgtaataattcaaccctcaaagagccactacttgtatcaaacggcacgagttgcttgtcaagccactggccaaactcgttgcttgaccctcctcccatagacatagtctcgttataaactggatgatacgccatgaaaaacaaaactcaaaacgcaaaagtaggaaactcttagttgtcagatcaaatctcaagcataacccagttcagtgagacaaaagatcgatcacttggtgcttggtggggaataatcgagagatcaagattcaacaaaaggataaaactttgagataatacaaactcagagcaaatcaatgaataaatgtggatctaaaaatatgggcaaattcaaattaaagttcaggtttttgtgaagaagaaggtgagagggagcgaaggaaaacgttgacttgaaacggaagaatcggaaaatttcaaggatttttggctgccgttgtggaatcgtctaactttagccattaatgacacatatataagatgtttcatctttacttaaacacaaatgccaaataaactatttgtgttttagtaacgacgactaagaaagaagacttccccactttggtttttagctgctcacgaaactctttctctctggtccctcttttgatgtaacttcaatttgattgacataattattaaattaaatcatatagtagtgtaattaataaataaagcatgaaattttctttaaatgaaatcagttacaagctttaaattttttttttgctactatgtctttttggatcccagattagacatgtaaactaagagcatctctaatggttaaccttggatcttaacaattatttctattaaagttttgttatttctaagctaagaacaaaatgagagtatcttataaaaatagtcctccaatggttaaggttcataagggacaaaaatcaaatttttgtatttagatgtctttcaatacaaggaaccatacaaacttttttcatccttttcggcccatgaatcattccagttatgtgtagccctatgatgactgaatgtctagccctatgatggctcttggcatgtaattaaagaggtatgttgcatttagagatattacctgagtgtagcaatcgattgcggttgtaaaatctttggatcggaaagctaagtccccttgcttctttgaaaagagagattcctgcatctgggttgtccacatttgaaacgagagctgcagaagaaggtaaataaaatcatattcaaaacaagtccctaatgcaaaagactaagtagtaagcgagaggaaggaatagattaacacctcaatggcaattccttgtatccaatcttactaagtatttcctgtatggctgtaagatccattcttaagcagtatttcctgtatggctgtaagattcactcttaagcatgcatcatcaccaaaggatgtctgagaaagaatgaggcaggaaaaacgatgatgatcatcatttagattttagtaaggactgaactagagattccttccaagaactatccagcaagaaacaaagagccaggtcctacattacatctaaagtttatatatcttctattagtagagaacttacatggctcggtggaatatgttttccactaatgagatcgagcaaaacggttccaaaactgaaaacataatacactctctggtgtaactctacctgacacaagatgaagaaagtggatttagctttgggaactttgtgccctgaaatattttggacatatataaacatgaagcagagagagttttacccgttagcaaatttctctgtaggagtaaatgccaagttagtgctatataactcttcccatctctgctacttttcatgagtccaaagcaagacaacctgggattcccatcctaaaaaccgatgaaagataaacaaaattttacgacttcaaatacagatcactcagagagataaagaaacattgaatcaatatattcaccaaaataaatgccagcattacagagcttgattaagtaaggttcatgcttaagcaggaaaaggagaacgttcaaacacaaaccatcacccaaatctatcgttaactaccagactcactaaaattaattccaattgacaagatctaagaaaacccagtttcgaaatttgatggtttcaattccaatcatcaatctcggctaaaaggaactgaaaaaaatgaaaacagagagatacgtaccatgggaaatagattggagcatactctccgatttgaaatcgtcgagggtctccaccgacgttgaaatgaatataacgacagatcggatccgacgcatatctcctcataattcatcggatcgagtgatttcgcgttgaaggtcgacaaaaagagagagacgatgaaatggggaaacaaacaaaatttgtcacgtgagtacttttttttttgggttttgtcattataatcccaccaatggtgtatcgacacgtcatcgcctcttaacataccaaataactctaacctaaagacacacacacctggttgcacacaaaaaaaaaaagacacacacttcttagttcttataaaggaacaaaacttgtaaatagggatatatgtcatgaccaaaaagatattgtataaaagataatttttattcaatttttttttttttttttttgatctgttgatttaggttggaatgcagaattgtggtgaattcaacaccatctctcaaatcttttagagataatatagatagatcagagaagatagaaaggaaaaaagatggtgtgacgcgttgaatgctccatggccactgcaagaaaatgtaataacactttcagaaaatggggatgtaagtaaaaaaaattcggaaaaatgtctgcaaacttatgaatctactcatgatcaaatggaagaagaaaatctcaagaatcttgacattattatcatttgctgacaaattgcatagagaagagcaagtcaacaaatccttatctgcttccctattctaataattgtattgagtttttcctgtctgacttgttgcaactccttggctccaacaagttacgagggaaaacatagcgaactccttccagtagttactacttaaactaagctatgactctcttcctcctcaacttaagcgatgctttgacctctgctcagtattccccaagggccatgttttcgatagggaggaattattgcagtagacctcttataccaaccaaggagcagcagaagattggaaatgattacctggtgatttagtttgctcaatcttttttttcatgacaagctttgtgatgcatgatcttatgaatgatttagcaaaagctgtttcaggatgacatttttcattttctacaagccaatgtgatattgtaatcatatagtactaaagatatgacaacattactaaattaaatcatatagtaaaaatccaaaacacacactttgatagatcaattgaaattttgtaataaatagatttacagctcataaatttgaaaagcacaactagaccctaaaggcacactttcaatcagatcacactgagagagatttcttgaagtggaagaaataaagaacaaatgttgatcactacaagcctacaaggtaagtttcatatggtgaggttttcttgtagtgcaaggaacgatcctatgatcttgccacccagatctgggaatgtctcgcatccaggaagagaactcactttgcctgttctatcaacttgaactggatacttaagaagatgacctgacatctctgtgacttcctctgctgcatactgtctccaattcagctcactcaattgccttactcgtctcacgcattccatgttctctggttcctcgaaaccttgctctagaaaccctagatgttctgcccataacgacattctatacccaaagatctgcaagaaattgggacaaaccagggttcagacatgtttaagagaacatacattggtgggttgctagtttttcgtcttagaatgctgtcctagattgaaaagtagaagtatttgaaagtcttatttacctgaccatgaggacgagaacctttcatagcccatgaatagtgtggctgataccctcccatggcgatttcagtatctctagttccttccaaggatctctggttgatattcgcggaaccaattaagacaaactcatcatccactaccatacctttggaatgaacatatatcatgaatcttcgactcttcaaagcttgtacctagattagtttgttgtttcagtgagttaacgaggccattatggtgaaactcaagattttaaaaagaagaaatttatatatgtatacctgtgcagcatttgcatttgcgtttggctgaggtggcttccgaggactattatatacgctaactgttccaacaggaacttctctggttccaagacagaaaaagttcaaaaagtcttgtggctcaaactggctatcaagaccaacttccacaagtgccttgtagatggtttgatacatcatttgcattgtcttgtgctgcagagattatgaaaagatttccggtatgaagacggcaagatagggttgttttagcaaaaaattgacaaattatttacctgccagtagagaattctttgaatagggttacttgttggagcaccttctggccacattggaatgacaatataagcagcaaacttctcccttgctctaattttgttagcaatcttaagcgcgatttccatcgggattagattattagcacctgcaatgccaaaactccttgttattactgcacgcattgattactgagcttgcctttaaaagctttcaattttcttacccaagtccttgtttgaatcccagttgaatgaagatccaagaaaatattggttctcaatgtaaatgaagtgctgagcagatcgtatggccttaacataagctgcgtgtatgctcatatctatgagaatattcttcccacatagaagattctgttcacaaatacagtttgtcagcagagaatagcaacatgatgacaaactaaaacagttcacagttgttcttactcttccagtagcttcctttgggtcctttggaaaccctttgactgaacttgaatcaatggaacggaaaacctaaagattaatatcattgcaacaaaaattagattccttttgtaaccaccacaaataaaaataatgcttcatgagttatcaatgataattagtcttgctaaattacctgaacatgccaagactctggatcattatcattagcagaagaagcttcagaaagtcccacgatgtcaggaattctgtctatcctaagcaaagaatcatcagaagaagattttagtttcccaattccgcgaggttttgaagccttcatccagcgttcctcgaaattagcaagtacatcatatgcagctggaccatcaatcttgctgtgaagatcatgccatggttctcttggtccatcatccgcagtagtctaataagaaaaacagattttacatggatcaagaatagcgattttaattccaaaactgcaaccaaggaggatttttcttaaatggttaccacaaaatttgggttgtggaagtcatctttatggagtgtctttaatgtcctgaagagaggatgcttgggagtatcaaatcgtccgttgcacaaatctagccctccaacaaatgctacgatctttcttcggttctgagctgcttcagcgtctacaatcacagttttttgatgatgcgtgtagattgttccaacttcctgatcatcataatgacactcaaatttcagatgatgaaactatacacacgggagtttaagcagtaagcagtaactaatgagcatcttacagatttttttatgaagctgtgacctttccctccagatctgggacaaaggagaacttgcaccgacgaatgcttgaaaaaacggcgagtctcctcatcgcttgtgttcataactccttgctacaacaaaacaaaagctttcattaaaacgatagaaggatcattgcttcagttagtacagacatgtaaaacgatctaactgaagcaaactcatgctttccaacaagatagacagtagcgtggatctattttggatacggaacattagccggattaaatagaaacacagagaaaaacctatgcgaaaaattaagaacatagtattaaacctgcatatttttttaactcagcattcacgcaaacagagaagcaacaacagagttatgtagattcttactgttttgaatcccagaagactccttgacgttggatcgtcccacaccaaaaccaacactctaacaccttcttgagatttgactttaagcaactcccctaatgtaccttcggtgggatcattggtacgacgaaccagcctaaccggatggaaaactgaccaacctgtgatataaatcaaccttcttgcctgccttattgcatcagccatatcctcccagcactttccatgtctatactgaatcccaccatcaagatgtacactcggaagagtaccgtcatcaacatgagcatcctgatacagagtaaccctaccgcctttcctcaaagggaagtatgtaccgggaactcctacacactcattaccagaaccaacacccatttggtaaagtctcattctttccattggagtgtattgaatagacaaacccaacacagcaccttgtttacaaggcttcccactactattaagtatcggaaagagcccttcgatcctattccccgaacacagctgctccgttgggattccaacagctcccatgatctgtgatccaataatatcactatctttcacaacaaaatgtacttcagcagcactatgagcaaccggtacatcaaaatgctgcatccacacaggattctcactattgctaataacaaaagttctaccaatcacagcaccagagatagagacagtaacataaggatcactagtgatcttagaagacttctcaccttccactttcttccgacctaacccagacaacatcccaccaagtctgttatggaaaccatccatattaggaagatgtttagcttccttaacccaaatgtctaagttaccatgtaacaattcgaccctcaaagagccactactcgtagcaaacggcacgtattgctggccgcccccatggcttgaccctcctcccatagacatagtctcagtataagccggatgatacgccatgaaaatcgaaatcaaaaacccaaaaagtcagaaactttcagctgttagatcaaatctcaagcgtaaccgagttcagtgagacaaaagatcgatcacttggtgggcaataatcgagagatcaagactgaagagtgaaaaaaaagaagataaaactttgtgataatacaaactcagatcaaatggagatctaaaaatatgggcaaatttatatgaaatctcagatttttgtgaagaagaaggtgggaggaaacgaagggaacgttgacttgaaacggaagaatcggaacattttaaagatattggctgccgttgttgaatcgttctaactttagccattaataacacaaattaatcttcaattaaactaataaattatttgtttttagtaacgacgactaagaggacttccactttggttgttggctgctcacgaaactctttctctctggtccctcttttgatgcaacttcatttgagtggtgatgttactatttttatatatcaactagaaattaaacattcgacttaatagtgtaagtaataattaagcatgacattttcttgaaatgaaatcatattactatttaatatttattatcaacaagaagtaaacattcgaaaaatcactaaattaaaccatataattgcgtattgaataataaatcaagacattttcttcaatggagaagacattttcattgttgaagtcttcctcaattttgaactataattttcaacagctctagtggattcatattatctatcagtcgtggtcttagcacatcattatcttatagtgaaaagaaaaaagttgaacttgtaaagaaatacaaactagtttgaaattcgaattgagggattaggatataatttatttattattttaagtttataactagtcaaaatgattagctaatgcagataaaaagtattttaattagggattaataatcacattctccgattacaacttgaaaaagttggcgattagtcaaaccgagccggctaagcagaattattataaaaggcatcacggacaatagccgttactccgtcaaaaaagtaacggcgatcagagtaacttaacagaacgaaagccaaaacgtgaacacaaactctaattcgtctcccacttctcaaaaggataaagaaaagctctgattttttatgagcaacaaaaaatagtttagtcaaagcgcaattacagtttattttttgttaaaaccaaaaagcttttaaggattaaaattagttagggaataagaaaaagttggaaatttacataagtgaaatgaggatttacatgattctacatttgctatctttatctttaggggatttgccgtcgtgtctcgaagacgcagctgatgatggcctgtggctgctccttggtacctgcaatggtcagtacaatatctgatcattaacattcatccaaacaccacaagaagcaaggctgcattatattcaatgagcttctgattacggtgtatgatcattatcgatgttttacactcgcaattggtacttgtaaactcatcttagtcggtaaagtatatggacagaaaacaaatgtactaaacaggacttgcagatgtgcttgttaaggctatactctcttactattttaataatcagtgttgtatattgttgcaatgtgcaggtcacacggtaatttaccttttcttataatcattgttaaccatttgtgtcgattcctgctttttaagaatatagtgttatgagtaggaatgaaatacctgtggaccagtgaccaatcgtgaggcagcaacgctagttggttgtggagttgggttactacgtgggctctggtcctcaaactcttgttgttgcaaagctattgctagttgcagatcagaactgcatagtaccatgggaattaaaattaaacaatcataaatatgtttttaagaggacagttataacaaatgcataaatgtgtctctggtgagaaccaatgggttagtggtcaaagaaaggtatgaaatatttacttgacatctatgcctgcatccgctacattgttgatgctggcaagataatcctgtgtagggagaaccaaaagaaaaaaaatgattaaaaaggtaaaagaaggagatctaatgtggattagtgactatattatgaggagaacatacagcagtatttgtgactgcgtttcgttcatcccatgtgccacttgcaccacctgtgctgctgtcgatcgtgaagtccttgaaggtagcagtcatgaatgcagtgtcaccattaacctgaaaccagattgcatgtcaatagtggtcacaacagccatagctctaaagagattgtggatatagagatatctcctaagaagccaaaattagcagataagacaaatggtgagtaagtaacttttgctgatacctcgtttagtttttcccaaaccaaatcaggctgattcaggtaaccttgatctgtagccaaaagataaagttcaccttcatactgaaaatatgacagcaacaagaagaatttagttgggattaacctgttgcaattcaaagatggaaataaccgcaaactaaacaaaccttgaacatggtgcagaaatgattgttccggaaaaaaacacagagttcacgttctttgaggccttcttgcaagcgaaagagtctgtaagatatgatcaataatcaatgtaagataatacatgagcagtcaatttaaaatataacttcctaactatgaataagatcacgcacccacaaaaggttaattgacttgcactattcttcataaagttcctgattagttcacctggaaaaactcaagaacaactatttaataattgcaagaatatatggaaaaatgtgaactagagcaaagagagcagctctaaccacaatggcatgcatgtatgagtttccgaaaatgtatttcaagtgtatcacaagtagatcagacacagtataatttaccttcttctgctgtgagcccatccgtagccctcccttcagaagaacaatcaccaacatccttctcaacccttttaccaagaagtgactcaccttcataaacgggttctttgtctgcacaaactggaggcactgtgtttacacattcctcaccttcgtacataggttcatcggtagatacaggtgggataaaagcgttgggtgcatcatcatgctgggatctgcaactcaaatctggagatgcaatgggtatctgagtaagaattttcctatctaatatcttcagatgcaattttagccagtaaaatgattaagatggaggagtactatacttatgtatagagacatctataaggttacaccaactaaggaagagtcaaaaaaactacctggatcaatagaagctgcatcagacttgagtacactctcagaactgctttcacttttcgctgactccagattacccttatccacagagagtgcctcagaagaagttacatcgacaatggcctctttgctgctactcacgttctcaacatcacaagccgtttcacctccagattgcttagaagataattgatcatggttaagatcctcacttttagttgtaatcgttgtcggaaatttcccaactttgatcatattcccatcattttctgatgctttatcatcatcagttttgaactggtctagctgactgatattagtaatatgggtgctagttggactcgcatctgaaaatgtgaacgcagaatcttgattggttgagtctccgttagtgtttggagttggatcattcccctgcccctgtgataactgcaaggcttgcaacaactctgtttcttcttcaagatccccctttctcattctacgaagctctgcagccgcaggtggagaatcatcaaaagatcttgttttcgaaagacaaggtgaaggaacccctaaaactgcagtagttgccgcagcaaaatcaacagaatcttctccgggattttgatcgccttgagcctctacattctgtgtctccagtgcaactagctcacccataagagcattatacgatttgctaccaattgcattagctgcttcaacatcctgtaggtatgcacatgggaaacaattgaatcaatacttttacagttttactacaggcccaggattgataaggacaccatcttaaaatgagtgctcttgaccactgttccaatccatcttaaaacgagccaaacaatggataaaaagaataaagtaacctatgttttgtttctcaactctcaagaagataaagaagagaagatgaccccacatcccaaacatccacacacaaaagacaggaacgaaattaaaaaacgtcaacagcctatactaatgaaatttaattatttacgcgcagacagagccattctgataaagtatgaaacaaaatgatatacctgaggatcaactatccatccatgatataagggaatgtcaagtaaatcaaatattgcacattcaggtgtgaactcaaaatcatcaatcctgcaaccaggtaaacactcatgataattaacttatgaatttctacctattataagcagaaacagctgacaaagtattaacctcctgaatttaatattgacatcaattccagtagtaaggcgtggaagaagatcaattgcatcagcaatgttctgttgctgattctcaatatatccttcatctttgttctgccattgagaagaataaaagattcacatagattcaagccacaagataatataaagaacaggcaaagataagaagccagcttatttacattgactttactattggaatcaatgagtctgtcgaccacgagggacatcaatctctcttgagaaacctcataacagtcaggatttagattcaagttgtttctcaagagaagcacattacctgtttcatcccaaaatcaaataacaatcagtaatcaaagtgttaattgatctaagtattattaagcacactaaataccaaattctcacacttgtcatttctacgagaagctcaagctaacaacaaaatctgatgttcggtacactaaccatcaaatcaatgattcattacattgtacggaacaagcaaacctaacaccgattcttcaatttcttttacaaattccacaaaatcagtaacgcaaacctaaagaatcaatgatcataacaccgaaattccactttccaaaccctatttttacgatctgaatgaagttttatgaggacgaaaaaggagaaaatagaaacatacaaatggctaacaaaggacaaggtccattttcgttctggagaatgataggtgtggttcttccaaggaactgaatcgatttcgtcttatacaaaatctcctcctccgtagtagtttccttcggtaaatcttgctgctgcatcgcttcttgattcgtctgcgtttcttcgctcggagattctgaagatgaagcggtcgccattgacgatgatgatatcaaccaaagctaatgaaaaaacaaattcgaaaaaaagtcaaattttcgatcgaagaagaagagagacagattattggaaattccgaagaaattttattttttctgatccaaatcgaaaagaggaagcgagcgagagagcaaagaggatttaatttatattacgagaaagaacttttatgggaaggttgatattgaaatgtgtcacataaccaaaccggtacgtaccaaatcgaaattccggtattgtttaaattgctattgaaccaaatatagtaacgaccaatttttcaaatttattccggtatttgatgtatgagaagaattatggttcgattattacggttttgataaaccaattgggtatctttagtgcgtatcttctcggggaaaggtcaatttaaatgataaaattcttcatttcttatcataacaccgtcatttcatttccttaaaagtcatcttttaatagtttttttattcctaattaatttctttataacacgtaacattttaaaaaattttgggaaatttcttgatatatcatttacgaaagaattagaagtgtatttatcacatttatttatattatagttttacacgaaaagttatatgaatgtcagaatgtgttgacaaaaagaaaaggaagaatataagtgtttgacgatctagaaggaatctataaaaacggtgggacaatttgaatgtttaaagaattatgaggtttgaggtttaaatcgaaaaacagaaccaaaataaaagtgtggcctgcgtctaaacaatggtgtgttttttcactttaattgttttccgtttagtaattatttcacttcaatatataagcatgtatttttattaaaaacatgaaaatactgtagaaattatgttttataaattatcacattaatgactaattttgagaaaccaaactttatatattaagatgttagtaacataacattataaccatcaatctcaattcacaagggagataaattgatgaagcagcagaataacatcatttctgtttgaccacgcttgtacaaacatgtcaatgacaatgtgttggtatttttaatgttgactatatatatgggctgtaattgaatagttaaaagcccaacaggccatttgaaacctaattgttatactatcacgcgtatagatgatgaaatccaattataaaacttcgaggcatatggcttttgcatcattttgagtcagccgatattcaacccaatacacatcggtccggtttagtagttggtccatcgatctataccaaatatatcgtgatcaatggctagaaaaaccatcgatctcaatgaggcatattaggaatattgttccacattagaagttgagtataattttaagtggtatatatataagttatgagtttttccacttattgtcaattagttttgagttgaaaccgcacaatctaatagatttgagttgtatataagagatatagacctttccatttattgtcaattaattttgagttaaaaaccaataaaacttaacatggtatcagagtccaaaaacacatgattcactaatccagtccggaaagtggtctggtcatctttactaattaatagttcaaaaaaaaactaaattctgtcgaaataactagaaaaacattatttccaagaagcgtatagaaaaaattccacattaaaaatatagaatagacttgactagtgtataaaaaatataaatctctttattcattgttaactagtttcgaattagaaaccataaaacttaacatttttaacttttttgttcatatatcttcgtttgttctcagtattcattatatctaattcattcttttcttttctttttgatcattttatttttataagcgaaatttgcatgtataacctaaaaaaaacttattaattaagaaactaatctattgcaaaaaacttacactataataattatgtaatatataatattacaagtttgtcctcacccccacaataattatcaccaccaccaccactgttgctgctgccactgccgccaccttcgacgtcaccgccgccgctgccgccactgccgccgttaccgtccttaccggaatgaatgccatcacctgagccattactccattgttggggttcccattgtcactggagtcactgccatcgtcggagctgtcaccgtcgttgtcgccgaagttatcgctggaaccaccgtcgttgttggagtcaccgctggaatcaccgtcgcgccggagtcgccgccgtcgccggagccatcaccgaagtcaccgccgtcgccggagccgctgcagtcgccagagtcaccgccaccacctataatcatttaataaaccctttagattagttagttaattgatacatatatagtgttattttcttaattatttactgtaaatatgttataaattttttcttacactaacgctttctttaattgaaaaataagatgtatacagtagacattaaaaaaaagactcattcattaatcacatatggcatagtggtccaaagccacagtaacctcttacacgaagttcgaaataaggcttgctgactcgataaagtggaaaaattaacaataataatatctcattaaaaataataacaacccttaacaaacaaaaaaataataacaacaacgacttaagtttacaactgaaatttgggatatgttcacataagaaaacgaagcaagtaaaaattagatccgttcgcttgtaatacatatgcacataccaatttccaaaattctaaataattatgagaaagaaacaatatataacaacactttaatacagtatatattttggctaatgcttgtggtcctcacagcgtgcaacacctgtatcgagatttaaaaagatgaatcagaataaatgctaattaattgaaaaaattaaggcatccaatagtggctaagcacctgctaagtgctagtagaacaataattacagatataaaaatgataaatttgggcaaaaaagagaagaataaagtaaaaatgagggagtgggtagagaaattagaaatgcaccaaataaggagtggccatgagcgcaaataaagaagagagaatggcgtgaccatgtgaagtcgtacggaagtcataatacgcagcattgttttatcgctttgtcatcggaagagtgtggttttgttataataaaactcgtaccaatagacatctaaatgcagattcatatatatgtcagaaatagtaagaaatttaaatttggaattcaatgcatatatatgtatgactttttctttgtatgaaatgatagaattgtgttttacaaaatcatgcttttctcacattttgtgactaattctaccgacttaatttgtatgatatatagacttgtgtttacaaaatggcttggtttttgcaaccgagctagctcggtgttttgtggacgtacgacatctccatcgagaatatgtttatgttttacaatccacaagtattgtgaaaacggttttatgaccacaaataaatagtgctagtattgataattctgtatacgtatacgaattattgataatattacaactatgaaattgcagtctatatgtacaccgcaaaaaattagctaaatgtatgttaccaccattcatgactacactacatatataataagtacattttcagctctatgtataagaaagttatatgtcaaggcaaaactaaaactaattatgattgggacagagttagactcagacatggtcacatatatgcacatccaaacgttgatgaacatatatagaaattataccagcaaaagtgtaatagaaatgaatattaaatatattttattcatgccaactaaattagttaccttcaaattcgatctcaatgttcttaccgttaatgttatttcataaaatttatagtcaattttcatgaaatattttccaaaaaaaaaaaaaaaaggaattcctcaagtggtttttggtaacggagatcaaacggagagtgtgaagattcttgtccgagaggagctggcaaccgacagagttgctgcctgtctttaagtgcatttgcttaactcactttgacggacaccggatctataagttgtcggtaataatggcacgtgtcatgatctcaacggctaagcttttttaatctacttttttttttttggtcatccttttataatctacttttttttttaatttacggtgatgaggtacgtgatgacgtaaattggtagtattaccctacttctaagtttaaatataatcacttcgtttatatacatctacatttgttgttgaaaacaggttgatcgtaataatgtctattactttatctatatatatagagtaattatatgcaacgccacggatgacaaaatttcatataacaaataaaataattatgacataggaatatattctccaccaataatttttgcccttataatataaaaaaatttaccaaaagaagaatggatatcttgtaatgctttttctataattaacgatacgcatgtactttaattaagcactttggtctaggattatagactattataggtatagagagaaaaaaaatggctaaagataaaatatataaaaccccaaacacagccaaactatttattatcagttcatggatatagaagaataatatataaaaaattcttacgtcttttttgttattggctcctgatttcataaatttagggtttccaagaattctccatttcaatcttgccgactctttccaaagactctctctctttctactctctccctcatcgttctcttagagacacaaatcaatcaaaagcatacataaaaacaaagggggtaatcttttttctcaactatatatgtcctcaatttctgattgatctcttctctatttttagtagaaggtggagattgttcttgttctcatgtttgctgttcttgtagtaagaaatatgtctatatatatatatatatatatatatatatatatataattaaataattgctcccatctaatttcctctcatggataatttactttactgaaattaaattttttcatttaatatcttatgggaagagtggaaaatcaaaatactgttgttgattagggttaattaaattagaagaatggtgaggggaaagacagagatgaagaggatagagaacgcaacgagcaggcaagtgactttctcaaaaagaagaaatggacttttgaagaaagcttttgaattatcagtcctttgtgatgctgaagttgccctaatcatcttctctcctagaggcaaactctatgagttctctagctcctccaggtataatctacataagttttatgtatttttatatatttactatatactgattgatccgttgtatcatgatcgggtttctctataaaatatttaacgaaatccattaaaattgtggtctagatttgattgatattggttgttttatgtgtttaaacgaagatctttaatttttattattatttttgttaagaaagatccttaattttagagagaaagaaaaatcagatagatcagaaatagaaagtcaggattcgagattgaaacgtggttcgcacatgggtcaatgtttttccttggaattgcaaaatcaaaagagcaaaggtgtgtaaatacatgatgagatatagtttggagtttggacaactaacagaaaattccagtaaaaaataaaacatttttgacaaagaagagctaaccttgaaatgctattcgacacacacatgtagcactaagtttgagtacagtcttcttactcaaattaggcaataaattctcatatgagatagattccatttttacttggttcatatttaaccagatttagaaaaaacaatatttccttctttagaggtgtgtttccctattatattttttcttgtgtattttaataatgtaggaagaacttatacacactgacacacacacatatacatatactgtatatactatatacaagcacttaattactactgtattgatgtacttgaaaagttttgttttctaaaacattgggattagactgctcattttcacatatatgcatgaatttggttatatattttgtaatttgaaataatggtgtcacactaataatactgatgagatttgagtgttttgatttcataggaagctaagtattgcattatatatgcatgtataattatgatatagatttatatgtacataatttctaaacatatttcatttttatatatatgtacgtacgtaactacattaacaggtatgtatgattatgatatagatttattattgtcgaccaccacgtaatacaagatcaaaatggtgatcaaagaaaaatttatgtaccttttgaattttaattattttttatatgtacatgtacccgtcaataaatagctgaccaacgtttcttttaatttatttctgttttgtaaaattacttctcttttttactcttgggcaaagaggaattttcaaaccaaaaatagaaaaatactaacgctttttcttttcaaaatcgtcactataccattttgaatgtgtgtatatgtggatgcatgcacctatgtacatttaggatttatgtatgtttattcaatattgaggtaacaaagaagcatttgacacacttttcacccaaatagtacaattacaaaggcctctttatctgagtgatgagtgatgagtgatgagtgatgacagtgaaggtgtcattagcatgtgtctagatcagactatgttgattctttttatgatttctctatttgttatattttgtatagttataaattattttgtatgtttactatgtggttatttaattacatgtacgtactttattagacaaaaaaaaagaatgatattttagttttttttttgaagcaagccaagagggttaaaaatcaaaactaactataggtgttgtttacacatactgtatttacctgttaatcagtttttaattacttaattaagccatatccacatgactagaagatatctttaactcagattgcaacatttatatattatgttttagttattgatattcttacttcattataaatccaaaagatcagcagaagattgatacaatttttattagatcacaatactataagcattatcattaaattgtgagaaatctagcttagacatttgcttcttaattatttcctttaatttgacttgtttttgtttttgatatactgatttgatttttgaaattttaatttcagtatacctaaaacagtagaaagatatcaaaagcgaatacaagatctcgggtctaaccataagagaaatgataattcacaggtaaccaaacttcatagaattgttagtttatcatggttattttcatatatatacatttgctaaaaatatacttatccagagctcaagtaaaaagaaattctatatcaatatctagtacaattttatggtgtagatcctttggtgtaccacttttaaaaaattaatatacatgctaaagtgtatgctttatttatcgaacatgggtgataattttttatattaatatttgtacttacaattttggttaagaaaatatgttttgcatttctcatgatcaaaccttgttgacagcaatcgaaggacgaaacctatggcttggcgagaaagatcgaacatttggagatttcgacacggtttttgaactcaaaatacttatacgaatattttgttatgaatgtaacgtttacattgtaagcgtctatttaccatatgtttaaaaaatatatacatttgcagaaaaatgatgggagaaggacttgacgcatcttctatagaagagttacaacaattggagaaccagttggacagaagcttaatgaaaataagagccaaaaaggtaacttctagattattgtatatgtgatcatttcttagttttaaaataaaatcttcactcttatcatatggttattgtttcatcgagatttatgacaatgacgtggtggccgcctggttcgattatcacaaatgagttgattatgtaaacaatataaacatgggatcatcctataaacactccaaatacacacatacacacacacacacacacacacacacacttggaggcatgcatgcatgcatgcatatgtgttgagaaaagacttatatgttatcttcttcttcttttttgtcatcaccttatatgttatctttaatgagtcttttaccaactaatttagctatttaattccttaatttcagtaccagttattacgagaagaaactgagaaattaaaagaaaaggtaacatgtagcttttttattaatttagtacaaatgtattggtcaggtactaatcatatttcccataattaaacggttaaaccatatttcatggtttattgtcaatattttaggagaggaacctcattgcagaaaataaaatgctgatggagaaggtacaaattaatattaacttacgggctgatttatgttctcaattctcattctattattatgaaattatctgctttttttcaaaaagtgtgttttaatttgaggaaatgtgtgaatgaagtgtgagatgcaaggaagaggaataataggaagaatatcatcatcatcatcaacatcagaactggatatagatgacaatgaaatggaagtggtgactgatttgttcattggacctcctgagactcgacacttcaaaaagtttcctccttcaaactaacatatatagtacaatgcttatatagatattatgtagggaattacttttttccctgaagaaaaattgatgttacttactgaatttagcagttgcataaaaaaaaagattactgcatttaagctttgctttttttttctttttgtttttttcttttgtatcgtctcacccaactttgcaatcctaaaataatttcagaataaattgtttaacaggttttttatttaacataattttttcatatctttttaaaaataattgtttagaatataactaatttgatcgatatattatatgttcgggacaagttcttggagagtgaaaacaaatccgggtgcgtagctaggtcggttccctataatggctttgcggataagatctccatgtttcatgctagacatgaagatgatgtatgatttatatacgaataatgggtcagttggaaagatttttgaatcctagtagaggtatggtcttttgaactcgggaaaagttgcattgcaccgacctcttaaagtccttttacacttggtctagacccaaaaatcgttggctttctatgatcggtctttgtcagcgtgtcatttacgtgacgtggttggtttggttcgaaatttctaagtagctgaaaattcagttccgttccttccaagaacatcatcttgaagtagaattctttgtgacaaacaaaaaaaaatggtagaattctatggttatatatatatatatatatatatatatatatatgtttattataacaacagacctaatatcttctatgttttatgtaatatctatttattttttgttatttattgaacctacatacaaataaaacaaaacaaagtaaacttctaaataatatatttttcattttcattttagttgaaatataatttgattttcaataccaaactatataatatcaatattcagaataagttaattgttacgtattaaaaacaatgcaagaacaaatgaagaagccaaaatatccaaaatgaatagtagaagtcaaggtcaacatagtggactctaacaatatcaacgaagtcaaccgttgaagaaattaaataacttgtctaataagttcttcttttttcttggattaaatacttgtttgaagcaaattcagagacactgtcttcgtcttcatctttgctatggccgttacttcgcttctcgataccgttttccgacgtagaaagaagaagtctactgagtttataagctgtaagtattcatgtttcttcttctcaaaccttttcctcacatctgttacaaaacacacaaaactatgtttaattctacttgtctctactagatacagcagttttcgaattcgacttggacaccattaaagctgcaacaaatgatttctcagaactggttggtcgtggcggatttggttttgtttacaaggtttgtttttagtggtttcgtacgttggttcgtttttagtgtatggtaagaaattgtaattaaaacatccttttaaatcattttcagggtaggcttcaaaatggacaagaaatagcagtcaagattttgtctacaagttcaattagaactgagagacagtttcataacgaacttattattttgtctaagcttaaacacaagaatctgatcaatcttcttggtttctgcactaaacgagaccaacatggtcttgtttacgagttcatgcctaactcaagcctcgattgttttatactcggttagacagtttaaaacagagtaccctttccaaatacaatctagtctagtatcaagttctcatcattagtcattgtggtaatgtgttacagacccacacagagctgctcagctaaattgggagatgtgccgaaacattattgatggcatagctcgagggctacgttaccttcatgaagaatccgggttatgggtcgttcaccgcgacattaaacctggaaacattctattggattcagatttgaaaccgaaaatagtgggatttgaattggcgaggacgatgcaacaaggtgaaaacgcagctgaaacaactgaaattgtcggtaccgtgtaagtgaagttttgtgatttaacatgcttgagggtaaatgttttgaagatgtttagagtgtgatgtataaaacattttttgattatcaacagagggtatttagatccggagtacatacgaagcggacgtgtttccgtcaaatctgacgtttatgcctttggagttacaatcttgacgatcattagcagaaggaaggcttggagtgtggacggagactctctaatcaaatatgtgagtttatatttaagtaaaagtttgtatgatggtaattaagtggttccttaatcgtatgaattgtcttcttttaggttaggagatgctggaacagaggagaagccatagatgtgatccatgaagtgatgagggaagaagaaagagaatattcgataagcgaaatcttgagatacattcacattgctttgctatgtgtggatgagaatgctgagagaaggccgaatattgataaagttctgcattggtttagttgtttctctactcctttacctgatccaacatttggtaatagatttcttgtagaggaagaaacaaattggccctggtcgccatctttatctcctggtcacagctctgtcacgtcacccatatcttcacgttaaggagattgagtgctctgttttattagactgacgagagtttatgatgaaaagaattgttggttgataagttcaagtcgtaatttgctattgtcttcttctttttgtgcccaaatccagtaagaccatttaggacgattcaacaattatttgattactttgttttcaaatgacaaagaataaaatattttaaagaacactctcagcatcacataagcagtttaagtaaatactcttatctaataaatcaggggataaccaagtgtcgttagctcaattggtaaaaaccctacacgaagcttataggtcgccggttcgagtgacacttgaaacgaaactaatattacatgttgtggtttcgggcctggaagattacaggcttcggcccagaacctcctggtattaaaaaaaaataaaaaataataataattcaggggatatagcaacatttttaccaagtattgttaatgttcatcgcgcttccagttctgtttgcgttgcttcgtttatggagaatacgtagtctagctgttgatccccgttcaacacgtttgagaaagttggttgtttcggaatcggaagagtgttatcgttgctcaacatataaacgatttgtgaaatcatgggtctatctttaggatgatcttgaacacaaagaagtgcgatatgaatgcaccgcatcgcttcttctaaagaatacgaacaacacattggttcatctataatgcttacaccttttgtttcacaccaagattcccattcctgaagatgatcaacaacatatagtttgggattgatctaaggtaagttacgtttttatatatggtagataaatgatattgaactatagaaacacttacataagcaataaggctgtgtttttggtcgttatgaacaaaccttgtcgcctttttacccgatatgatctccaataacaacactccaaagctgtatatatccgatttctctgaaatcactccacctaatgcatattccggtgacatatagccgctgaaattaaccgcttatgaaatttaatccaaagattctaatgtaaatacatataggtagtgattgttttttcctttgcattgacatgtaaaaattatgtacttacctcagcacaatgttttagttttttcaaacatcattcataaataagttgcaaagacactaggaatgaaaaaaaaagtatgtgtgttataatactgagaaacataaacttaaactcaacattttagtgtttgaaacaagtggatacataactaactatacgagatgtacacttacaatgtcccgacgattctttgggtgctatcatcgatttgcttgcaaccaaaaatccttgcggttccaaaatctgagatcttaggattcatctcatcgtcaagtagaatattgcttgccttaagatctcggtgaatgatcctgagacgtgagtactcatgcagatattgaagtcctcttgtcgtcccatttactattttcatacgtgtctcccaatccaattccctagactttaaagaatctatatagatatatatatatgtgtgcccaaaaacagaacgttaagaagtcaattatttatatttcaaattcaaatgtagtagttttggatagttatattcaccactcaccaaagagtaaaccatcaaggctcttattcgacatgtactcataaattaggagcttctcatcgccttcaacacaataccctaaaagcctcaccaagttcttgtgttgaagctttatgatcagaacaacttcattcttgaactctgtcagaccttgacttgatttttttgaaagccttttgattgccacttccatcccatttggtagctttccctgcccatcaaagtttctatagtaagattgtaacgatgatgatattcaaactagctactttgtttaaacctttagccaaacaaacttacaagctcagtattaattgtattgtttaattaataccttgtagactggaccaaaaccaccttctcctaacttttttttcctagagaaagaatttgttgcaaccattatgtcatgtagatttaggtaacacatattttctccagcatcatcaattaggccaccttctaatagctctctgctatgtttttcgtctgcgtataattcgtgtttcagaaactagtgagaaatcttgtatagtgattatgcaaaaagctaaaaccgatctcacctctttgtttcttttttcttcttattcttgaagaaatgcaacaatacaaaccaacgaaacatgcagcagttgctacaagtgatgctagtacaagtggtaacacaatgcttttgcctttagaatgttctgtttttcctgagtagaaaaatgagtttagagatatctcaacgcattcgtttatttgttagtgaaaatactcacggttgtttgcagttgagatgtttgaagatgcaagtctaagaaagaatgtgtgtcccttatttgcatcgagttgttgcagattgaaagcatcttttgtccacaccaaacacttgtttccatcatttgcgtacgcttggcaagaacaatcagctacgcaacgtgaggcacacgtcctaaaagtcccggatgtcaagaccgatgctgttgttggatcagtggctaatttcatgttttcaataggaagaaactcgtcatttcgcttataacaatgaaggtatgtttcccttttacaaccaccagagtaatcattcgagtcatcagatccttgggaaaattctcgtttgaaaccaggaacacatctacatgggggaggctctcggttttcattgcaaatcccaaatgatccacaactgttataaacgtcacatctattatcaggttgagacaatatcacacgccacgactgtaagtcaacgtgccaaacttgcagcatgaactgccccgaaacacccatgaccaaacgatatctgctctggggatctactgaaaaggtgatgtaagactcatccatattcaatgtgaaactcaacttagtaccttgcaattctggaaatcccttgaaactttgaagccaatcatacaatggcccactggaccaatatgactttgatctattccaaaccgtgacgagtgagtgtagtttagggtcaaactcgagagagtatcgacccggtgatggatctatcaagctctcccaagaagtgaaaagttggcttcctaatctgattttaccgccaggaagccaagtatccgagggatgatcaaaactctgccacaacacagctgcagaagaattaggcccatctctcaatactagattaccactatcaaacagaacagcttgaacatccttgctcatactagagttaacaccggtcgaccaaactgtttcatggaaaagtaagtttccttctgagatcttttgaggggatctccgagatgtcccctccgtatgagatttacgggtggcgctgatattatcatggagaattaagtttccatctaagatctttaataagtaagtagaagcatcccctccaagaggagattctcggtttgcgacccaaacaatagtctgtggagagacgtgcctgtaccacattcctatgtagtagtttctatgatcataagtatctggagttggggtgaagagaccgagttcgaatatatcaccgctggaaacaatggtctcaaatcctgaaagaggttgattggtagaaatagtgtcagttgaagaagaaacttgaaaagacaagaacaccaacactccgtagtataataaaaacacattcttcttgcaaatctgcatgtttgttttgaaaataaaagacagaaagagtcttcttggctcacgagtcaactagactacagagtagatgaataacaagttgttcttgcaggtctccacgtttctacaccacacgatagtttgaagataaaagaggtttatgtaacataattacataatgaaagagtcttcttgaccctcgagtcaactcactagcagcgtaagtcaagagcaaacttccaaatttcagggaaataaatgggataataaaaatctcgattaaaggataatttgatatagatgatatgtccccttgttattttctcaacaaattcttattcactcatagccaaaaaaattttaacaatatgccacggaattaaaaataaattaaaataaaaataaaaagataaaataaattaaaataaaaaaataaaaaaatatgtatacttttaagcttaagtacattccgcatgggtttataaacgagtattagcgtttagatttttacaattaaagaaaactatatgtcggtttgggtttataaataaagattaaatttagattttacaactaaacaaatttatatgttagtttagagttatcaaaaaatgataagtttagattttataattaaacaaaattatatgttggtctggtttgggtttataaaaaaagtaattaaggtttatatgtctatttggatttataaatgaggttaatcaggatttagatattaaaattaaacgaattatatatcattttagatttataaaagagtagattgagtagtggtttaatttttataatgaaataaaattagatgtcggtttggatttataaaacaatggttaagattatagtttttatttagattatagtatttgttttagtaaatttaattagattacataagaaattttgattggctacttaaaagggggtgaataagagaagttcactcctaggggagaacccaagaactattctattttcttagtcatttttaagaaaaaaaattgccagctacctgaattgttacaaaatgcatggctagatatatcaagtaaactaaacgatgctgagctacctgacctatatgtattacataacgatatatacgcgatatataacgtcatgtggtcaacatcgtaaagatagaatttatgttaaccggtcgactaatattaatattttttatttggtgttgtataataaaaaaaaacagattctatattcaatatatatataatttgcatctatatatacatttttgcagccattttgtgaaataaatcctggagttggaacttatttacaatggctgccactggcttttaattattagttttttcagcaataaattgattaacaaacgaaaaacattccaaatatattccaatcccatatatcacgcagatttttccaaaatttgaactagatttcggcaactatttaaaacaaaaaatgtttgataacccaaaagacaattgcaatcccttaaaatgagcaaaacgcaactaaatacatttcttatcaattcactaaatcttatttctccaaaatttgaactagatttcgacaactatttaaaacaaaattttgtttgacaaactaaaacacaattgcaatcccgtaaaatatttgttttaattataaatttaaattagcggggtatcgcagtttttttacaggacgggtttggcgaaacgggtttggagggacgttacttaataacaattgtaaactataaaataaaaatattttatagatagatataatttgcaaaattttatatatactaatttaaaaaaaaaaaattgtctccacggtgtatcgcggattaaaatctagtatatattataatagttagctttttatttttaaaactaaattaaaaatgtgaaaaatattaagagatttgcaaaattactttttctactacttttttacaacaatagcgtgactctttttaaaataaaaataaatgagcaaacagatttgtttagtaaattagtttagatatttctacaatttgctacccctcatttttttatcaatagtacaaattattattaattataatattataaactatacttttacattaaaataaaataaaattattatattattattttatcaatatcagttaatttttacattaatctaacttaaaaccaataaaatttattcatttataacgtttattaactttatagaatattaattttaaaaaattctactgtagtaatattttattacttgcaaatagataagttaatcgagttggatcaatcattgttaactcaattaattcaatgtatttttgagaaattaaccgattcataccagaaataaccgataattaacgtttaaaccagtcaaaaccggagcatacggataacatttaaggtaatggcaaaaagtaacattttggctaaaaccggactacttatcatgttcgtaaacggtgaacagttatccaaaaaccgaactataaccgcaattaaagccacgtgtgaaccttaatctcacgacacatgctaagctcatgcagtgaagaagctgaacaccacgtcctcgtggcactctcagtctcacctgttcaaagagatctttgaagaactgagaagaagtctagaaatagaaccaaccttcgtttaaacccgtatatatagttatctaacccaacacgcaacaaaaaagagaaagaaagaaaaagtaaaccgaaagcgaaagcaagcttgatatttcgtgggtttcaaagttacaagttttgattacgaacacgcaagaataacgcgagatcttgattagagagagttcttgcaaaaagggtctctgtatttagttattaaattcttcaatcttgtttctgtaaatttcggatatttttgagaacaagcaaagatgtgtagtttggctacaaatctgttactaccatcgaagatgaaaccagtttttccagagaaactgagcactagctcactctgtgtcaccactagaagatctaagatgaagaaccgatctattgttcctgtaagattctcaaatctttttcctctacactctgttttcaaagttactatatttgttaataatttcattacttgtttgatttatgttcgtttccatgaatatctgttactatttctggaaattattagaaacaataataagttccattactttagtttgtatactctgtttttagggtttgtctctatgttgcgccttgtttgaatctgaaatttgatggatcatattaaaggtttgatatttctttgttttgaatggatataaaggttgcaagattgtttggaccggcgatttttgaagcctccaaattgaaagtgttattcttaggagttgatgagaagaagcatccagcaaaacttccaagaacttacactcttactcacagtgacataaccgctaaattaactttagctatatctcaatccattaataactctcaggtaaaattataaaccgtacagttgcaacgtttaggatttagggttgcgtaaaagtgatgtaacgttttcggttcttgctttcaccagttgcaaggatgggcaaataaattgttccgggacgaagtagtgggcgagtggaagaaagtgaaaggtaaaatgtcgcttcatgttcattgccacattagcggaggccacttcttcttgaatctcatcgcgaagcttcggtactacatcttttgcaaagaattacctgtggtaagttacttttgtgcaagcttttttgagtaatagtctagtggtttattgtcatgttaattaggaaatatattacaaaaatatattgtagataatttttaacttgtatggagcaagcatagactccaagatgtctgtctggaattcttggctaataacagatatatttatattgtatatgatatgtaatagtaataccacgattgattgagtatattggacctattgatttataggtactggaagcttttgcccatggagatgagtatttgttaaataatcaccccgagctacaagaatctcctgtttgggtttatttccattccaacatcccggagtacaacaaggtcgaatgttggggaccgctttgggaggccatgtcgcagcaccagcacgacggaaggacccacaagaagagtgaaactctaccggagctaccttgtcctgatgagtgcaagtgttgctttccgacggttagcacgattccgtggtctcatcgtcattatcaacataccgcagcggatgagaatgttgcggatggcctgttggaaatacctaaccctgggaaatcaaagggatagatctaatgtaaatgtgttttttctttttctttggtggttaggaatgttagaaggagcatgaaaatctatttggtcggtgttaatagggagtgacaattgtataacataagtttcagtattttacaaattccttatatattagttttataaggtgattagttacccatccacgtgttatacatgtctttttattgtatgaataatcgacacaagataaatagtaggatttgggattaagtcatgaaattaaaagacatctacttttggaaaatatctctctttgttagagttgtaagagagtgatagagagatgtgtagcttgatggcaagcttgttgctcccagcaaacttgaaaccagatttttcagacaaagagagaagtagctcaatcccttcaactactagaagttccaagaggaagaagcaatctatgtttcctgtaaaaaatctaaatcttttacctgagaaatgttttcaaaactctgtttcttaaagagatatgttttatctgaaatcaaatgttagcgttatttttcattttgttttgaaatggtgaaggttgcaagactattcggacaggcgattttcgaagcttctaaactgaatgtcaagttcttaggagttgatgagaagaagcatccaccgaatcttccaagaacttacactttcactcatagtgacatcaccgctaagttaactttagctatttctcactcgatcaataactctcaggtaattagttatccattacctctccacaatttaacacatgtaaagacatggatttagaatttagatttttaccaaacctgagtaagtttttaacccatggttggatcagctacaaggatgggcaaacaggttgtaccgagacgaagtagttgccgaatggaggaaggtgaaaagtaacatgtcgcttcacgttcattgtcacattagcggtgatcattttcttttggatctcattgcggaacttcgttacttcatattttgcaaggagttacccatggtaatttttttttaaccaagtaactatattctagtggttatcgacttctcgtctaaagtaatgaatcaatttctgttggatataattttttcatagcaaacacaaacttttaaggattagttaagatttcagtataggattttgatccatcataggatataaaatttgatattccatatgacttgtaacagtttagtggtcttttaattatatatatgtgaccaattgaattattttataggtgttaaaagcttttgttcatggagatgagaacatgttaaacaattatcctgagctacatgaagcttttgtttgggtgtatttccattccaacatccccaagttcaacaaggtcgaatgttggggtcggctatgcgaggccacctcgcacgatggttgtaagactcccacgtgtgaaatcttaccggaaccgccttgctttgataagtgcagctgttgttttccgacggtcagcacgatcccctggtctcattctcatggctgcagccatggtgaagaggataataatgtagctatagccggagggaatctattgaccaagtacatgtataagcgaagtaaaagaaaatagtagcacatatctttcgatgtataatcaaaatcatcaaatggtcgttgagataatgtcacattatcaagtgcaatgatgtggtaaagccgtaaaggacatagtgaatgatcaacaaaacaactagattctgaatcagtatgctgataattcatggtggtgggtcgagtcatttcttacaacaatgtccgtatagaagtgcaacgtaaatttattttcctatttttttttcacttttgaacagaaggtgactcggtcttttataataattagaagaaacaaacaagacacctgattgtttgtattaaaaacgtgggggcgaaattatttggcgaggcaaagactagtccttattttttttgtcccaccaactgatcacgacacgacacgacacatgaaaattttgttaaatgaaacacaagaatttggtttacagttccaaaactttgtatggtgcaaaatcccctttatgtgaatgagtaattaaaatactttggtcaatccacacgaaaataccttacctcctgatgccctatgtagtatttcgccaccgtagtcataatttaatttagtcatttatattttgttagcagatctctaaatgtctgagatgattctgtatgtttctaatgaatcaaactttatttggttctgcatggtgtgttacggtcactgggaccacgtccgcgtggaaaatgcagggagataatcgagagaagttgatccatgtcgaccatataacattttacttcaacacaacacaatttggtgaaatttttaaaagaaatttgaacataggttaagtgagaaagttaattaagtgtcccaaaagcattatgatctttagaaccttttcactctgggtcaaggataaaatctacatcgtacatttttctttggtgtaattaaaagtttcagaaaatattatatttacaattaaaatccaatctgtacaactaactataagaagaaaatctaatgaaacgcagatcacacaaaactcataaaacttaggtttgatctgttgccactaatttattctttctcatctttgcattctcacgagaaagacttcacacaatctctcggaggtttggttaggacgaccaactaatctggctgagttttgcttcttcttcctctccccctgatttcgagaatcatgtcaagactcaagatgtcaccggattgttgttctaccaaaagataatgccccgatttcgctctccctgctctgagaatagaaaaaaaataaaaagaaaaagagaatgttgtgtgttatacattgttcattttcaaagaatttgaggattagaaatggcgaatatgcttcgggttctttacctgagatttcggagaagggaagacattccagaatctcaaggtttcatctcctgctcctgtcacaattgtctgcaacaaatacaagaaaagtgtgttgatgcaagtgttataagaaagtaggcaaaaatataagatgatgattagaagaatgagcaacgagagaaagaaaaaaagtaacctgtccatccggtgacaccgcaaggtacagaacgcggtacgagtgaccagtgagagttgccaactataacagaacaggttctcatcaaaatcccaaaattcagcaaccaataaaaaaaccgaagtaagagcaaagaattcttactttagacatggttggatatttccagacgatgatttggttctgggaatacccgtgtgtgctcacaagctcattcacgttcttagaccataccaaattacacacctgcgtgtggaaagaagattatgcagctataaaaccacaatgtgaaatctcagatgtttataagttagcataaccggatttacctggctgttggtatctacgcaatttaaatgagtgtttgtcgttgtgttccagaaacggatacatctatcagcagtgccaccaccagaagcaagaagtccaaaatgatgtggagaccacgcaatggctttcactgctgcggcgtgttcacagaatctcaaaaccggttgtgttgaatgttggttccatacaaacagctgcaagatcctagaatcattacatatgcttgaaaattcatgttaacttcagacacagaatgatgattatatatttaccttattgtcgtttccacctgatgctagctcgcgattgtccgaagaccatttgagtccacagatttcggatttgtgacctttaagtttactgacatgatcttcttgagtacgaatgtctctctgaagtatgctcttgtctctactacctgaagacagaacagatgagctccatgccaaggctccaactcttagccgatgaccttccattgttctaatattcttgcatcgtaacacatcccatatctattaaaagaaatcagtaaacgtaagttctccataagaagatcatgacaccttaataagaagatcagattggctgcattaacttgatcgttggttgttaagacaaatatccatcttaacaaccaacgatcaagttaatgcagtcaatatgattcggtgaagtaagctagcaagtgcattccagtgaaataacatttgcaaaagcaacatcctcaaaagtctaattcaacctagtttccgaaaagattccttcccgattcaaggagtcaagaggtactatatataaaggcatgtataaactcagatagccaaaacaatcttgattatctaacctgtactgttccgctactagttccaatagccaaatgtgttccacgtagtgcccaaccaactgagcaaacagtttcatcgaccccaagatcgcataacttagttacctgcaaatagcagaaagagatttccatcacaaaagacactatctaagataggaatgagatacagaaattacaattcaggaagaaaaagagctcaccttgctactacaagcattccacaaatacacgcagttccctaatcccactgcaagaacattttgtgccgaccaatccacgagattcaagtaaaaatcatcttgcagagccggcgcatccaatacctaaaaacaaaaagaagcttttccactcatccacaggacaaatgcgacaaaaaggacaaacatttctaatcaaactggataaagagtaggaaaaatgcaacaacaactagacagttttcaaaaacaatccagcccacactagcaaagaagttccatacataaatgcaccaaatagatgaaatgtgacaaacacaatcaagaatcacaactctcaaaaacctaaatctaccaaacaatacacaaatcaatccaagaaaacacaatctacaaaccctaatttcaactccacaaagaaacccccgaagatcaaaaacaaacactgaccttataaggagacctaagaatcttcctcggcgacttaacaggactagggctaacaccactaaccacatcagaatcaaaaggcggatacaaattcaaagacctctgcgtttccgtcttaaacctaaaaatattccccgacggagaaaacccattaacaacatcacttttctccggcgtcaccggaccaaaaagcgccgttttcaaaagactcgcataagaaccagccccatcttctttcccatctttcttattcggcgaagaagatgccaaatcgaaaagcgcgaaattggaaccagatctacttggaataaacctatctgagtaaataggtttcgaaggagagtgataatgattcgaatcgattaaacggttgattcgtgactcgagtgacaccgtcggacgattcatcgacggtggaagattcagctgagaatctgacttcttcttcggtgttgttgattcatcttcttccatgtttgatttcaatctcttactgtttcgttcctccagatttgaagatttgggttgaaaaaagttgagatctttctgtttttttttgtttcttcactaaagttttttttttctttcccgggaaaattgttgagggaaacagaaaatgtcaagtgaattggtgcgaaaataagggagcgatcatgtgtggtagggtttatggtagatacactgtcttattggactgttttaattgggcttgaaacttgttataagcccaataataaattatgttttcgttgaattaattaaattcttaggagttgtattaaattaacatggtcatttcagtgaaatttcattagttcacgttgggctttaatggactttttcattggatctggattatgttttcattgggcttttgaagatatagagtatatcgaaatttttgggttttttttctttttttttctatatttcgatacaaacggattttattttttgggtaaatgattaaggtagtcaacaaagagggtgcaagttttaaaattatgaccttttttagcataattttaaacaaatttgtgtatacagttatagacttatagtaattgtagataatgataatttgcttagcttcttagcaaaaaaagactatttgcttagctgtatattggccaagtttacagattccaaggtcatacttttctatatatgcaaatgcaacttttagaaaatatagaaatccagaagtagacatatattgattgttttgactatcttagatacattggaccactaaaaaacaagaaacataagatagaaagatttataaataggatttttaccatttaaagtgcattaataaaaataaataattgattttgatcaaaacaaaaataataataataaataaataaataattgaaatttacactcttagtagtaacaaaattatagatatgaacacccaatatatataaataggaaaaaaattaaaagagagaaatcatacctgatattcttacaaatatgaaacttatgaccaattttaatacttattaccaagttttgttattcaagaataatttaattttgttattagaaatatcattttggtcaaaattttaaaatatttttgactatgcaatgtatagaaagatatttcaacaaatagaacaataacggtcaacgatatttcaaaattttaaaatataattaccatattaattacagtctatatttttattagaaacatagtatagtatctttttaactgagtaaaataaaaaattctgaaaactaaagcaatttcgtatagatatatattttgaaaagtaacagccaacggtatttggtgcgaaataaacggtaattcaaaaaattaatagaaataaaaactgagagtcaatctaatcacaaacatctgaaatagatacatgttaattggtgtgtaagactagatttcttgcattaattcccttcaacaaactattaaatcactctttaatcttttctcacatattcagtataaaaacatattgtgtccctctccaaaacttttatcacaaaactatcatatctaagtctaaaacaccaaaccacctctctgtctctctctcttgtctccatcgccagagccttcacggttaacattgttcgtcatcatgtcatccggagaaagagctttacaccttacaacacccgacgatgaagctataagaacgtgccatttacttctacggtttggagattttaggggagttcgagacatcgtcaacacgaacaaggcagtaatcagtgaacggctagatacgtttgagaaagcggcagctatctcggatgttctctcggccgcagagaccccgcttcccaacggggcgactgattggtacggcatcattcgaatgaaacagccgggaccgattgtaggggaggacttcgagaagttgatgaatctcttgaactcgagtaacaatcctttcccgttttgccaggaagctcgtgttaaagcctcgttagcttggtcgtttctgtctgatccaacctctaaggcgaagtacgataagtctatttccagcgaggacaaccttgtaatcgaagaccaaaccggtgacataaccgatggtgttcctctttgcggagagggtagcgaaggtgaagtggacacaagaaaacgaaaggcggagagtctcattttttctgatttgccagcattagagaacttgaaagagtttcaggaaacggaagagagtcccttgcccgtggaggagaaaaacaatgaagttccatcgaaagacacttcgtttgtcccggagaaacgtaacgttggtccgggacctgacgatgaggttgttgtgatttctgatgacgaggatgaggaatacgtgggccgagatattatctcaatggctagaacagcgaaagtgcgcatagttgatggaaggaaagtgaaatttgtcccattgaggaagaagcaaaaatagggacaagattgttataccaaaaaaaaaaaaaaacaaatttgtggttgtaatttcatttttttgatatcgtttgtgttacatcttcttcttctggtattaaattttcttgtctgaaatatcaaatctttattattatttattattacaattatctcctcttggtcgttagttatttcaatgtagtctcattcttatttctcattaaccatccatttttattacttttggtaattctccttcttatcattacttattttttctttatatacacacaacatatcaacaatgcctccatggttttacttctgcttctctttgtctctctgttactcccactcttatcagtcaaaactcaaaatacatcttctctattttactccattcttccaaactaggtataagtaaaaggcatatataaatgctaaatttaagggcctcagccaattctcctcaagcccaaatctgaattcaagcgttaagttattacaagtaggcctagctggcccatcttctttatctgcaaaatgaaatagagagaaagttaaggtttgcatatgaaaggctaatagcttggtactcaagaaagattgaggcctatccttttaagtaaacacacattttcgtattatgaccttacaaatgaaattaaacaaacagaatcttcaaaagaggaaatttactatctcgcttgaaagaagcgagatgtaagcaaaatttcggaatctatatccccacgggaatctataggttctaattcaaggagatataggtttcaaagtttgttttaggggacatctagcactaaatcatagtatggtgtggatctggtgcgacgtgatagttctcatgaagaaatagatagtcttcccttgaatcaactaatcataacataaagagtacctacatctaaatatatttctcagaccaaacacactaccttccacagagctagatggaaaggaattcccattttcttgacccagaaatttatcattgaatggtacaagttagagacaatagctaaatgtaagtaaaacgtgtgtaaataggtcataatattgaaaacgtgcatgcgtttattcattggcagagagggagagagttgaactgagacagagagaaaaaaagaaaagagaaacatctaagtaaagttcgagtctttatcttaagctttgtactgaaacacaaagttaaatcatgttatgctttattattcatcattgaaataatgatgaatacttgagtttaaactagctcaaaatttgcttgtaaaagtaaaaagagtcaaaatagttttctttctatgtaataaaaggtctaaacatctatataaagtttcatgtatttatatatatatacaggcaatctgagttaagtgatggaaaagctaagcatcacacatgcaatgaaacttattatcatgtttaacatataattaaagatcaccctatagaaaaagaatggaaggctactaaaattaaagatttttgggtttctaaaagataatatgagttcaccattatgtttcataaattgtatcagatggggttgtaacttgtgataaatttgataacagaaaaagcacatccaggtaatttacacatttgatggttttgtagtttagagttttaaagtttccaagatcgtatattgtgatacgtttgtgaagtcaaatatattttcaagcaccagcttgagaagaacccaagacgtagaaactattatagacatgtaacatgttgtgatcatatcgtgttgtatgataagttgaggtcgtgtgcaacttagttagttagttatatttctcgttggggaccagagaaaccattacaaatggaaatagatgattatgattggtgtttaatgaaatgagagattgctgaattgttaagtcaattttggaataaaataaacttatgaaaaatattttataattaatgctaaatttattattcaaaatgatttaatttattgtagaaatctcaatttagtaaaaaatttaaaatatagttgactatgaaatgtatagatttttttattataaagaaaaaataatggtcaacgtttcagcgaaataaagggtaattcaaaattccaaaatatagttatcataatagtcacaatatatttcaaaacctaactatattgtaaaatacagttaacagtaatcacacaaaataaatggtaatttaaaaaataaacagaaataaaaaataatcataaagaaactcttgataaaaaaatagaagagaatcactatgcattaactatttggtcatagttgtaagaatagatttccctttcattcattacaatttattgaatcactctttcatcacaaatcaaatataaaaccatagtctccctgtgcaaagaacttgcatcatcgtctaaaataccaaaacacacctctctttgtctagcattcaacgttatcctagttcgttgccatgttttccggagagggtgcttcacaaatccgcatagctcccgaagataaaccaatccaatggtgctaccaaattctaaagtcgcgtgacttcaagagcgctcgatatatcactcaaatgaatttgaagttaagcaagacacgtcatgatgagtatgagaaaggcctagccatttgtgacatcctgatcgccgcagagaaccggcttcccaacgggttgttggattgctacggcatgatccggatgaccagacctggactagttttatatcagaacatcgagaaggaattgaatcttttgggatggggaaacattagtaaccctttcccatttagacaagaagcttctgaaaagttcttctttgcttggtcgcttctgtccaatccaaccattaaggagatgtacgattacgctacctcggatgaggtaaaccttgaaccccaaggaaatgtcaatgaatacatggatgtagacagcagcagccaaagcggttatggattaggtagtgtcctttgttctgatttgcctggatcagagtacttgaaagagtttgcggatgtgtatcccttgccgctggcggagaaaggacaggctccgcacaatcggtttggatggtatgaccataatgttggtcctgaaactaacaataatgtggtagttacttatgaggacgctaaagaggaggagtgtgacatgagctctagtagcgaactgcgcataattaatggaaggagagtgaaaattaccattgaagaagcagcagaaacaagtgatactcctagttgctcaagatgaagactatgttcaagcgttcttaagtgtcgttcctttagaccattatccttctttttcataataaaactgaggttgtaatttcatttttctttatgtcgttttcattttcatcttcttcttttagtctcacatttttcgcttgtctgaaatcatctcaatcatttattataatattaaatcatctcaaccatttttttttactattcatcttgaggaaaaaataaggtgcgtaagatcattccaatttccaaatagatatgctattggcagtctcatgtacacgataatatgtataaggctaaatagtgtgtatcagtgtatgcaatgggaaattgttagcttgcttatgagcaaccacgaaaactcgaaaagcaacacttacaaacattgaaagtggattttcaaaggtatatataagtttctcattacttttcaaaaagtttgaaatggagttgcatgattatatatgttgatgcagaccacacaagttcggtgatactacagtttgttcaatattgcatatacataatacattttacatttatacatgtatgtaattaaccagctagcccaaaacatgcaacttaaacacgttacaatattttcaataactaaattttgtaaacagttaattccacatattagtcctaaattatgaagatcttgcaagttacaatccaacattgaaagaagaaaaaaggtccaattaacactaaaaatggaaaacatcatatttgttgttacttgttacagtgcacagtattctccaatcttagaaccgttcttgttctcgaagcattaggattagatctaacatgatccaccggccaccattgaaatctgaagtgtttcttctttttctgaatttaatgttaaattatatttaagaaaaaaacaaacgtttatacgtctaaatgcaaacttttcttaagatagaatcaaaatatggttcaatctatctattcttgactttgtcgtgatgcaaaccacacttgaagtcctccaattatttttctctccctttctctgttatggtgctcaagcggttcctcatgtttctatcaatcagcttgacaagtttctctgttctcgatggtggttctccgtgtctcctatcattcctctcacgaacctgaagtgcttcttcttcataagctctcctctccatctcttctctcatcgctttcttcttccctttcactaccatcaccactccaatcactgattcatgttgggctttagttgacttttcattggatcttgattatgttttattgggctttctaagtttaccgtttagagttcatcttaactgcataaataaaaattgttttaaaattaatttatctttttaatttcaatacctaaattaaatttttcatctcgtttagacagatatttttgagaaaggagttttgagtactagtatgcttaattaatcatacataatctatttcaaatcatgtcttttcaaagtaactataaattcattaagaataattcttttaaacaaagatcattaaaatttaccatcaaaagtctcatgtcttgattggttgggctgtaactactaatatttatgtaaagaccaaattgttacaaatcatgctgtaggtttttttttctaagttacagccaaaagaaaaatctttttgttttgaatgtaaatcttttaatttctacatcatactattttgtgatgtaggttttatttcttttcttttcctctctcgtttaatttttattttgtcactattatttttcttttctatttgtatatattcactagtcttaatatatagacatagatggatatatatgttgaacgaaaaaacttatatctataaacaattttaaactaatatttagttattatatgaataccatataacatatttcatacatttagaaatgatttctatatttctatatttatatagattccgtttacatatatatgtacataatgcaatttacgttgttattatataattttattaactataatatataattttacaatttaagaaaatataatttataaatacaaaatttcaaatatatctattaatcataattttgaattccaactaataaatttaccgccaaaattatatattcttaaaatctatacagccaaaaagttatagtcaaaattctacagctacaccttacacacttactgccaaaattctacagtaaaaaatctacaactacagtctaaccaatcacccactcaatttggtaaaaactttaaaatatagttgactctgcaatattggaagatagtctaacaaatataacaaaaacagtcaacgatattcctgcaaaataaatagtaattcaaattttcaaaagattgatagtttgataccatatcaattatcgtatattttcctggaagtacatataagtaatttttaaacctatttaatcattttttcgaaaaatatgctaattttgtatagatataattttgaatattataactaatatttatgttaattggtcttagttgtttgactatatctcgtgcattaattatctttaacaaaatgttgaatcactctttactataaaaccagtgtctctacaccacagaactatcacagaccaaatctccttcactcactctctctctctctctccatccttccctccctccctcattccctttatcccatccctcccagacttgtcatttttgttgtagttcgttatcatgtcttccgaagaaagtgtttcacaaaaccacaccacactgatgagccagtcaaaacgtgttacatacttctaagacttcgtgactttatgggagtttggcatatcgttaacaagaatcaattggtaagaagtaaatggcatggtgaatgttagaaagaacggagcgattgctcatgtcctccacgtcacaaagaactgacttctacatgggttattgggtggttacaacatgattcaagggtcactacccaaaccggttttaggggaaaccagttagggtggtgtcacccgaatcataccgtaacaatccattaacccattcggaaacaggttctatgcggtattgtgaacatcggcaatagctccagctttctcaaactcatctaagcgttttttgcttatactaactggttcatgttcacggtataatggataccaataaaatcaccaaatcttagaagtatatggcatgttttgatcacttcatcattgggtgttgtaaggttatgcgaagctccttctccggacgacatgacaacgaactacaataatgttgtgattgattttagaagtttatgggaaaatgtattctcacgaaaggaaaatttgttaaatcatggtgttatgctttattattcctcattggcaggtgaataattgagattaaaataggtcaaatttttctttcacataataaaaaaaaatcacatttttaaccttcaatttcaaaagaattttactaatactataaactaccaaaataattttattaatattttagacatccaaaatagttttcctatttacatcgtcataaaagatgaccgaacagtaacggaacaattaatttatgtttgtttagtataattttttaatttaatttaatttttaattaataatttatttattataattaataaaaatctaaaacaaaaaaaaaacttttttttcatctactcaccgtctgactatgaaagttctagattaacctttaaaattagagactggagcacaagagaaattaaagtataaaaatagaaacaaacaaatgtagaatctgaggtacaagaaaatcttaaaatagaagaataaaaacaaaagaatatcaaagcttagccaaaaaataaagcattcactctattagaggaatctattgggtgagactgatccaaaaacaattcacctctaccaaatggataaattaggatcttgtagtaccaattgcaataaaaggatggtgaacaaaaacaatgaattgaataaaacatctagatatttttttggtcagacggtgagtagtcgaagacgatgaagtttttttaactaatcataaatctgtattatataataaaattaattaaaattttaaattaaagcggcttacaatattttcaataactcatttggaaaacagttaactccacatattatgtcacctaaataatgaagatcttagaagttacaatccaacacaaaaaaaaaaaaaaaaaaaaaaaagaaaaaaaaacagagttgaattaacactaaaaattgaaaacatcttatcaagaaggaagatacctaatttaagtatgttgttacttgttacttatacctagtattttcaaatcttggaatcgttcttgatctcgaagcattaggattagctctaacatgacccaccattgaaacctgaagtgcttcttcttcataagctctcctctccatctcctctctcatcgctttcttcttccctttcactaccatcgccaccaccaataaccctaacagaaacgctccaattattgaacctatcacactcccaaccgccactttccaccggctcaatttccctccgccaccgtcagtcaaagccggagatgacgacggtgttaccaccgtactaccgccaccgccactatcatgagctctaatcacaagcgcgtaatgcccttgtcttgttcccaagcaaacataagctgaaacttgctctctaaacgttatgttaccgttacttgtgaagcaagcacacaagacagatgagttcttcttcgtgttaggtttagggctaccacttgcctcactgcttaagaatttgatcaaaatagggttttgttccgtgcccattacgttaacctcataaggattcacagcaacaccgtccggatttgaattgtaagccaataaaccaagaacaggagacacaagccggtatttgtaaccggttaagttataaccggttgagtaaatataagaagaccagttaaaccccaagttctgtctcaccaggatcactctctcaacacatggctccacggtcaagcccggacctaagtgaaactctccaattcttgcaccgtgtcttctcaaactcccacatctaaacttagctgtggcgatatcaatggaggagaaattcgaaggaagatggactttctggatagcacctgtcttgaaatgtatgttgaagtttctaatggtgtaatctctgatcataagatcaagaaaatgtgctgattcaatggtctgagatttggatttatgtacatgaaaaagaaggatgatgaagataaatggtatagagcccatgtgaagaggacccaatgattctaagatgaatgaagaagtagttaggttttgcagagagaagtgatcaagaagaaagagagagagaagtatattgattgtgttttactttgttggcatgtgttttggggacagacatgatcagtatatagtatatactatgtatcttttattaatccttaagacataataatgaataagcatgaccgatgttttataatgcttagaatactatcctactttcttctagcctcgtgacattttactttatacacactttgtagtcttgtaaattgcttatattctttcgatcctaaaatgatacatttagaaatgtctaaacggtgagaaaaaaaaggaaggtaaatgatgatatagagggcatgggacgacgacgatgtcatcatcatcattgcacctttttcttattaaaaagatagaatttggcatgctataatatttgtatgactttttcctttgtaataatccttaactcttattacatgttccccacttttatctatctatcagcttcttaatagaaatcatactaaaatgaactatagaatcacaaaagtcaaaaagtcttggactggccttgactagcacctataaatgatttagaacatcatatttgattttcacatggattaacgaaactatattatggaacacattcaaaattataacaacaaaaaaaatacaagtattatttcaaaactacacaaggttgtgcttatttcttgaattattttactttcctaatgagagcaaagtttctcaaagaagtaatcatatgatgtttttctttgaatgtgcctcacacttacttacaaacacaacacaagccaatgagagctacatgaaaagatctgaagattatacaaaacagcatacaaactttggtttttctccttcttcttcaatttctccaccttcttcatttgttagtattaattttacatacacttctacataaccctgagaaaaagaaaaccctaaaattttgaattttccattgaatcaagaaagatttcatcagaaatcaaagttgagataagaattaaaccttggctcttagatttaagctttccctccttctggtaatgtgatcaaacgagaacctgagtcatagaccatctccgttccacagctaaaaaccagaagaatcataagacttcaagaaacgttgtagacaatttgtgtgatcgattcgagtctacagctgagaagcttaccctgagcatttgacattgttggtgttactatcattggggatggatagtatcgttccaaagaaagatacattctctgttccacagtttgggcaagggccctgtgaaagatatgttccacgaaaattaaaagcatttcataataatcgcataaaactcgtaggatttggcactataccaatccaaatttgtagcgtttagcacaaaatagattattatctcaagtctaatctcttgtttaagcatttttgatactgagaaaacaagatttagttctataacttttatttttccacttcatgaactgatcttggaagatgattaatgtttttaccttcaagatcaagaagtctttgaggatcagtttggtgagtgataacgccagatatacaattgcaggcaccgcagcgaaccatgtgaaaatgaaactgaatggttccggaagctgcagatttttgtttttgttttttaatcagttgcatgaatactggaacaattactacgagtatatattctccaaaccatagtagaatagtcgaaagaggttttacctcgagcaggtacgtgatttcaaaaccagtaatgtcatcaagaaagaaaaatctggagaacaattgaagaaaacaacaattttaaactaactaacataagctaagatcatgtgatttgaaagttgagagaggaacagaaccggaggtactcacagtccgagagcaacaacagttgctggtacattcaacaagaacattttgaagtaatcaatggcaagatcactataaacctgcataatcaaggaggtccacaagtctataacatctctagagtttgtcccaaacaatgaatctaatgttatgttctgtaatgtccaaagaatatatgagctatccgaacaattaagagtttttacctttttactacgaagactgcatcttggaccctcacacacaatctcactgccgtccatctacagaaaccaaagaaacaatcataacgtttgtccaaattacacatgtaacaagatggatgaaactaagaaatagtatttgtaagtataaatagattaagaacctttagtttcattttgagcttatcatactcttcatcactcaagattggatttccagagacataagccattgaagcttcaaggaatctttgttcatcagaacctacaatacatagataaaattagatcaagaatcaagaacctaggcgaatggattattgacaaaactataaatcataagtgttcattacttagcatgacaacactgcttccttcccacatcaactcttctttaaggttatcaaactcttcattagacataatcgctttgccttcgtaataaaacgactgcaaaagaaaagaaacagaaacaatcctcgattatatagagataaacccatactaatgataaaaacactttatttgatgtgttacttgcatcgcttggaggaactcttgttccatttcaccgatagttctcttctcattcttgttgatgctacaataaggtaaaatcttgctatcaacttcttccccacccacctgacctgaagacaagtcataaaaatgattttaagaagtaaggaaactctcaaggagcaatcttttagtggattagagtataaaaactaaaaatccacagaggaaaaaagttccatataacaacttttcttaactagaattaaagctt

SEQ ID NO: 571 - DNA, 107600 bp, Arabidopsis thaliana
gaattcccattttcttgacccagaaatttatcattgaatggtacaagttagagacaatagctaaatgtaagtaaaacgtgtgtaaataggtcataatattgaaaacgtgcatgcgtttattcattggcagagagggagagagttgaactgagacagagagaaaaaaagaaaagagaaacatctaagtaaagttcgagtctttatcttaagctttgtactgaaacacaaagttaaatcatgttatgctttattattcatcattgaaataatgatgaatacttgagtttaaactagctcaaaatttgcttgtaaaagtaaaaagagtcaaaatagttttctttctatgtaataaaaggtctaaacatctatataaagtttcatgtatttatatatatatacaggcaatctgagttaagtgatggaaaagctaagcatcacacatgcaatgaaacttattatcatgtttaacatataattaaagatcaccctatagaaaaagaatggaaggctactaaaattaaagatttttgggtttctaaaagataatatgagttcaccattatgtttcataaattgtatcagatggggttgtaacttgtgataaatttgataacagaaaaagcacatccaggtaatttacacatttgatggttttgtagtttagagttttaaagtttccaagatcgtatattgtgatacgtttgtgaagtcaaatatattttcaagcaccagcttgagaagaacccaagacgtagaaactattatagacatgtaacatgttgtgatcatatcgtgttgtatgataagttgaggtcgtgtgcaacttagttagttagttatatttctcgttggggaccagagaaaccattacaaatggaaatagatgattatgattggtgtttaatgaaatgagagattgctgaattgttaagtcaattttggaataaaataaacttatgaaaaatattttataattaatgctaaatttattattcaaaatgatttaatttattgtagaaatctcaatttagtaaaaaatttaaaatatagttgactatgaaatgtatagatttttttattataaagaaaaaataatggtcaacgtttcagcgaaataaagggtaattcaaaattccaaaatatagttatcataatagtcacaatatatttcaaaacctaactatattgtaaaatacagttaacagtaatcacacaaaataaatggtaatttaaaaaataaacagaaataaaaaataatcataaagaaactcttgataaaaaaatagaagagaatcactatgcattaactatttggtcatagttgtaagaatagatttccctttcattcattacaatttattgaatcactctttcatcacaaatcaaatataaaaccatagtctccctgtgcaaagaacttgcatcatcgtctaaaataccaaaacacacctctctttgtctagcattcaacgttatcctagttcgttgccatgttttccggagagggtgcttcacaaatccgcatagctcccgaagataaaccaatccaatggtgctaccaaattctaaagtcgcgtgacttcaagagcgctcgatatatcactcaaatgaatttgaagttaagcaagacacgtcatgatgagtatgagaaaggcctagccatttgtgacatcctgatcgccgcagagaaccggcttcccaacgggttgttggattgctacggcatgatccggatgaccagacctggactagttttatatcagaacatcgagaaggaattgaatcttttgggatggggaaacattagtaaccctttcccatttagacaagaagcttctgaaaagttcttctttgcttggtcgcttctgtccaatccaaccattaaggagatgtacgattacgctacctcggatgaggtaaaccttgaaccccaaggaaatgtcaatgaatacatggatgtagacagcagcagccaaagcggttatggattaggtagtgtcctttgttctgatttgcctggatcagagtacttgaaagagtttgcggatgtgtatcccttgccgctggcggagaaaggacaggctccgcacaatcggtttggatggtatgaccataatgttggtcctgaaactaacaataatgtggtagttacttatgaggacgctaaagaggaggagtgtgacatgagctctagtagcgaactgcgcataattaatggaaggagagtgaaaattaccattgaagaagcagcagaaacaagtgatactcctagttgctcaagatgaagactatgttcaagcgttcttaagtgtcgttcctttagaccattatccttctttttcataataaaactgaggttgtaatttcatttttctttatgtcgttttcattttcatcttcttcttttagtctcacatttttcgcttgtctgaaatcatctcaatcatttattataatattaaatcatctcaaccatttttttttactattcatcttgaggaaaaaataaggtgcgtaagatcattccaatttccaaatagatatgctattggcagtctcatgtacacgataatatgtataaggctaaatagtgtgtatcagtgtatgcaatgggaaattgttagcttgcttatgagcaaccacgaaaactcgaaaagcaacacttacaaacattgaaagtggattttcaaaggtatatataagtttctcattacttttcaaaaagtttgaaatggagttgcatgattatatatgttgatgcagaccacacaagttcggtgatactacagtttgttcaatattgcatatacataatacattttacatttatacatgtatgtaattaaccagctagcccaaaacatgcaacttaaacacgttacaatattttcaataactaaattttgtaaacagttaattccacatattagtcctaaattatgaagatcttgcaagttacaatccaacattgaaagaagaaaaaaggtccaattaacactaaaaatggaaaacatcatatttgttgttacttgttacagtgcacagtattctccaatcttagaaccgttcttgttctcgaagcattaggattagatctaacatgatccaccggccaccattgaaatctgaagtgtttcttctttttctgaatttaatgttaaattatatttaagaaaaaaacaaacgtttatacgtctaaatgcaaacttttcttaagatagaatcaaaatatggttcaatctatctattcttgactttgtcgtgatgcaaaccacacttgaagtcctccaattatttttctctccctttctctgttatggtgctcaagcggttcctcatgtttctatcaatcagcttgacaagtttctctgttctcgatggtggttctccgtgtctcctatcattcctctcacgaacctgaagtgcttcttcttcataagctctcctctccatctcttctctcatcgctttcttcttccctttcactaccatcaccactccaatcactgattcatgttgggctttagttgacttttcattggatcttgattatgttttattgggctttctaagtttaccgtttagagttcatcttaactgcataaataaaaattgttttaaaattaatttatctttttaatttcaatacctaaattaaatttttcatctcgtttagacagatatttttgagaaaggagttttgagtactagtatgcttaattaatcatacataatctatttcaaatcatgtcttttcaaagtaactataaattcattaagaataattcttttaaacaaagatcattaaaatttaccatcaaaagtctcatgtcttgattggttgggctgtaactactaatatttatgtaaagaccaaattgttacaaatcatgctgtaggtttttttttctaagttacagccaaaagaaaaatctttttgttttgaatgtaaatcttttaatttctacatcatactattttgtgatgtaggttttatttcttttcttttcctctctcgtttaatttttattttgtcactattatttttcttttctatttgtatatattcactagtcttaatatatagacatagatggatatatatgttgaacgaaaaaacttatatctataaacaattttaaactaatatttagttattatatgaataccatataacatatttcatacatttagaaatgatttctatatttctatatttatatagattccgtttacatatatatgtacataatgcaatttacgttgttattatataattttattaactataatatataattttacaatttaagaaaatataatttataaatacaaaatttcaaatatatctattaatcataattttgaattccaactaataaatttaccgccaaaattatatattcttaaaatctatacagccaaaaagttatagtcaaaattctacagctacaccttacacacttactgccaaaattctacagtaaaaaatctacaactacagtctaaccaatcacccactcaatttggtaaaaactttaaaatatagttgactctgcaatattggaagatagtctaacaaatataacaaaaacagtcaacgatattcctgcaaaataaatagtaattcaaattttcaaaagattgatagtttgataccatatcaattatcgtatattttcctggaagtacatataagtaatttttaaacctatttaatcattttttcgaaaaatatgctaattttgtatagatataattttgaatattataactaatatttatgttaattggtcttagttgtttgactatatctcgtgcattaattatctttaacaaaatgttgaatcactctttactataaaaccagtgtctctacaccacagaactatcacagaccaaatctccttcactcactctctctctctctctccatccttccctccctccctcattccctttatcccatccctcccagacttgtcatttttgttgtagttcgttatcatgtcttccgaagaaagtgtttcacaaaaccacaccacactgatgagccagtcaaaacgtgttacatacttctaagacttcgtgactttatgggagtttggcatatcgttaacaagaatcaattggtaagaagtaaatggcatggtgaatgttagaaagaacggagcgattgctcatgtcctccacgtcacaaagaactgacttctacatgggttattgggtggttacaacatgattcaagggtcactacccaaaccggttttaggggaaaccagttagggtggtgtcacccgaatcataccgtaacaatccattaacccattcggaaacaggttctatgcggtattgtgaacatcggcaatagctccagctttctcaaactcatctaagcgttttttgcttatactaactggttcatgttcacggtataatggataccaataaaatcaccaaatcttagaagtatatggcatgttttgatcacttcatcattgggtgttgtaaggttatgcgaagctccttctccggacgacatgacaacgaactacaataatgttgtgattgattttagaagtttatgggaaaatgtattctcacgaaaggaaaatttgttaaatcatggtgttatgctttattattcctcattggcaggtgaataattgagattaaaataggtcaaatttttctttcacataataaaaaaaaatcacatttttaaccttcaatttcaaaagaattttactaatactataaactaccaaaataattttattaatattttagacatccaaaatagttttcctatttacatcgtcataaaagatgaccgaacagtaacggaacaattaatttatgtttgtttagtataattttttaatttaatttaatttttaattaataatttatttattataattaataaaaatctaaaacaaaaaaaaaacttttttttcatctactcaccgtctgactatgaaagttctagattaacctttaaaattagagactggagcacaagagaaattaaagtataaaaatagaaacaaacaaatgtagaatctgaggtacaagaaaatcttaaaatagaagaataaaaacaaaagaatatcaaagcttagccaaaaaataaagcattcactctattagaggaatctattgggtgagactgatccaaaaacaattcacctctaccaaatggataaattaggatcttgtagtaccaattgcaataaaaggatggtgaacaaaaacaatgaattgaataaaacatctagatatttttttggtcagacggtgagtagtcgaagacgatgaagtttttttaactaatcataaatctgtattatataataaaattaattaaaattttaaattaaagcggcttacaatattttcaataactcatttggaaaacagttaactccacatattatgtcacctaaataatgaagatcttagaagttacaatccaacacaaaaaaaaaaaaaaaaaaaaaaaagaaaaaaaaacagagttgaattaacactaaaaattgaaaacatcttatcaagaaggaagatacctaatttaagtatgttgttacttgttacttatacctagtattttcaaatcttggaatcgttcttgatctcgaagcattaggattagctctaacatgacccaccattgaaacctgaagtgcttcttcttcataagctctcctctccatctcctctctcatcgctttcttcttccctttcactaccatcgccaccaccaataaccctaacagaaacgctccaattattgaacctatcacactcccaaccgccactttccaccggctcaatttccctccgccaccgtcagtcaaagccggagatgacgacggtgttaccaccgtactaccgccaccgccactatcatgagctctaatcacaagcgcgtaatgcccttgtcttgttcccaagcaaacataagctgaaacttgctctctaaacgttatgttaccgttacttgtgaagcaagcacacaagacagatgagttcttcttcgtgttaggtttagggctaccacttgcctcactgcttaagaatttgatcaaaatagggttttgttccgtgcccattacgttaacctcataaggattcacagcaacaccgtccggatttgaattgtaagccaataaaccaagaacaggagacacaagccggtatttgtaaccggttaagttataaccggttgagtaaatataagaagaccagttaaaccccaagttctgtctcaccaggatcactctctcaacacatggctccacggtcaagcccggacctaagtgaaactctccaattcttgcaccgtgtcttctcaaactcccacatctaaacttagctgtggcgatatcaatggaggagaaattcgaaggaagatggactttctggatagcacctgtcttgaaatgtatgttgaagtttctaatggtgtaatctctgatcataagatcaagaaaatgtgctgattcaatggtctgagatttggatttatgtacatgaaaaagaaggatgatgaagataaatggtatagagcccatgtgaagaggacccaatgattctaagatgaatgaagaagtagttaggttttgcagagagaagtgatcaagaagaaagagagagagaagtatattgattgtgttttactttgttggcatgtgttttggggacagacatgatcagtatatagtatatactatgtatcttttattaatccttaagacataataatgaataagcatgaccgatgttttataatgcttagaatactatcctactttcttctagcctcgtgacattttactttatacacactttgtagtcttgtaaattgcttatattctttcgatcctaaaatgatacatttagaaatgtctaaacggtgagaaaaaaaaggaaggtaaatgatgatatagagggcatgggacgacgacgatgtcatcatcatcattgcacctttttcttattaaaaagatagaatttggcatgctataatatttgtatgactttttcctttgtaataatccttaactcttattacatgttccccacttttatctatctatcagcttcttaatagaaatcatactaaaatgaactatagaatcacaaaagtcaaaaagtcttggactggccttgactagcacctataaatgatttagaacatcatatttgattttcacatggattaacgaaactatattatggaacacattcaaaattataacaacaaaaaaaatacaagtattatttcaaaactacacaaggttgtgcttatttcttgaattattttactttcctaatgagagcaaagtttctcaaagaagtaatcatatgatgtttttctttgaatgtgcctcacacttacttacaaacacaacacaagccaatgagagctacatgaaaagatctgaagattatacaaaacagcatacaaactttggtttttctccttcttcttcaatttctccaccttcttcatttgttagtattaattttacatacacttctacataaccctgagaaaaagaaaaccctaaaattttgaattttccattgaatcaagaaagatttcatcagaaatcaaagttgagataagaattaaaccttggctcttagatttaagctttccctccttctggtaatgtgatcaaacgagaacctgagtcatagaccatctccgttccacagctaaaaaccagaagaatcataagacttcaagaaacgttgtagacaatttgtgtgatcgattcgagtctacagctgagaagcttaccctgagcatttgacattgttggtgttactatcattggggatggatagtatcgttccaaagaaagatacattctctgttccacagtttgggcaagggccctgtgaaagatatgttccacgaaaattaaaagcatttcataataatcgcataaaactcgtaggatttggcactataccaatccaaatttgtagcgtttagcacaaaatagattattatctcaagtctaatctcttgtttaagcatttttgatactgagaaaacaagatttagttctataacttttatttttccacttcatgaactgatcttggaagatgattaatgtttttaccttcaagatcaagaagtctttgaggatcagtttggtgagtgataacgccagatatacaattgcaggcaccgcagcgaaccatgtgaaaatgaaactgaatggttccggaagctgcagatttttgtttttgttttttaatcagttgcatgaatactggaacaattactacgagtatatattctccaaaccatagtagaatagtcgaaagaggttttacctcgagcaggtacgtgatttcaaaaccagtaatgtcatcaagaaagaaaaatctggagaacaattgaagaaaacaacaattttaaactaactaacataagctaagatcatgtgatttgaaagttgagagaggaacagaaccggaggtactcacagtccgagagcaacaacagttgctggtacattcaacaagaacattttgaagtaatcaatggcaagatcactataaacctgcataatcaaggaggtccacaagtctataacatctctagagtttgtcccaaacaatgaatctaatgttatgttctgtaatgtccaaagaatatatgagctatccgaacaattaagagtttttacctttttactacgaagactgcatcttggaccctcacacacaatctcactgccgtccatctacagaaaccaaagaaacaatcataacgtttgtccaaattacacatgtaacaagatggatgaaactaagaaatagtatttgtaagtataaatagattaagaacctttagtttcattttgagcttatcatactcttcatcactcaagattggatttccagagacataagccattgaagcttcaaggaatctttgttcatcagaacctacaatacatagataaaattagatcaagaatcaagaacctaggcgaatggattattgacaaaactataaatcataagtgttcattacttagcatgacaacactgcttccttcccacatcaactcttctttaaggttatcaaactcttcattagacataatcgctttgccttcgtaataaaacgactgcaaaagaaaagaaacagaaacaatcctcgattatatagagataaacccatactaatgataaaaacactttatttgatgtgttacttgcatcgcttggaggaactcttgttccatttcaccgatagttctcttctcattcttgttgatgctacaataaggtaaaatcttgctatcaacttcttccccacccacctgacctgaagacaagtcataaaaatgattttaagaagtaaggaaactctcaaggagcaatcttttagtggattagagtataaaaactaaaaatccacagaggaaaaaagttccatataacaacttttcttaactagaattaaagcttgagtgattttattctatgattgaataaaatcaaaactttctcaaaagccactgtgttcccaaacaatgatcagagacaaaatcaaagctacaatacaacagcttttctcaactaaatttgaagattgagtgcttttttgtttcgatcacataacgatgagttaataacttaagaaccttaagctacacacaaattttaatcctaaaaaggctacaaattggaaatcatttatctaattatcttctatgatcataaaaatctcaacttttcacaccaatttcgttcccaaagaaagatcagaggcaaaaacaaataaaaaaatcgaaactttaaagaggcaaataaaaatcgagacctgattgatcagtagaagctttaaggggcaataaggtaagtcttcgtctgagagaaatcgatcgtccatgggtaaagggagcaggacactgtgtcctcgaagaagaacaagtgatgggtttgcgagaaattgcagaaaatctagggattgttagagtaaaagccatcgtctttatccctcacgccgatgattgagtgagatcgttgttttctcttgtccgggacgaagaacaaaaaaaaaagttagaagctttggatttgtgtggttgagaattgagatggtgatgttttttactgtgtgagatagtttcaggttccttctgatttttttgttttgttttgtttcaacgtgtaattggagggaaaattaggaggagataagcgaagttggatcgtctagcgttccacgtcatgattttgaaaaaaataagaataaaatcttgaattttggtaaattaccaaaaacaaatattgtattataatatttagatattattagtcacaaataaaatgaattctttatataattttttttacgtagaattgaaataaacgaaaaaaaaaaactctaactcaaatcataacaaaaatatgtacaatcatttttagtttattattttatcatctcaacggacaacggtaaagaaaaataagggttttgatttgtgggagtcaagatagtaaactcattataatagataaattgtacatatgcatcatcatgtggtgaatcacctattggtataaataattaagaaaccataaacatatttcatgatattgcacgaaagcaaaaccaacaaacacattgtactcttttgaaaacatattttgtatgtaagacttaatttatttataagttctcttaaggaactaattgcgataaaaaaatttgaattttaataatttataagagaattttgttgtaatatatatatatatatatatatatatatatatatatgtttgaaaaaatgaaaaagaatcttgagttttagtaatttgcaagaaaaagttgtaatataatatttattagtcaacaaaaaaatatttatttacaaacaattatgaatcggacttgtgactcaaaccatagacaaaaacaatcattgtgatgctggttgtccataagttaaaacacaatgaatctatcatgaaataaattgtcattggtggtttgtaaaccactaacaaatcgatagaaaatgtttataacattgtcggatatgctctcattagatattataaatgaaaattgtggatagttgtacttcacaaagccactacatccggggtcatttcatcatttactcaagaagatgtttttatcttcggaaaccagacacttcgaagataaagacttgagagaggcgtattatgatgtatggttcgctggtttaatgttggtttaatatttggttaactttgattaagtgagcttaagttcaaatatatataagcttaatgatacacagttctaactaacgcttgtaacaatattttgttgagataaataaagtttgttagcttttttgttcaatcttctctctacttttcgatacacgggtgtcccatgtaaataaccaaataaatttttaagtttataatgcacaaataattcacaaaatttatgtcatagaattactttgaatcgaaaaaaatatatatatgaaagttggttaactctctccatatgaatgtcacattatcatacaagaaaattacatgtgtttttatattattcaataaaaattttagcaaaattaagttaagaaaatcaaaagtcctccacatcattaaatcttccatcaatactattaacttatttcttcaaaaaaattgaaaaatacaaaatcatgctaatgtataactcaattataattacaactattatatcaatatatcttatattgttattctatgtatttatgatagcaaaaaaaagattaagatcttatgtatatagataattatattacacatgaaaaatatatacttgatattttacgtcaaaagatgaatcaaagcataaaaattgtaactatataagatgaatctaaatatttatgtaactacacaaactagcaacaaagaacatacaacatatttttaacaattttcaaaacaacaactcatgcatagcatgattattcatctactaacattaatagtttgtcagaatagactaacattttttttttactttaaatggactaatcaacataaatctccccaaatcttggatgtactcgatgaatttgagattttatttggtgaactaaccaaatataaaatgcttttatatctttttttatcttttaatttggttagagtttactttgaactctttgcttttctattttattttcaaagttttttttctcctatcttggttaattattatttttgtttctataatataataaaaccaaatgaattgtggactgagtattatacaaccccttcaatatgtactattttgattggatagcttaaattttcaaagattttaagtttttaggcacccaaagtatatattttgtttagtacaaatttaacttctcaactagtttttaaataaagtcatattaggtatttggtaattgatcgtatgtgagtgggcctaataatgaagtaggcctcgacgtcaaaagaaatttgaaggtagcccatttatctttacttaacaatacaccaccagcggttcacttaaccctttaacagccaaatcctgtaccgttagattatatcactaatcgcatcttgtccgttcaattttcatctttcctcacctacacgtaaccctaccattgtcagagcccaagtccagagagagagagagacgaagaagaagaagaagaaacaaaataagaatacaaaacacagagaagaagcgaacagagaaagattagggctttcttggatttttaaatagaattttcttcttcacttgtgttctttctcattcgttatcccaaaagcttttgataatccaaggttcgtttttttcttctactggtaactgtactgttctatgttgttcatattctcacactgtaatttgttggctgttcaatgggttctgtttggttatggggcacagtcaatagaggaagaaatgggtttcagaatttaatttgatactagttcttttgaattgttatgctttatgacattctgtttggttatggggaagaagaaatagagaaagagttaggttttctactgaattgttttgattaggtgaagaaaattactttatgtcatttcgattataaatagtatctctctggttagtgttgaactttcgaagttagtttcatggatactagtttatcattgtagtagactaatgagtaatgatcactaactacttcttgttagtatgctaattgatttggtaaaatgcttactaactacactagtttatcattggagtgtagataatttgaacatgtaaagtgagattttttctggttatgtttatagttgcactctgatttgagtcaatacatgttttattcttgttttttaaatggcttagtgtgacttctgtttgtggtggtgattgatattttattgcttttgattgatattcatttttctccttttgctgtcaagttttatcgttttaattgagtgttgttgttcttgtgtgttaatataggttttaaagaggcatgtcttctgatactgctaaggaaaatgcttctgttgtcgattcgtctttgactgattggaaacaagatttaggaaactctgatgatccaggtaaactttgaagcatgttttgttattcactttttttttttacatggagatttgcgttttattttgtctgtctcttgttgtaattttgtcagagagtacaagttacagaagcaaggaagaccataaactgtcaaaggtggatgttgatcgacgtaactttcctgatcaacttgaaagtgcaaaggcgaataagaatagtaaaccagggtatcgaacgagatatttcatcatcaaaagtctgaattatgataatattcaagtttcagttgagaaagggatttgggctactcaagtaatgaatgagccaatattggaaggcgcttttcatgtaagaatctctcctttttagtttgcaccgctctataatcttatatctactgtcagcctctctggtatactgaggttatagtctttgtgtagaaatctggtcgagtgattttaatcttcagcgtgaacatgagcggattcttccaagggtatgcagagatgttgtctcctgtgggttggaggcgagaccagatatggagtcagggaggtggtaaaaacaatccctggggacgtagttttaaagtaaaatggttgcggttgagtgaattgccttttcagaaaacacttcatctcaagaatcctttgaatgattacaagcctgtcaagattagccgagattgccaggtatttgtttcttctatttgtttcatttcctagaatttttgcgtttgttgtcttaaatccatataatggcttaggctaggatagcttaaggtttatgaaaatgactcgatttgaagttcttttaatgtgtgcatgctctaggaattacctgaagatatcggtgaagcactttgtgaactccttgatgcaaatagctgcgatgacgggttgctgaataggtatctccttgaagtctaagtggggttttgggttcttagatctgcttgttcttgattctattctctcacagctcttctagggatgattattcaacaaaaaggtcccgcgcagaacctccatcttcttcaggagacgatgagtataataacaatctttggggccatacaccaatgtcttaccctcctacggtctacccaaaccaggatgacctcagcagatttcatcttgcacagcagagaggatatggagtttcccccgaatatctgcatacatcaccaggtgcatctaactctcgcacggagcaagacaagtctttacgattcaactcatggtgtttgcctttggaaagccctctcgcgaattctctaaccgatgatgattttcttgaaatggtagtggcatatctgcttgtaacttatgctgagaatttcatcccattacgacctcttgttctcgaattagatattttttgtaagtcatgttgtttagttgaatcaagaatagtcatgacacactactggaaacttggtgaaaacatttgtagtatttttcaaactctgagctatttcagtgtgctctttctgatccataacacttacatatctcagtgtctggctgagttttgcattgatgttacagggacttctttctgtttcttgagaagcatcatgagatcaggttatgttgttgttgtatgtttgacaaagtcttgtgattgtgtttttttgttgttttttgcagtcttatgaagagtacgttgaaacccatggcaaatgcatgaagcagcttggtcttcctgtcagtatgttttatccatcactgtttacattatttcttgcgttttttcggattaattttgtggcttgacctgatattacttttaagtttacttactttgaacacttataggctttcttgattcatgttttatcatattatcctgaagatactcataacttcataaggatcatcatcggttgattcttacgcggtaaactctctctctctctctctctgcaggtgattccacaatcacgatcaatacaagagccatcaagtagaactgatgatgtgtaagattacaaacctgctcatgagccaaagaaagcttcattttccattttcctaatttcgctacctctgccattttatcagaagcaatggttcttcaaaagatcagccatcatcaagaaagagaggacgacattcatcctaggattcaactacaagactcacaactctagcccgaaaatcacattgaaatgcacaagaatatgtagtgccatttcgattgtacggtgatggagaagttgttgtgatattgtaagatgttcattttgccctggtggtttatagaaaccagaagactgtaactaaaagtttcttcttttgattgcccaaacttgtacagtttcaacttcaaatatggcaacatgtaaacttttggaaacctaaaccctaaattgggtttgcaaaatcttttgttctaaagataagttcccaagttgtcatggtaccaagttataaagcgataacatttatctaaaaactccttttacaacataagaacgtctaatctcaatctatctcatctggttgactgaatccagttattgtatatttcagagaattgtaggagatcaagagttgggtttcagtctctggctggacacaagaccctctcgctgagccatttcatagagaccaatgctcataagaaccttagcgtcagctgttttgcgccagagctctctatatgggatgagtcggactttgatgaactcaccgtgttcacggagtcctgtctctttgccttgcaactgtctaattgtttccttttcgacttgtcctctgtaaagaaacacgctcatctcttcatcacagcctccctgaaccagagatatcaagagaaacaatacatcagattccaaacacgttctaagaccaggcgacaaagaaagttattgagtttctgcagcctattacagagaataatatgagagttgtataccaaaagcagtatacggatcaaggaaaaaatggacttacaggagaagggaagatccggtaaccagtagatgggtcaagaaaagcagtgagatcaaccatatcttcttttttcagttttataccaatctcctcttcgacctgatatatccacgaagcaaaagtcatgtaactggcgcaaaacacaaatcgagaaagtttgtcaaactccttttgagttatacttcgacttctctacaattccaggttcctttgaaacaacaaaaaatccaaagcatattgcaggccatttcatttgcagtcacagtatttaaactcaacaacttctatactatgttcatcttaaacattcaaattctttcacaaagttgtcaagtacctcgcgaactgcagtaccaacaaagtcacctttatcatcatccaacattccagcaggtaattccagaacaatcttcccagtaggaacccgaaccttccaaaacaacccgtataatgttgatctttgttaaaaaatagaacaacacgaacataaatagagatacctgttcagtgagaaccgcataagtctcaccatctgactccaagagaataagcacagctacagctggtcctcgtgcaaatacaatacctggaacctaatgacgttttagcttacatatggcaagcaaaactaacatatacaatgaccacaacgagcgagatgattctaattttgaagatgattagataccttttgaccagtttccttgtcgaaaatatccgctttgaatttgagaaatccaattcttttgccaaacatatcaactccctaaaaatcataaactaatcaagaaagctccaagattctatatatgttctgatcactgatcataatcatcatcagataattcattaggatcaagagtatctcaatgtgcttttatatatatatacctggataagaacttgctttaatgtcattgaaccatcagctaaaattccactctctgattccaaattccttagccaattcctaaacagagatgaatcaatcgcatccctacaacacacatacacaaatgaattcgactactcattattttcgaaattcttctccacaagggaaatccacggatatcgagaactcgcctgaaatcggaagaagagattccagcggttgcagagacaaggacaggctcgttgggttggctcgggagagtgatggattgagtaagagaggaagaagaagaagacattttgcagcgaagaatcagctttgcatggtggtgatgaaggcgacgaggtaaagcgcgtgaaggaaacgcgagtaaccgcgagggaagaagagtaaagccagccatcaatgaaaaacgtgaaagcaagcaaatcactcactcgcactcctcggagaagatgagaaattcaacacgtgttgaatcacacgtgtaaacctttaatagatttttgttttcgctaaggataaaaaaaacttaacaaatgttacaagcaaaaaggtttcgtggtgtagttggttatcacgtcagtctaacacactgaaggtctccggttcgaacccgggcgaagccaataacatatgtttttgttttgtcaggggcatagtttttttgttttagatatggttcggttacaaggtggtgttaactgagtaaggggtctcttttatagcattctccaacatgaagccaattttataaatgagtaatcgtccatgctttaatcaatcacgggcatgtcaattttattcttatatcctccgtttattcattcattgcataaatcacagagccaaacatttacatgataagtcaaaaacccatgagatgtttgttttgtatatcattcatatcaagaaattttttgtatatcattcatgtcaagaaatgagtatccacaatatacattttcctttggtaaaagtaaccgatcgaccacaatgtcacaccacactccttgagagactagatatttttagttcttcataatgttaaccttctttttgaatagttgtcacctaagagaaccaagtcttaatgtacaaaaatggagatgactcatataactacggattttcttttctacgatcagctagaacacctaagctcctgcgaaatcgaaaacaaaaatgatccccaaagctataaaagaagcactgatataggaaggaaaatagtagtgttcttttgtatattacctgttaatttagttgcaccgttgcttcgagcttaccactccgagaagtccattgccggctagtttcaggaactacactgggttgtaccattgggtttcccataaacttgcttgttctctgcaatgtatttactattaatcaatgataaaagaaactgtgactgtgttgtattagaagcaagcttgaatcaataacttacttcattccctgcttgaaaggagttcaatctattttcctttgagcccttatgccaagaaacgattttaaaactcgataagattctaaagctggtacatatatagtcaaatgaaatgaaatcacaagtttcacctttacttgttcaggctgaggaaatcttaagcgagaaccattgtttggccggagttcggatgataaagagagctgtaaaagggttcatcagataactagggtacaaagagaaacaatcacaagttaaaaccattgaggaaaatagaatgttagggaaccgcaaatcgaaccttactgaaaaggtctgttggcaaatctggttgagccgtcctttccgagtgaaaactaaacccctgtgtttgagtgtaagaacagtttgagtctattgtaggaaacatctacagagacatatatacagtaaagaaataattcatagactgacataccaagggagctgtagtttctcgcttgctttttgtgaacatgccaatctctcgtccacttgaaagtatctgtttaatagaaatgaaccctctatgagtgtatctattagtgaaaaaattaggtaagcatatgcaacatgagaaagtaaacattataccttcttgttaagaggccgagctttgaagaggtcttttctaacatcatccttaggtatatcgatagctctttgtctgttagcatttaagtcgcagaataatcacagttctatcatataaaagtttgtgtaagtaagcaagatcataccttcttggttccctgttaacaccgtcaggaaatgtcctattaggcttatctgcctcctgtcaaaaagaaaaatccatacatttgatattaagtaatcttgtaaacatgagatgatttcaagtaagttcagttggtgtataaccttatgattattatttccctgatatgacgaagttgatactgctgatgaatgttgcatagctctttctgaggtctttaaacgaaattcctgatataaccacaaaaatatataatctaaagtattaattattaagcctgtaaaatatagagtaagaccagtcctacttagtttctaatgcttacttgaaattcaggtagtttaggagtgctgttttttcgaatgggcaatgatggagcctcgaagatctacagaaaacacacacatgtttgaggtggaggacaataaagaaatggcttccatgttaagtatttagcagatactaacttttcggttcaagggtcgtgctttgaatctatatactgatgttgagtcctgctccaacttagcatcgttcttgtgcctgaaataatcatttggtaagatgtgtgatttttaccataacaatttactatcattcaatgtctaggtcctaaccgtatcctatttgctctatgtgaagttgcaaaatcaggctcctgtgggatagtaatcttcatcctggtatgtagtgagtttttatcaagatcctgcaaaaccatataacaaccaattgaatgattaacaacaagaaggttgaaggaggttgaaggagaactaaagaaacagatagaaaccttcttgagtgccttatggaccaaatttgtttcttgagccgcttcagcaacctgaaacaaaagtatttgaaggtctacgattagagaaataagcgcaaaatctattactaccactattcaaatgctttaatcatgtaattcttaaaaggaatttgatacaacgaaactcgtggctattagaaactccaccttacgaagtagaccaccatcgagcttctgtcttttagcagattggatttcagatgaaagacacttaatttcatccacttgcatatgcagtctaggagatcaacaaaacaaaccaagtattaagttcattgaattaagttgacaaaagacatatataccaagaattatatcttctcctaatcacctggcattatcttgttttgctaaaacgctagcagtaggtttcatcaatgttgagcttctcgttataggcctgatgcttgactttggtcggtacttgagcttatcactatgaatccgattgctaaatgttggtcctgtgaacatgtagcaaaactaacaatcaaaaccaccagcattaatgtatctaagtaggaggaaatgagtttgatcaataattcataaccataaaaaattatagttgaaccacatgtgtgttctcttcagtcatgttagcaaaagtgttcacctttatgtaaggaatcgtttggaactttgctcaaagtaccaccttgaatgaatctaaacaccccagacttcattccatttcctgaaacaaaacaagattccattttacatcaaccataactagtaaactcttcaagtttgttatccaaaacctaaacaatgctagtttagtgatacagaaacataatccaaaacatcctaaattcacctgtttcattcacatctggttgctgagggatttctctgtcactctcctgaacttctactgtgacttccccatcttctgattttgacaaagactcggtcttttcatcataaacctcttctatcattaacagtttcattgcaaaagctgacaaaacacaataaattagacataaacactctttagttctaacaagacattagtcctctgcatttgtaatgaaattctcaattcagtgaaacaaaatcaaatctaatcatcaaaataacagattcataaaacacaaatgacgattacttcgaggattatctttcaattaaagcatcttaaaaaatatcgagtctaaagtttcacccatcgttattaccgcattacgtaagatgacgtaaccaaaaaccaaaatttagcgcacacttcaagaaaccgagactaatcacaaaaaaacaatcaaaaccctgaagcgaagatactcacgagacggtggataagactgagcggtctcgaaccaaagttcagcagcacgagactccaacggcaactcctctcgagtgaaatcaaaccaacgagaagcatcaaactcatactccaaatcaatttcagtcacttcaaacaccattgtctccatctccatatcttcatcggactctgtctctgtgtccgtctccatctccatatctctctttaaaatctccactgtacacagtaacacagaaacagagagaattcactggtgggtttttaacgtcactcaccaacaagaaaccctaatttatgtgtgattttaacatcattggatttgatgagtgaacagaaggagaagaagaattgcagagaaggaaataaacgtcactgttttttttctccagagcgacaaaacggcaaatttatttattttttccttatacagaaccacaaaacgacaccgtaagaagcgtgcagttcctgacgtggattattatgtcaacaaatgaatttgaatttgattggactgttgagaggggtacaataatacccctgtctgagacagagtgtaggggtttttccgtaactttcgcaggaagtgacgtaaggggtattttgtgctttcgatgagactgaaattttcggcggggaatcgagggaattgtggattattttcgattctgccaccaacagttgcattcgtttgtcacgttttgacctggctttatctatttttgctaagaaatctctattttacaaattattctaattttgtactatggtaataaatctagtctttgactatttgatttagaacctttttaatttggtatttttctaaatcttgttggataagtttatttacatgtggataagaaaactatgcatgtgattgggagtaattagaagaaaatgaaaggaaagaaatgaaaagaaaacaggaaaaaaatgaaaatgaaagttagaggaaacaaaattctttcatgtatttgtggggtgaatattgtcacttgtttctactaaaagtagatgaattgagatttttctttaattgttttatttggacaacaaattaaaagtagaataattgaaaatatttattttactttgcatttctttttatatatctatactaatcagtcataccctatgaaatgaacatcaattttcctcatataagtacaagtgacatattcgaataatcaatgatattcgaatgaggatatgttggagatgaaagttcattcaataattcgaatattcatagataaataaaacatgttataaaaaaacaagtcgaaattgtttaaagttatccaaaccggccaaatgcgcgttttaatttattttatctactataactaaaatgagttatgtctatattaaagtttcatgctcttctaaatcaaaactaattgacaatgagtgaatttatccggttcttttagctacttacagtagaaactctataaattaataatgttgggaccatgcaattttattaatttatagtgatattaatttatagatatatttacgtaaatacaatactatattcttttaaaaatattattaatttaattttctatatgttttgttgtttgcatatatacttatgttagatttttattttatttttatttttttaatttatttttcggcaagatattgtgtctgtatgtctatgacattaacgtgaacgtaaacatgaagcttaatccaatttctctttacacaaatcttagcaatgatttctcaaataaaagattttacaaaatcaattatgaccgatcaaatatgcaaatagttatgtgagtaaaacagatatcatactagttgtatttttaaaaaaattgtaattgtaacttgaacaaaaatttcatataaaaatgagtcttaaaatatatacttaagatctatgattattaatttataatattattgggactataattttacataaggatttttaaaaaattattatcttattatcttatcaatttgttaatttttacattggcccgacttgaaaccgacaaaatttattaatttatcgtgtttattaatttatcgagtattaatttatagagtttctactgtattttgatagaatccatcagaagataatgctctttctaaatatgcggacagaattgaacctttttttttaaccattaattagtggtgataatcgaaccattttcatgaccagattaatagggtaattgtgttcgggctctaatattattttaagttttataggatttcaactacaaattaattgacaatgagttgattggtaagttacttatatactactcaaatcatttttcatttttttaactttctaatgtgagatctttttttacggtgtatggtttacactgttatttaaaatttaacgaaatattttgttatttggtgtccacccaaatatcctaattaaagcctaaaacttttaagacattgaatgtaatgtgtaacatttaaaatctcttgaatgtgtaactgaatttgaaagtcattttcctatagaaaagcatgtgtttcaccagatgacaaattaccattaatgagcaatggattttattcgcatgaaaaagacacatagatagactgttgaaagtggtaccgagtcagaagcatatatagtttaattcaaaccagaatattcagaaaatgcaaactacattaagtcttgacatgtaacttttttactgctgattgaatacacatactttaatctaaaagaaatatttagagaataagacaaatatttaattttgtggttcataggtaggacaaaatgtaaatggctttacatatacttttagacaaaagtgtttcaaaggatattgggttttggaccaaaagcatttttgaagggaattaagacaacatttatttcgggatgagagtagttgaacatatttgttgtgttataggacttaggagagcttcaaatgcaccagtataaaaataaaaaaaaataaaaaaactgaatcaattattgatcgattcttgtaagtatatctttaaaatttgaaaaagcttatgtagaaaattggtttatatttagcttcatattttagaattatatatatttcacataaagttatttcaattccactttgtatcttatgcaagagacaaatgactcgcagaagcacttcattttctagtgtgaattttcaagcagaatatagatgtccaaatccgatactagaaaaaccgcagcttcaaatccccaagaactctccatatagttcttctcctcttatctctcgcactcttcacttgggcagattcacactggtttcacaaaccgcaaaaaaaaaaaaatggtaattaaaacagtctttgattaattttagtagaaatccatttaacaaaagattcgatttggtctagaataactccattatttcaaattgaaaaaatatagatcatacatattgtgatgaatcatagctaaggtttcttcttcaattccaccatttaatatgtcgaacgcatagcaatgtcgtactcgtaggctacaaataactcttgaccattatagttcgaaaaagagacgcatttgattttgatagaaacaattaaatggccatctaagctatattgggctttttctcaatgcagcccataatattcgaagtgcaagttttcactagtcacctacgaatatctgacacaacacttgcactatttaccaattagacaatttccaatcttcatagttagttcatacttactagagaatataaacgagaaaacgaaggaggagtaatgatcttaagttttcaattgatccattcttttcaaacatcaaaaaacaaaagattgagaaaacgcaaataagattaaatcgtgttagagagtttagttagtgtttatatagtcattataatttcttttataccctttcatttctcggctataaacaaaccaaaacagagaccaaaaatcaagagttctttcacatcatggacgaaaacctgtactttgggaataagcagagacataacttctgaggttgttgtctccattactgtaacaacaaagcttccttctccttcttcataacttcaagctgtcttttcgcatacttagtgatgagaacagttgtcacaacagttgctacaaaaccaaaaatgttgagaacaatttgaagaatcgagagacccttttgttccgcagtggatgcatctgccaatgtccttataagaatccctctgcaaacaccaaaacaaacaaaaatactatcaggatgctaaatcaatcattcattcattaccaagaaaattgtaagtcatttccacacttacgtataaattgcgacaaaaatctccggcgccatgcctacgagagaaccagccatgtaaggaccgaacttcacacgagttgcaacagcgcagtaattatatacagcaaaaggaaatggagaaatccggattaaggtaactgcacgaaactgatgaaaccaactgcctccaccagcagctctcaacattgcagcttgatctggatatctttctaaccaaccctgcaacattcatcaatttcagcaacatacaaagtagtcgttactaagaatataactggttcttaagcgagacacatacttgaattttgttgaggaagagatagctgatgaagtaaggaagtgaaacaccaatagctacagctggaagagtaaggagaaggccatagaaataaccaaatgtaatcccagccacccacattgacggcgtagttggaataagtatcacagggaataaagagactgatgcaaacacaagaataccgcacacagggtgtgtaaatgtctccatctcccattttatgagtgggattagctcctgcaaacaaaagttaaatggataatcccataatcagcaacagagccaaatatgtcactgactgaatttgtcaccagcatcgaaaatctaccgattttagacacagaacatcaacaacgaaacctcactttggttattggatactgagctaatcgtagggatacatagtttcaattcacatgaaccaaaatcataaaggaacctcttttatacactaaggatctaattcagtagttgaaactataatcaaacccaatagataaagaagaagactttcagaagaagatcaattcaacaagaaatcattggaggaaattgaaaaccttatccatgattaaagggtatagccatttgtaaccagcgagacccaaagcagttagaaaagtgaagaaaagaccaagcttgatccaaaaccaaacagatcgtttctgtccacatgaagaagaagaagacggtgatgatgaagattcttgttctgtttcttgtcgatgtacttcgaaatcttcagtaagtttaacataatgacctaatttatcaactccatcttcttcaactctaactcgaaattcagaaactgtatcgtcttcttcgtgataagtcatcgagtagaaaaaaagagagcgctagattagtaatcgactggattctccgatcggattcagagagaaaaacccagtgatggaaaaattgaatgactcaacgaatcgaaagaaacctggggatgaaggaaggattgagaataacaaataaagaagatttgtgtgattttggagaaagatgagtttttttcttttttcggtttgtttgttaatgtcatggcttgacgcatgtacccattcttttaaattattttcttattactttatgatttcttccgtcgttacttgcatttttttatattttttattcagtttaccaaaaattctaggaaatataaaatagttatttcacggttgacgaaaaataataaaatatgtagtttgaaaacacctggaccatgtcggcataaaagcgtgtggatattgttagaaagaaaaaaaataataatttaaggcccctaccaaattttacattgtaagattttaaggtctcaaaataattagggacaaatattttggtgtagttgtaaaatttgttttgattgggaggtgtatattataaaaccagattttaaatccgtaatataccgcatgataatttttttttctaatatatatatatatatataaaatataaaattttaaattatttatctttatataatattttttttgttttgtttacgattgttattaagtaacatataccacgaatttaagaacaataattaaaacttgaggatttaattcgtattaaaccagcatattactgatattttaaaaatttataaatattgattcaaactcatctactataatccgttccacaatataaaccgtcttgtaatctcttaactcatctcatgtaatatttaataaaaatattaaaattaaaaattatttattatatataagtttttaaattatatcattttctgagatatttatattttataatttaattgttactaaaaacattatattactatatatattttattttatataatttttgtaaatcagactgatttatatgtataatattgatagtatcaaaaaataataaatttaaaacttaaactatattaaaacaatatattaatgatattttaatttttttattaatattatttttaaaattcgttccgttaaatttgtctcgataagaatttatttattttattaatattaatattaatctgaattactatttaaatattatagttaatgtaaaatattaaatacatatatttttaaattgaataatatatgttggtttcttactaggcattactagacattcatcaacgaagtgagatggtggccatacacgtggccacaaataaggaggttagcttgtcgcgggtttcccactttttgagcttttattttaattttattatacgtgtttaatttcaccgaccaataatccactgtggtcgacattccgtattctccgtggacccggttttcgcaatttcccaatttcctcaatttcgatttgtctttgtcaccacaatctgacgacgccatcgccgcaatgccttccaccaccgaaacggcaacatttccgatatctttcccgcgagctacttttctactgttccgagatcgaattttcttcttctcgactcgtcacaaaaacgcctattctcactttcaccgctcttggattttaatggatatctcttgaaacctctccggccatcttctcttcggccatactctgaaatttggattccaaatttatcaaaattataaatttgatggaaaaaaacgtgaaacaagattcacaaagtttcagaatccacgaggttggttgatccaagcaatctgtttttcttctttctcctgagattaaagtgtttgtttagaaattgactgtgctttgacatgttacatcattttctccagtatatgtttaatctttgaaaattggtttggtatgaagtttcaggtgacattatgccgtttgagatttacatgtgaggtttatgcaaccatacaatgcactctgagtgatttgacaaccgtggtaagtgctctcttaacttctatgtatgtgtgtagttctagctccatatgtggaatcgacatttcgaaattagcttatagctccaaagttcggttctttctagctgcataatgaaagccaagatattcattcacaagtttaaagttctaagatcatctttgttttcttgttgtcattgttgatctttaatagatatacggttcttgaatatatggatgcacataatgattacctgattattttagtagctgtccatagtttaaatcagtattgcacattctctctttttctgttaatggtgatgtgtactgacatttaataaaacaaaatttttgacataacttaagattctatctcactgtgatcttctcctccttccttctcttacaacctggttcttcaccaccaacaaactggcaaagtcctctcttgggtctaacgtcatccataacatcatcaagatcgtaggaacaacttggtccgctcttcaaactcagctgaactatatttgtcttctttagcaacatacaatcatcatcttcaggaacatacattaaactcatcccacattttatcacttcacaagtttctatcttcttccttgtttcatcatctgtcacatagaattcgaacgaagcctttgtgtagcaacagctgttactctctccatggacatttttgacgagaaaacaactgttgtatcccatgaaaacgtggtcagaagtgagctttcttgattcatggctaagggatccacatggttcgttccagcctgcgagagtgaaatcaaatctcgtgaaggaactgtctttgttctcgaagttgccacaacactttaccgagaaacgtttcgcactgtcttcatagtccttgaatgagacaactacagataacgcaagtccaacaaagttaatatcacaccagtgcggaggcaatgggatttctagtgaacgtcctagtctttggtggcagaaccaactcggtatttcagtggccgggtaacagataccaaccagaggctccggaacaaatccctgcaaaagacagaaaatgagcttccgttctagttttgatggtgaaagggagaaggataaaaaaatacccgataataacgttttgcagaagcattagccattaactgacttttgattcgagcatgacccacgagactcgcttgtgcgtcttggttcagtttgtaacagttgctaaagatgaacatagaatggattctctctcctactgtcaaaggcgtcaatggatttgccaaagtttcaagtgactcgcattcgtgtgcatccagatactgcaggttttgtggaaggactggtagagacttgagcattttgcaaaacttaagatcaaaccatttcagattgttaagttggttgaagctttctggaagattctcgatgttgtttccgcttaagcataaagactgcaaagaggataggccaccgatattatctgggagtttgtagagactgcatcttgagaggtaaagatctgttaaccgagagcagcccaatgtaggtggcatgaagaacatactaacagaaacgtgactgcttgtaccacataacgaaaatgtcttgatattgctcaaatgcatcatctttggcatctctgtgatggatgtatcatccataagtaaaatctccaaagattccatgtcttccttaatttctggaaaaacctctagttgtgagcaacctgagagtattagctcttgaagacatttcagcttataaagatcagaagaaagatgcttcagctttttgcagttcttcagattcagcaaagcaagtcttctaaaggtttgaatggattcgggaaggctctttataacagtgccatctaaaagtagaacttcaacattttccgagatcagtgggaatttctttaagctggagcagccactgagaataagagtttgcaaggattgagttttgattccttttggaagactcctaaggcttgtgcaatccctgagattgaggtatataagcttctccaaacaatttatcgttgacggcaattttttcaaacttgtacatccttctagattcaacctctcaagattatgagcattagccaaacccaaacactgacgtaaatttatagaatgactaaggtcgacccatttgagcattccaacatcctgtgaaaaaaaatacaaccacaagtcaaatttttgatgcaaatcaaaattcactttagcttaggactgatcaaactgacgtaaaacataccttttcatcatcccaaatttcttctaattgactatgtggcaatttaaggtctacaagattcttagggtcaaagtctagagggatactctgtagtggataaccatgccagtgtagatatgtaagctcgttaggaaggaaactaagtcccctccgcaagtgtagtttaaactctgcttcgcatccacgggaacaatgagaatcataaattttcaagtatttgagattgtacatcccttggaaggctttggcacttagacgcattgctcttagttttgatgtgtcgagaaaaatgcctcttatcttatcagttccctatcaatcaagtagtaaatgtacagtttttaattcaaagcatgatactgtaacataatacaaaattgtagacaatagaatatcatcaagatatgtcattactcattaccaggccttcggttagcaggtcacaaatatcttcactgtcccataatctgatatgccattggcactggttaccatgtcgtgatagccacctacagtctcttatacctattgtttctacttttaaactaatctccttggccatcgtttgcaacatgtcatgcatctcgatgcgattatcagaaagagtgatcagacatttgtcaacgagatcctttaccacgccagagacgtccacaccatgactgttgagaaggcttgtcacgtaatccacattctctgatctgaagaaacatgcaatatccagaaaaacattcttctgttcagtggtaagctcctcatagcttgtttctagaacttcgtagatatctccatgtgatctacttttcagtctatccagtttagcttcccagtacagatcatccctctcacaaagatcagatcctaacaccttaagagccaaagggtggcctttagcgtaatcaagaaccatatttgtcaaaccttcgaactctttcaaagggaaagagttactaaaagcattcaagctaaagagcttcaaggcttctctatcattcaatttcgggagcacgtattttcggcctttgatcgtctcaatcagtttactatctctagtagtaatgataattctacttcctccttgataccatttgcaatgccccataagatatctgatttgcttttcatcattcacatcatcaagcacaataagtagcctcttgctcttaagccgccgctcaaatctctcatgtgcatttccaggagctccaatctccaaatctctatcattaagtacagtggaaaagagtttctgcagcaaagattctaacccgcttctacctgaattttcgcggatattagtaaggaagcagctaccgtcgaactgaccacgcatacgtccatacaaacaatcagcaagagtcgttttcccaatcccaaccattccaacaatgcctatgatatgaacggtatccaaatcctcccatgataacaacttttcaagattcttcagacgcgattctatccccacgagaccttcgttcccgcttggagccaaatcattcaacttcttgaatgtgtcaacggctatttcatcaacaagtttggcctcagacgtgctaacaaaatgacaaaaaagctggatttagcataaactttaatagcatctctaagaagataaatgtagaactttgacacaaagacttggtaagtttttttgtgtgacattgatgacatcgatctagattttgcaaagttacctaatttccttgactacataacctaggatgttggatgctgaggcaagagcagccttccacgatgaaatttcttccggcgtaactccgggaaaagtcaattctggtaacttgaacggcaccgcaaaactattcctctgtttctcgacgtccgatttgtcaactttgtagaagattggtaccactagctgttggttgctgttcctacattcgaggatcttcactaactctcgaagacaccacgcagaatttgcatagttcgtggagaagacgatgattgcaatcttggatttctcgattctatcgaaaagcgcagtgagattgtctcctcgacggagtctgtcgtcgatgaatgagtcgattcctcttagacgaagtgctttttggagatgaccggtgaagttgttgcgtgtgtcaaagcctctgaaactgagaaacacatcgaactctgctgaagatggagaagatgattccatgggagaaaagctctgatccaatttgtccagttttaaagtcaacgatgagctgagaaaaacaaggcttgtggtttggtttctctcataattgcgagaccggacaaaaacaatttatccaatataaaatacttaattagtggcacgaaaaaaaaaacacgaaaagtcaacaaatcgatatgtgagcaaagtaaatttgtgtttttgattattggggttttaaaagttttcttcctcattcttcgtttgttaattttaaggatcgatgtcggagaaggaagaacttccgttgacattgacgtccatcggagcggccaccgcgactagtgattatcatcagagagtaggaagttccggtgaagggattagtagctcgagtagtgatgttgacccgaggttcatgcagaatagccccacgggtttgatgatttcccaatcgtcgtcgatgtgcaccgtaccgcctgggttagttccggttatgaatgatgattgggatgtgaattgcaggatgataaacattctttttttctttcttgtgtgaatatgaattttcctgatctgataaaaaaattgtgttcttgatgctgcttgtgtactggaactgtcatctagcatggcagcaacaccaccaataagctcaggttccggtttatctcagcagcttaataattcttctagttccaagttatgtcaagtggaaggatgtcaaaaaggagcaagagatgcatctggtcgttgcatttcccatggcggtggacgtagatgccagaaacctgattgccagaagggagctgaaggtaaaacagtgtactgtaaagcccacggaggtggtcgcagatgtgaatatcttggatgcaccaaaggcgcagaaggcagtactgatttttgtatagctcatggaggtggtcgaagatgcaaccatgaagattgcacacgatctgcttggggaagaacagaattctgtgtcaagcacggtggaggagcgagatgcaaaacatacggctgcggaaaaagcgctagtggtcctttgccattctgccgagcccatggtggtggtaaaaaatgcagccatgaagattgcacaggatttgctaggggaagatcaggactctgtctcatgcacggtgggggaaagagatgccaaagagagaactgcactaaaagcgctgaaggtctttcgggactctgcatatcccatggtggtggtcggcgatgtcaatctattggatgcacaaaaggagcgaaagggagcaaaatgttctgcaaagcatgcataactaaaaggcctctaacgattgatggaggaggaaatatgggaggggtaacaacaggtgatgccttgaactatctcaaagctgtgaaggacaagtttgaagacagtgagaaatatgacactttccttgaagtcttgaatgactgtaaacatcaggggtactctcttctatctttccattatgtctctcttcttacagcaggaaatatattaattttttgtggtgactcatgttggatgtagagttgacactagtggcgtcatagccagattaaaagatttgttcaagggccatgacgacttacttttgggttttaatacctacttgtcaaaggagtaccaaataaccattctgcccgaggatgatttccctatcgattttcttgacaaggttgaggtatgtatataatgtagtaaacccgatacctatttcatcatgatcaggtttaagattcatctacaatttttttctcggtgccttttgatcaggtagacttggttattttagataggtctttcctattttcttttaatagggggatttagttttcaactcaaggtaactagccggtttcccttctattgctcttctttatcttgactctgtatctaagcttaccaagtcggatgtgtgcttggatttgttttcccggttcttgttttaactcgatatgtaacaatgtgcagggaccttatgaaatgacatatcagcaagctcaaacagttcaagccaatgccaatatgcaacctcaaactgagtacccttcttcctctgcggttcaatcattttcatcgggtcaacctcagatccccacctcagctccggattcttcactactagctaaaagtaatacctcaggtataactatcatcgagcacatgtcacaacagcctctaaatgttgacaaacaagttaatgatggctataactggcaaaagtatgggcaaaagaaagttaaaggcagcaagtttcctctaagctattacaagtgcacatatctaggatgtccttccaagaggaaggttgagagatctcttgatggacaagtagcagaaatcgtctacaaagatcgacacaatcacgaacctcctaaccaaggaaaagatggtagcaccacatatctaagtgggagttcgacacacatcaattgcatgagctctgaattgacagcatcacagtttagctccaacaagactaagatagagcaacaggaagcagcaagtctagctacgacaatagagtacatgtctgaggcaagtgacaatgaagaagacagtaatggagaaactagtgagggagagaaagatgaagacgagcctgaaccaaagagaaggtaaagttataagctttgttgatgattgataatccatatttttggttttttgagtggagagatcatggaatctgcagaattacagaagttcaggtttcggaactagctgatgcttcagatagaaccgtgagagagcctagggttattttccaaacaacgagtgaagttgataatttagatgatggatataggtggcggaaatatggacagaaagttgttaaagggaatccttatccaaggtaatacacaaaaaaatcatcgatcggtattcctatgaaactctttgaatagcggaaatcggtgatcaatatagctttatgtctcaaaacattcttgctaatattctctttttgacccttaggttttcctcctctaaagattatgatgtcgtaatcagatacggaagagcagatataagcaatgaggatttcattagccatcttcgtgcttccctctgccggagagggatttctgtctatgaaaaatttaatgaagtggatgcacttccaaaatgtagggttttgattatagtattaacaagcacatatgtcccttcgaacctcttaaacattcttgaacaccaacatacagaggatcgagtggtttatccaattttctacagactatcaccatatgattttgtctgtaacagcaagaattatgagagattttatctccaagatgagccaaaaaaatggcaagctgctttgaaggaaataactcagatgcctggctacacattgacagataagtacgtgatccctgggttctaaatgtagaaagtctttggttttagagaattgaataaatttttatttggcaaagtaaggctatagaagattagaagtttattatactatcctctctttcgtctgatgtttgtattgtctactttattcttaaaatctcgcaggtctgaatctgaacttatagatgagattgtaagagatgctttaaaggtgctatgttctgctgataaggtgaacatgattgggatggatatgcaagtagaggagattttgtcactgctatgcattgagtcccttgatgttcgcagcattggtatatggggtacagttggtataggaaaaacaaccattgctgaagagatctttcgcaaaatctctgtccaatatgagacctgtgtcgtccttaaggacctccacaaagaagttgaggtaaaaggtcacgatgctgtgagagagaattttctgtctgaagttttagaggtagaacctcatgttatccggatatctgacattaaaacaagcttcttgagaagtcggcttcagcgtaaaaggatccttgttattcttgacgatgtgaatgattacagagatgttgacacctttttggggacgcttaactattttggtccaggaagcagaataatcatgacctctagaaatagacgtgttttcgtactatgtaaaatcgatcatgtctatgaggttaagccattagatattcctaagtctctactacttcttgatcgtgggacatgtcaaattgttttgtcacctgaggtttacaagacattgtcacttgagctggtcaaattttcaaatggaaatccccaggttcttcagttcttgagcagtattgacagagaatggaataagttatcacaagaagttaagacaacatctcccatttacatcccaggtatatttgaaaagagctgttgtgggcttgatgacaacgagaggggtatatttttggacattgcatgtttctttaataggattgataaagacaatgtcgcaatgttgctggatggttgtggtttctctgcacatgtcggatttagaggccttgttgacaaatcactgttgacaatatcacaacacaacttggtggacatgctcagttttatccaggcaactggtcgagaaattgttcgccaagaatcagctgacagaccaggagaccgcagcaggttgtggaatgccgactatatcagacacgtattcataaatgacactgtaagtcatcataaatgacactggtaagtttattcctcttcattctctagtgcttagggttctctttattttcagggcacatcagctattgagggcattttcctagacatgttgaatcttaaatttgatgcaaatcccaacgtgttcgagaaaatgtgtaaccttagactgttgaaattgtattgctccaaagcggaagagaagcatggagtatcttttccacaaggtcttgaatatttgccgagcaagctaaggcttctccattgggaatattatcctctaagttctttgccgaaaagttttaatccagagaaccttgtcgagcttaacttgccaagtagctgtgcaaagaaactttggaaaggaaaaaaggcaaggttttgtacaaccaattcagtaaaatatggtaaactttgaagttgctcatgattattcctctctttcagagtctggaaaagcttaaaaagatgagacttagctactccgaccagttaactaaaatcccaagactttcaagcgcaacaaatcttgagcatattgatcttgaaggttgcaacagtttgttgagccttagccagtccatttcttatcttaagaagcttgtttttctgaatttaaagggctgctcgaagctggagaatattccatctatggttgatttagaatcgcttgaggttctaaatctttcgggttgttcaaagctagggaacttcccggagatctcaccaaatgtgaaagaactgtacatgggtgggactatgatacaagaaatcccgtcatcgattaagaacttggtattgcttgagaaactggacctggaaaacagtagacatctcaagaatcttccaacaagcatctacaagttgaagcatcttgaaactctaaatctttcaggctgcataagcctggagcgatttccagactcgtcgagaaggatgaaatgcttaaggtttttggatttaagcaggacagacattaaagagctgccctcttccatatcgtatctgactgctcttgacgaactattattcgtagactccaggagaaactcgccagttgtaaccaatcccaatgccaattcaactgagttgatgccttctgagtcaagtaagcttgagatcttaggtactccggcagataacgaagtagttgttggtggtacggtagagaaaacccgtggtattgaacgaacgccgactattttggtgaagtcgagagagtatctaattcccgatgatgttgtggcggttggtggtgatattaaggggctaagaccaccagtacttcagctccaaccagcaatgaaactatctcatattcctcgaggatcaacttgggatttcgttacgcatttcgctccacctgaaacagttgcgccgccgagttcctcttcagaagccagggaagaggaagtggaaacggaagagacgggagctatgtttatcccattgggggataaggagacatgctcattcactgtaaacaagggtgactcctcaaggacaatatctaatacgtcgccgatttatgcctccgaaggatctttcatcacgtgttggcagaagggtcaacttctgggacgaggatcattagggtccgtatatgaaggcatttcagcgtaagtcttactggttgataatgtttgttgaacttaaaatcagatttcttagttgcaaagcgatactaagaaagcgagttttcctttacgcctttggctcatgccaaccaaaatgctttatggtggatgtttatgttaaatgtagagacggggacttctttgctttcaaggaagtttcactacttgatcagggaagtcaggcacatgaatggatacaacaagtcgagggggtgagatatacctggtctattactggcatcaaattttaattcttgtaacattgtgtccttgatctgttggaagtagtttgctaatcctcattactcttgccacattttttgattttctacaggggattgcgctacttagtcagcttcagcatcagaatatcgtgcgatatcgtggcacaactaaggtatgatttctgggttcctgttctcagttgcagctgactcataaaacataatgcatttttgctgtttgcaggacgagtcgaatttgtacatttttcttgaacttgtaacccaagggtcccttcgaaaactctaccaaagaaaccagcttggggactctgtagtctccttatacacaagacagattcttgatggattgaaatatctccacgataaaggttttatacacaggtttgactagaaaaatctctttttttatagcagttcatgtatttcccaagcttctgatttcctgggtcgtttacttttttttcatctgatgtgaaaaaggaacattaaatgtgcaaatgtattggtggacgctaatggaacagttaaacttgcagattttggattggctaaggttcttttccattaataatagatgtttatagtattttcaagtactaacctggtacatcgcttattccccttacttgatacctgtggcattttgttataggtaatgtccctctggcgaactccgtattggaattggatggctccagaggttattgttttaaaatccttcccgctgttttaatttgtcaatacaatgatagacaaacatatcatacatcaaaagaaatgttgtatcttaaactgttacttaaatatgttcccgcatatattgtgatccaggcttgataagctcgaaaatccccggttatgtttccttcaggtctttgattaatctgaaactagtttgaaattatttctattttagtttatagttcttattataactgtgagtatgtaattagtgatcataggtaacagacgcggatgtatatcattttgattgtactttaggctatacttgtacaactgtgtttctaaactgaacataataatttgatcaggttattcttaacccgaaggattatgatggttatggaactccagctgatatatggagccttgggtgtactgtgctagaaatgttgactggtcagattccctactccgatctggaaatcgtaagtcttcaagattctcaaactttctttatatgaaagtaagcaaattcccacaattatcaccaactatttagctgtaaaagtaaatgaacaaagcatttggcacagtttaaatttgtacttctcaacaagtgattttgttttgcaccttcaattgttttgaacttttattttatttttatgggattttgaagtaataattaaaggtcataatttgtgtaaacgtgcagggtacagccttgtataacattggaacgggtaagcttccgaaaatacctgatattctatcgctagacgcccgggatttcatacttacgtgtctcaaagtgaacccggaagagcggccaactgcagctgagctgcttaaccatccatttgtgaatatgccattaccatcctcgggctcaggttcagtatcttcgctcctccgtggatgaggctaattttagaagattgccttcgataggtgaaactttgggctttgttgtcatgagaatatattagaatcaaaagttgtatatatattctaacatatgccctaatatgctttgcactaaaatcgtttgaatcttctgttccatacttcacgttgacaaatcacaattttttttatgtcttttgtttctttttttttgctgaagccaacaaagttgtccatctctttcttgctcattccaatacacatcaaatatagtgaacataatatttcttccaaacttaatctgaaaagtctagactaattaagattaagattcataaatataacttaatttgcacctatttggatatgagggaggtatctgttaatgtctcaagtcagttataattttgggtcgctaacgcatcgacaatgaaaagaacaggaccaaacatcgataatggaaaagtcatagatagagcttttttggggcggctggatccatacaacataatgcatctcagtgttggttaaagtttcaacacaataaccttcagagtcccgtacaaaaactcattaaaactgattgtatataatgagtatttggacggacgattagggttttatatggtttcaatatttataaaaccgaaaaaccataaaaccgtaaccaaactgaattacatatgtttctatatggttatagttttagtaaaaccaaaaaaccgtaaaaccaaaaatccgaactgaaaccaaaccgaaaaaccgtatgcccaccactaagaagtaaagaagagcaaaagattcatagcttctatagttgcagtagtaatgacaattaatatattgtcttgataggattaaattcattttgttatttaacttaatttttcatgttaagatcttattccaagtttatagtttagacaaaatttcacttaattaacgtatccttacaaaaagttatactcatatggaaaaatgaaaaggaatttgaattgaatcaaactgaaacttcatcgaactaaattattatgtttcattgtaaaccgtaaagaggaaaagatgttaacaaagaaaacaaaacaaaaacaaaaagaagaagtaaaagataaagccatacctaaaaattccttttttttttaagataagaatttttatatagatgccaattaaaccccaaactgtttcttaaactgtttctccctttctctaaattatatcaaatagtttcttcatttgtttgctcaaaatgataattgtccaatcgaaacccgaacttttgagaattttttatttttattttttcctttcaaatagtgcatttgagacgataggttggtgacttggtgtgtcatttacacgtgcgtatcgtggaaatgtatcaacaatttacacgcctcatgaaacgtcccttggttaggttggtatagtactttgagctaaacaaaaatataaatcgaacaaaaaacgctgcgtttttgtttccacatctctttctctttctctcttaagcctcaagaaagaaaaatgggtgtgatatctccgactgaaactctgttcttaaagtctcaacatcgtcttcttcaacctcgaaactattcatacgcacttgcttttcacagcactcgacgagttgcgaatttcccacgcaactcattctcttctctaggtttcactttctttctcctctgtttttatgaaatgttatcatttctttagtcttcaattcttgtttttgatgggtttagttctcttgtaggatcatgttctgtagattttccactacgaagtaacccgatttcacaaagtaagtaaaaatctcggctagtaactctgtttttaggagtgaagaagttcaatttttgaatgtttctgatttttggtgtgttatacaatccaaagatagcaagtcaattcatccttggcggagatatgtatccgaatctgactcaaacgaggtaaaccacaatcaacaaaattgcggcttttatcgctttcttggcaagtaacagttctgttttgtttcagctgtatcataagaaggtttcttctattatggaaacattaaagcaagcctactcttttattcctcatggaattctgttaagtacaatattagctcttgtctatccaccttctttcacatggttcaagccaaggtttggatcaacctacttactaatttgatcaaaatcttaattagacatctctctttattactatttctccttatttaggtactttgtacctggcttagggttcatgatgtttgctgttggtatcaactctaatgaaagagattttcttgaagcacttaaaagaccagatgctatttttgccggttacatcggacaatacttgattaaacctctcttaggttacattttcggcgtaattgctgtctctcttttcaatctacctacttctataggtgctggaatcatgttggtctcatgtgttagtggagctcagctatcaaattacacaactttcttgaccgatccttcactcgcggcgcttagcatcgtcatgacatctatctcaacggccactgcggtcctcgttacacctatgctttcactcttactcattggtaaaaagcttcccgttgatgtgtttgggatgatctctagcattcttcaagtggtgattacacctattgccgcaggactacttctgaaccggtgggacatcatctcaatcgattagaattattgtaatgttatatgttagaaagaacaaaaaactaacgttacgttacaaatgtgagtgcaggttgtttccaaggttgtctaatgcaatcaaaccatttcttccggcgttaacagttatcgatatgagttgttgcataggagcaccccttgctttgaatatagattcaatcttgtctccgtttggtgcaaccattttgttcctcgtcatcacgtttcatctcttggcttttgttgctggttactttttcactggtttcttcttcagcaaggcacctgatgtaaaagctctgcaaagaacaatttcctatgaaacaggaatgcaaagtagtcttctcgctctggccctcgctacaaagttctttcaagatcctctcgttggagtgcctccagcaatctccgtgagttttcaatatagttttgttacatctattttcttctattaaccatgtttttgtttaaccggaatttttttatattttgcagacggttgttatgtctctaatgggcgtctcgcttgttaccatatggaaaaacagaaaggagtagtgacatgaaacctaatcagggattttgcggaatttgctgttgtttatggtcggctgttccaattgttttcgtaatgatctggttatgttttcatataaaagaaccaagaatttacccataaaaagtttaaaatgtttccatttttggttcttgattggttctgagacaaaccaaaacagagtcaatcaaccagagtccagagaacaatacaagttttcacaatttactattcatgtccatgtgtaagacttgtgatataaagtttgagacttttatggaaaccgatgtatcaagaaaaaaattgtgtctccggacgagtctagcattattctatattctgagcatcttccttctggcagtaatattcaaatttgagctctttaggttatctcatggtcctttgcttaatcatgaaaagataaatcctttggctatgttttgatgttactcatagacttttagttaactctgacttcatcactggttctatttcttagtaagtaatagctataaactataagaataaccttttccttttttggctctatttactgactttacctttggtcagaaaggcaggagtactggcttcacggataagaaacaacaagaagtttggtttttcaaagtcaaaaacagcagggtttcttgacctttaagaattaggtaggattctttagggggatgtgtaagccagtcatatattgcaggtctcataattgatgattcttccatttgaaacttaaacatagataaatgaaaaaagtttctctaatcacaatggttatgaatcatggtggaagatgatctaagcattatctataaaatttattatttgtagatttgtagatctaagcttaaaagaggaatgtcatgtttgattacatcaattatttgtagattgtaaatattttagtccttgtcgcaattgttttggcagcgtatcttttcatactattgattttcaatacaaaaaaaaaggtaaataaaattcattttcttaaaaaaacaaggtttgtgtttaagaccaaaagtaagatacaacccgtaagcttaaagccatatttgcaaaaataatttcactttaattatagcttaaacaaactaaatcatataaaataaaatttgttaaaattccgactttttcttatatcaatcagctaaaaatgttcaaccatatgctttatgatttatctaatcaaattgactagacttggcaaaatacccgaaacaaggaatcaagccaaatccaatatgaatccgaattcgaaattttaaaatacccgaacagattctaaacatcaaaatccaaaatccggaaatcagaacccgattcaaacctgaacccgattaagtacccgaatatatccaaaatatatatacataaaaataatttaatagtaataatcatatttacaacaatttaagtgtctaaaatatttagattttaagatattttgtatatttttaggtattttacttacttttagattgattcggatagaaaatacttaagtttttctaaaagtttttgtataatttaaaataatttgaatatatttttgtacaaaatttgaaatttttgatatttcgaataaatctgaatccaaactagaaaaatctaatccgaaaccgacgtaaataccggaacgtatatatttttaatcgactgtcgaagaaaagtaagaaacagtggactgtgtagagaaatggtaacaataatagaatgactcttttaacttctaagattcttatttattacgaagatgtcattacccctagataagccgttcgatgaaattaaaagcagtaatgtcacataaacgtcggtcgtaacacatccaacggctaaaaccaattaaaaagcacgccaacactgacgacgttaagaaaaaaacaaagacaagaccgacaataaaaaaaaaaaaagaggaaaccgtgtctcgtggttcgtaaaccaaaccatataacaaaagcctcatttctctcatcaaccattgttgcgtgtttggttatctcttctttcttctctctcacctaaatcaagggatttgttctgatcaactttgaacagaatttacaacaaatccctagaaaaatctgacccttccttcttcctcaggaagatttaagatacttgttgataaggatattcggaagaagcttttgaaatttttggcaaaggtctcatttgatccgacttttctggtaatttttttccctttattgtttgtttttccaacagatctgaacatttttgttacgattaatcaaatttctgtgttcttaaattggatttggggaaattttgagtagcgagatagatcttatcaaagctgggttaaatcgaatttttgtttatagaaaagctgggtttagatcgaaatgaatcatttttgattatatagaagctgtgttttattggaatttgatcaattttgattgtatcgaagctgcgttaaatcgaaatgattgattatattgaagctgggtttgatcgaattgaatcggttatttgattatcatgttatgaattgaagacaaccttaaaaaatgagtcttctggtgtcagatgataaattgtttttgttgtttgtttagttgaaggtgaaatagatacaaaaaaaatgggctcagaggaaaacaacagcacaagctttccaccaacagagccaaagctctgtgataacggatgtggattcttcgggtcaccatccaacatgaatctctgctcgaaatgttacagaagcttaagagccgaggaagatcaaaccgcggtagcgaaagctgcggtgaagaactctttaaagcttccatcttgcagtatcattgcacctggacaaaaacatcctctggaaattaaaccagctcatttggaaaccgttgttgtaaccgctgagccgtcttctgtacctgtagccgcggaacaggacgaggctgagccgtcgagacctgttagaccgaacaacaggtgtttcagctgtaacaagaaggttggtgtaatggggtttaagtgcaaatgcggtagcacgttttgcgggagtcataggtacccggagaagcatgagtgtagcttcgatttcaaagaagttggacgtgatgcaattgcaaaggctaatcctttggttaaggcggataaagttcagaggatttgaagaaaacaaactttgttatttttaagtattttcgttgtcttctgcatttgatcagtttctgcctgggatgttcgatgtttggtttccatgaatcaaaatgaaaattgctgttcttgctttctcggtctctttgctcgtatatcttgtagaactacacgccttgagattggatcaatctatttgctgcgtattggttctgttatgattcaactaaggggattgaacatcatgatgaatcaagagattagtgcggttgttatagaatcagtttagtactatattataagaaaatgtgctcatatgtcatccatgatgaacatgatggtggtctcaattaggttgacgtgttgttgtttcgggactcgggtcatcagataacacagcaaaaggacagtcatacgagagaattcatggaaaatagagatgagattatgtgattaattttcattttggcgatttgccataaatacacaaaccgtcgaagaacaaaagaaaaacattggatatgaatatgatcattatgggccaaatacgggccgaggtgagtgggttctggagctggctcagatgacttacagtaggaagatgtatatgattaatcatagaacttgttaactaataggtggggcagttgcctgataggttatggattaccattacctttataaagaagaagaaagaagctggtgtgatactaagtatgaagactgagacaaggaagaaagactctaattgtaagagagggtcttggctactatctttattttagaactatgtcgttttaggcttgttggtgtatttaagcactgattccgcattattagggtttttataaaaataatcaaacaacaatctaaatatcaatttctcttctcatctcatactctccgccaaaaacggcgcatagttctatttactctgtttttcatttcgttacaagtctcagataggccgtgagcttatcattgccccttctttattttcgaaatttcgtaagaattttaagggattgatttaacaaggttactgagtattaatgtaggcatgtagcttaattctttacaaatttaattccagattttaaatagcaacgtaatctacatgcatcctatactattatttggggggagtacaattttaagttgtaacctttacgtgtaacaaatatacattaatagatgtcattaacaaacatttgtaaccatataatttaacccatatactaatcacgcgggttttcgggttttcatacgggtcaaattattattaatgaaagacttggtaacaaagtagattgagaaagatttctttaacaataaaatcaaatattcagttacctaaatatttatttgttaccttaaaaaatttatgcaatttaattaattaaattgttaaaacaaaaacacattattaatattttaaaaatgattaatcaaaatgaacatataagatttttgatatctaacttaaaatattaatttgttattaatcatttttttggttaaagggaatgtggtattatttttggccgcaaaaataaattttggcggcaaaatttcatatctcattacatgttctcattagatgatagataatttagtcattttgttgaagaaaataaatatttttaaaaatagcctaacaggaaaggctattgttgcaaaaatgcagttaaaaaagttacatttgctaatccccaaaaaccaaaattaaacagatatatttaaaatatttataataggcaacagattaaatataatgtattatatgatgtatgagttatgatccttatacctattttaatatttatattcaacttcatacaactcttttttgaaaatcataattttatatactacaataaacttctaaaacattgtaatctggaatattttaaaatagtttaatttcatatttttaaagaatatcataatatttaacagatcaaaaaattaaaaaattatatctctaatttgattttttaagcagatatacttaaattatatataaaagacaacgggttaaatataatctattatatgataaaaagagttatgatatcctaagtatatcaaatagatggaatcaacatgttttcaaaataaaagagatgatgaatcatataccaacctttatagctatgttaatacagaggtaagtgttgtcgtctgacgtctgctattttattttgaaattgtccgctttaaaccaaattggccaacaaaataactatgagagaacagaaaaagagactaaactggacaaataaataatttttgtcatattaacaaacaattcaaactatcttatatacactacaatcttatctccttcattattgtgaaaacatgattctaaacaaagtaaatataatacaaaaaaaaacataatatgacacaaattctcaaaatttatattataacatttttacttcaaaaaacaaaatttagaatttattgaatgaaaatatttggacatgtgctgtaatacggggcttatgatctattttactataatagttatttccctccgtatcaactcgaaaattcatgtttagaaaactcattcttttcccataattttaccaatatttataaaatttaaaacttcataaaattttaaagttattaatatttaaaactttttataaagtttttaatatataatattttgaaatttttaaagttttagttatttaaaatatataaccggagtaaaccgaataacacttttaatttttgatatctgataaatcaagttttctgctaattcgtattgagaattattttggtctttttataatataactctaaacgatttttcaattatttaagcaatgtaagaccttgtaatagatatgaattatatgtttgagtattatatgtttttaaaaaaaatatgaattacatcgtacgcagaaaaatctaatattttattaacaatatgtattttatatataaagtcaaaataatttagatataagaacaaatatagtgacagaaaattatatatttatttaatgtccatacaaagattttaagaaattagccttaatcgaatatagtttaataaataaatatttaattaaggataaaatttttggaaaaagttaattcaagtatttaatacaaattaatgatttgtaagtttttatgaataaaatatttgattgaattcaaaatttgtaagaacttgtatgttattagtaaatagtgtagagattttttggtcaaaaaatctaccaaaaatgtatatgtagatagtataccaataaaattgccgaatttataatatcaatatactattatacatcaagtattagcctaccaaattttatacttgaataaaactaaaaatatatttaaatatatcttctaaaatactacttctgaaacttttagttattaagtaaaattactttaaaaatatattatctcctattgtaacaggggttagaacctagtataacattaaaacaacagacttaccatatgtgatatgtgtgtaatcagttgcaattacccctccttaaaaaccacacttatggcttaccctaatatctatatacagtgctatatcttttatagaaaaaagttgagaattttgttttgtgatgttaacattttgttttacttacatattttcacgtaaaatatgcgtaatttttgttttgttttatccttctaaatgaagttacttaaaacttatataataaccatatttaactcgaagttggcacctttacccaaaaaaaaaacttggatatgggagaagatgatcttaattatctaaaataccgtaagatattaataacaaaaacatctatgggagttgaattacaatagttaaagtaataacttgaaccaaaaataattttggataattaagtaattcttgtaaacgagcaaaacatacggaacataattaagaatcaaattcatcaaagaaatctcaataaagtaaataacaacttaaattaacctcacataatcaaacattaaaaaaaaaagatctaccactaaaacgaacccaaaggaaacaaaaaaaacaaagaagaacctgaaaaccatctactgaattgttgatcttcaatattatcgccgtcttcaacttcacgtcatacttcgtagacctccttttaatgattccatgttagcttgctttatatatatgtaagatctattagtaaatagctacatatatacaaatacatagctatatatgtatatattccattgatcatgtatatataataatagcaatctaataatcaatacggtggccgacccgtagaccaatactgctgatcattctgttgtggcggtggcaactgaaccgaaccaagaagattcggtggtagtccttgagccgccgccatagctgccatagcttgttgctgtcccatcatcgggggagatcccattccaccaccacctcctcctcctccaccgcctccttgaactggcgtctgcatctcatcttcttccaaaggcagcctttcgtacgccgcattgctaaaagaagccgccataaccaccacaggacccgaacacaacaaaggtcccaccacactacctccaacgacctgcccttgtcctccggctaggtaaacgcttagtccggtggctgcaggcggcgcaggcggaggcaagaaagatcccgaaagagagaggatttcaaaccggccgtgaaggctaaccaccgagccaggtggcgatccaggctgacgtatagtgacgttagtaacgcttcctgtaccgctcataacgcaaacgcctctttggcggcgtctagcgaacgtagccatacagtcaactatgtcacatccgtctcctatctccatgacgtgagttcgaagcgcgtttgcgctgtctcttgttatgattattggagctttaggtttgttcttggatcctgctggtcttcctcttggccttcttgtcatctgttctccacttcctccaccaccgcttcctccttctcctccgtgtaaactcatctctttaccttcgctaccgctgttggtattagcgatgttgtccatgttatcgcttgtctcttcgcgatccatcttgatagatctattcaatattgaccctccttgctgctcgtgatcttgatcaaggtttctttgtggttgctgatgatggtggagaaagaactgttgttgttgttgttgttgatgttgttgttgatgttgttgttgttgttgaagatgtaattggaaatctctagcatggaaaggaggaggaagagagctttgtgatccatgagattgaactggatccattctatgttgagatgagaattgattttgataatttgacctaggagagactctagatagaagaggaaaagaataataatgttttcacaaaatacatcaagctggaattttgttcttcatcttattctttgattgatttggtaaggttttattttctctctctactcttgtcttctattctctttttctctaggtttgtttatagcttctcttctgatttgagttgtacttggaaggaagtgaaaagggcttttggctggtttttattttcactctcttcttttgtaatttttactttttagtttatttgtgatgtgttggtgttttgaggtgtctgtgggggttgtctacttaatttgctttggttggtgattggtaaattagggttaagatctagagagaggtagaagagaagagagatgtagagcttttgtttttttcttgtgcttatgataatgacatcattctcatgttttaggcggtgctttggtccccacttctacgccatttgttttggtataatatttcaatccctctcaatttcgataagtatagattttatgcttacatgataattgatttgtaatgaaaaatggtttgaagcaattttcatataatgtaaaaacagttttagcaccgatttgtaattttccgcaacgtgtatgtatactgaatagtaattaagtactcctaacatcatatatttaaatacgtatacattaagtatatgttgcacacatacatatatatatatgtacgcacatgtaattggttttctctataaaaataagaatcttctaacttctagggcaactaagtacaaagaagtgagatatatacttgttttaacaaaaactaaagaatttcaggcgcatgagcaataaagtagataaattgtgtggtataatatactatattaagaagaaaaaaaaagatagaggatgcaatgtggggatatggcattggagagagtgaagtagtaagaagacgcgaagaaggcgctgacaaatctcaaacccaaagggagaaagcacgagagagagagagacaagagattgttgaattgaatgtgcaaagagagagagagaaggatcggagaggcaatggcatgactcttgtggacgcaaacccatgtcttaaaagatgctctttgtcggctctcatgctcttcccttctccacgtgcccttctccttcctctcgtttgcattttggattagcaatggaatgctcaaaatatgtgtgtgtgtatatgtttttgctttataatttatctaagttatgtagttgaaaattttatttaagcaaaatactacaaattattaactagtttctattaatttgtgcaacttttcaatgactaaatctagtattcttttggacgtaaaataagactaatctatttgtggtacaagtctaatgtttcatgttgttaatgtgatgtaccattttcatactgcatcaaatgtgccaaatacttaagaccttaatatcgaaggagatttactcgttacaacacttagaaacaacacagtaagcggttcaaaggaatagttccattgtaaagatctacgctatacggttttattcagatcacattcatgatggacagttaactctcttttacattttacacacaaaatcatcatgaactactctagtttcatgagatctccacaatttgtaataattaatttacatgttatggagattacattccgaatctggcgcacaaaaactaagcctttggttactggaataatgcgattccatttcagtattatttaaatggttaagctattacagtttctacataaataatatattacatctacacatttggtcatccgatccgtaatcttccaatattagcatatctaatagtttttcttttctttatatagcatatctaatagttgggtatacctctattgagttacattaattcacatgaaaacgaaaaaagaaagaaccaatgaatatggatttatacttcaaagttgttttaatacactatcataatcgaagttctttcctgtattttacattaaaaaaaaaaacttattgatgatctggaccagcttatatgagaacatagttggttgacaataaaagcaagtttatacgagaacacagttccaccaaatgaggaaattgctgttgatgtttgactttattagattgatatctaatctcaaatatgaaaatatgactcataagtaattagaacatttggttatgtacgaatccaaaattatatgcatgtacaattactcgctcaattgtgttaatcttaaaacaaccaaaaccataatgatagttgataaatggttctttcactttttgaattttaagaatgtgattccctcattagattaccatgcatatagcaataatagtcattatcttatattttggaaaagttagtttatcatctgttttataacattctttttaaacaattatgattatcatgcaaacactcttgttttaacaattactaccaatttaccatgtgtgtattatcttaaattcacaatgcatatgacgtattgatgatagtaattattattattatcttttcgtttacttaatttgtcctccgtatatatatactactagcaactacgtactaatattcccaaaagagatacaaattttgttttctgtaaaacttccaacaattagttggtttgataacgattattgatcccaatacattaccttacgtcatagtttttgaagtatgattattaataatcttacgaataacaaaatcaataaagtttttagggaaatgaggtcactttgtattttctaaaactttatcctcatcaaaaaaaggcatgacttttatttatcagaccagcgtttgagttctgaagctcgcaaaaagagaggacaacttgcttttaatctcgaattttacggattattaattgagtagtctataaatctttgtacgtcagtatatgtttaaattgttaaagtatgagtattgttaaaaacatttgacatcttactttgtatactataatgttctaatcattttgtgtgtcactatcccaaagttcggttaaaccatttttaatatatcatgacatgctctaataaattatatagattattaaagcatctaatatagccgaaaatagcatttttatttaacatttcaatagaaagaaaatagcatctcacttatctatttacaaaatcgtttttttgtttgaacttcttcgaaagttttttttactgcaagtgtattatttaatcatatcaaaaacattttttatcatatgatttttatcacaagaatcttgcagtcaattttaatggaaaagtacaatatgtgctgaaaaaacttgaacctatataatacaagagatgaggatgaaacaattgtcaaactgcgtcagatatttgattatatcctcttaatttatgtattttccaatttgatactcttaaaaatgtaatgaaagtactcaaactattttctatagtatcacttatcgatactagaaatgtaaaatagtgaaatttatttgaaaatcgagtaaactattttgttggtataataactttaaacaataatgaaaatgtttatgcattttaattagatagaaaaaacaatctacttatcaaaacttccagattatgcgttgtcaaaagtaaaattcctgatgaagacaagaaaagagtaaaggcaaaagacagacaatatattggtaaaaggccaaagggatgcaagcttgtaaagcatcgaaaaattgtgatgagaactaaaactatagcgtaatttgtgttgcccacaaaagaaatatatagattaggtcacatattttaagaaaaaagaaaagaagaaaagttaaaacaaataaatgaacctatcactttagaaggaaaaaagtctatgtcaaattgaatatgtatataactgtatgagcaattgagcacaacttggataaattaaataaataaagaaagttggtagattatgctgattaattaaatatttttaaaattaagtccccatgtggatggcacctaattgcctcgaatcttatcgtgcttatgctttcctcacgaattcaatttattatttatggtcccctcccagccaatgtaaataaatgtttttgtagtagtgattaacacatataattacggtatgtcatcaatcaattaattaccatcttttccaaaacaatggcgtttatatttataggttttgaagtttttattttgacattcttattttatttcttatatattaaagagttttttatttgtggctgctttgagtcttgttcagttatgaatgaaacaagtctttagaaaaaaaaaaaagagagagagtttatctagatatttaaaaacatataaacaaataagaaattgtgcaaacggagtccaaccaaaaacaaaatttgaggtcccaaaaattaaaatttttgaaattatttaattagttttttttttggaagtcttcagatattaaacatacatattatcagccaaaaccatattgaaacatatcgaccgaaaacatattaattagagtaaagtctcgatagttatggatgggttcttgagcaagatatgatccttcacctcgattgagctaaaaatgtcatgaaatgttaattcctattttacgttgaagttgactatttgctttgggcaatacataacttcattgggtgaatctagggttacattttcactacttactctaatcttatttctatggttgataattttgcagagtggcccatctttgcagaagagatgatcacttttcgatatattcttatcacttttccttttttaagatgttttttttgttgtaacaaagttcggtttaattgtttagttaagaacgtgtgtgtccctgatattctctttttccatacaatctcatcgattcttaaacggctttttttagaagaaagtttattttcgataacttagtagttgttgaaaaaaatgaaaaaaaataataattctaaactgatctgtctttgagctgtttaataaatgtgacctccaaaacaatctgtttaataaatatccgaaaaccctaattaaagttgaattaaagcctaactaatcggtggatcaaaaactggattaggcacaagtattcatgaaaagtcgtgataataggagattaatgtcaaagtggtgggggcgtgtgagttaaaaaaatgattaagagaccattagtagagaattaagacggcatcgttgagacttgaaagggggagacaaaattgagctaaatgacaaagctaaagctaaaaagaacttgcatgacatgatatatatcaacggtgcttctatccatgatgaatctcgtgattaataaattatttatgtcttcttaatctcatattatttgtctactgaattacaatcacttcatattcacaacatcttgcatgggtgatatataagggaaaagctatatacaacaagtaagttataacaatattctacaatccacaaaagtactctgagtatctgaactaacataataaatgactttggtacgaacaatacttacaagttaatcgtccaacctttcaggagctctttcagggtcaaactaaattgttaaagttcattatacagaatctttgtggattttcattgccaaagactaaaaacaatttctttttggtttgtcattcacatggtgctaactttatgttcctgaattatattattcttaacatataaatatttttcaattttggatagcctgtacatatatatatactgttagattgaaaaaactaaaaaacaggcatatgcgatgatgattaagatttttaaatctaaactaaaataaaactaatattacaaaaattaagaaaatatacaatttcagatttagggcttagtttatatgattcagaaattatttttcttagatcagggtttaagatttcaggtttagttttttttttttttgatttagaattgaaagtttaaaattagactattttattgatttaaataataatgattttataaaatttggtataaagttcaaattttaattttagtacattatatttccctgcagatcataaacaatgattctctatatcataaaaattatagtagatgtggttggaaaaaaaaatattgtagataagttccagcttatagtcttctcagattagtgactacttattaataaatgtaccatgtcatagtactaagtactatcatcatatatagtcgagggaagacattaataatctcattctgagctaaaccgattacctcaaatggtggtgggctggtagcgatgacttatggcgttgttaaccgggtctgttccccggttcaagcctatgatcatacgcttcaatgtgcaagtttattgagcctagtgcaaacacatcccaagggaactttatagagcaactcaacttacctacttcactatataaccaatcacaaattcacaatgtaatcttgaacagcttcataacaaagaaggttttcttaagcccaaacaatcttattttcacttagatagaaaagtcctgtatttctatattctaaatctcgaaattagtattcttcttaaccttcttgttaaccaaaactccaaaattttatatttcaataaaacttcccatccttcttgatcaccaagtctccaagattccattccatttcttaaaatttctctcttttcaaatcccaattgatttgactctaacgttactatctataataccattgacctaatgtacgcaagtttggctttcaagcctagagaagagcttgaagggtctttaatcaagatttagggtttactcacataacattgtaaaatcgtcaatcgtctagataaaaaactggcctggggaaagaaatgccaataacaactgaagtccagaagctatatagcaagtaaagcttaaggatcaagtgttagtagtttttgtgaaaaaagcttaaagtcttaaaggcgaaacaaagaaccgaaaataagaatgagcaaagacgaacacatacgaatattattgcaaacagcaactatgaacttggagattttgcattaatggagaaatgatatggatgtaatatactattcatctaaaaagccagattcagaggcaaaagactctaactctttagatttctcatcagtgaaaccaagagttgccagtatcttgtgacctggagattcaacttcagaccaaatcccaagtagtatatgtgctggcattacttccccgataccacctgtaacaacaagcattgaaacaatggagcttaagagtcagtcttgaagtcgaagtaggcacatctgttaatttcttagtttatactagaaaaaatgactagccaacgacataaaaacttctgagtaaactaagaaattaacagattatcaatcagaataaactgttctccaaatgatgttgctctcacgacaacatttatcaccatatgcatatactggagaatattataaccaaagctatctctttgttgcaagatttataagccaacgacatgaaaaactttggactacactaagaaattaacagactctccatcagaataaactgttctccaagtaacgttgcttaccgatgtttatcattatatgcatataatggaacattttataaccaaagctatctctctttcacaagattgataagccaacgatatgaaaactttctagtacactaagaaattaaccaatcgatataaaattttctcctctcacggaaacattgatcaccatatagcagaagataagtttcacaaagttatagagacagatcaagctagaacagagacaaacctgcttttagattctgatccagagcagagtcaagtgctctttgagcatcttcagttaaaggaggatgttccgggctaaagaaatacatatctgcctttcctagtaacttgaccgtttcttcacgcactttgtaaagcataatcttattcgcccgcaaaaactttgaagtaaaactagttcctgctcatcaaaatcaaacactatctcattccaaatatcactcactaccaagatcctagtaaccttttgtatcatctcaagcaataaaccagaagtaaagtaagtaagtaccttcaatcaaaatacccatgagaagtgcttcagttccagtatttggatacttgagcttcctagcttcaagctctcccattgcaaatgatttaattgccctccatgaccatctacattcacaacattaccctctaactttctttaaaaacctaaatcaacccaggaactttaaaaacaagcaattcaattcaatcttaggtctacaagaaacaacacttacttgggctttttcgcatcagaaaccactaaatctggattcctgcaacaaattaaagcacataattgaacaaaatcaaccacaattgcgaaaatggagcaacataaaattgatcaaaatcaactaaaatccgatcaaaactttagaaatttacgcggtgggtaagctggagatggcggatttatggattcttcttgggcgattagtttgtagagcggagactggagaagtgagagagagggatgaatcaacaacgcctaaccaaggattcgtcaatgcttttcttgtagagaagaagtataatggaacagatagtttcttcttagagaaagaatcgatttgtgagatgatcggattcgtcaaagcaaagttgcaagaagagtgagccgccattttcgcgagtgtgtctggataacgggaaaaatgaaagaacgtcaaattgggaaaggagaagaagagtcctggagaatgacgattgtcgaaacgatatcgtattcgttttataaatcttaaaactttcttatatgggcttaaaagatgtgaataaacccaacacaaaataagtttagttttgggcttattgcttatcattaaacgggcctatcaacgagtgaaagagtcaaaaacaaattttatcacaagacaaaaaattcaaatagtcaaaaagaaagtgaatgctgaaacctaatttattttctcacatatgtttgaatacgaatggtggatttcatgttttcactctgccttttaaaattctacctttcattttctaatagacacgagttaatgacaaccattagctttatcattaactaagttgattttttactactccgtttaaaagtttaatgccaacacaaattcaacacagttttcagaaaagtaaatccactatcatagtaaaccattgttagcttggaacaattatatatctttttagagaaattagtctcaaatatgattgggagtgagacaatctcggatggttgtatctatttttcttttactgaaaaatagagatttttttttttatgtcaatgctttttcaaaagtaaaaatctctatttgttagaaaaaatagaaatttttattttttattctatatataaaaaaactctattttagagataaaactatagatgagttagaatgaaataaatacaaaaataaagtatagagataaaaatagagatgagttggaaatgatatgaaggaatagattagaaagaatctatatatacatttttgcagccattttcgcaaataaatcctagacttgtacttatttacaatctaatgccattagcattaaatcttttttccaaaataattaattttactttaaatttttgatttaaattgtcaatcacattatcaatcaaatttaatcccaacaaacttcaaatcaatctcttaaaattagcataaacatatttgttaacaatattttaaaacaaagttttttgttaaaataaatattattcttactaaacgttttttgtttaaataaataaattttgtatttgaacttatttacaatgtcatgtcactgacattaattatttattaatgaaaatatttaattaaagatttaaatcttctaaatccttacttttagagttattatgtcattactttgtaagcaaaaatattattttttaaatattattatttatatatttaaaatttataaaacattattaatatttaaacttataaaaattttgatatatcataattttttaacatcagtttaaaaaaatcttaatttttgccgtcatattttatgattcaaaattttaaaaatgaacatatattaaccaattggcaaaaaatgtgtgggttcaacgtcccgcatcgacaaaaatatttagacaataatttataaacatatcataaataagatcaacattaatataaataaatgggttttttacaggacgaatttgacgggacgagtttggcaggacgttacttaataacaattgtaaattataaaataaaaatatattatagatatacaatttgcaaaaaaaaaattatactaactttaaaaagataaattgtctccgcagtgtaccgcggattaaaatctagttagaaaacaaaagcgttgtcattgattttattctattttaatttatatcgaatttttttgatatttcaacactaagattttttcacattttttaatttaagaatcttgaaattacttattaaagaaccaaatcaaaatttctaaagctctagttccttgacaagtggcgttgtttaagattttaaataatcctaatatctctagtaaaataaaataacagccaagtacgacttttttgtattcactctctctctcaaagattccgtctatagaatcattttcacaattagaaatccgaacccaaactcatcaattttacaaattctctcttatctctatggatcgtacccaccaacccgaatctccgacggcccgacccggaaacaccgtggtcctctcaatcgattgtctaaaaggaagctctaaaagcgaagaatggagcggcgatatgcttcaaaccggagacatagtagaagagatccggatcgggtcaggacccggttcagctattttcaaagctccgtttaaaggaggtaaagcttggcttcagaaagttttacacaattcttttaggaataaagaaacttcaatcgtcgtcagagttcgacgtggctccgatgatttctccgatctgtctgcttgtattgttcctaatgaatccgccgggaagagacagtatatgcttagatccattgatgacccgaattatactgttggattctcggatcgaactgagtcggattgtctcggtttgcaaggtgagttaactcggtcggtttaaatatcttcttgtcttttttgtactttggttgacttttctggcttacgtgttgactttttcgtttgtatattatgtcgtgtttctcagttggtgaaaaatcaattaatgttgtttttcttaacaagtgcgattttattgttgatcaaaaaaacataggtttaggtttaaactttcataataaaatgatgtttttacatagaagaagcatgttttgtgtatcttgcaaaacaatcaattttttcatttgtttatacactttggagttattatttgatgattaattataaaccaagaatcttactgttttttttcttatttttatagtatatattaagaatcttactattttagaatgagagaatatatgtatacaaaataagaatgtttttatggataaaaaaattgaatgaaatgtggagatgcggggtatcgatccccgtacctctcgcatgctaagcgagcgctctaccatctgagctacatccccagtttgataaataatgattgcagagtcaagaggatcaagaatggtagaagcattggtgaaagcaaagcttcaagatggttatgtttcatatccatgggaaagacgaatgcaagaagctttaccaatctctggttccagcaatttcctctccattctttttcttcccaaagcttctggtaattaaaccaatgtattgacattagtgttagtcacacattcattttaaataatctctatatgtgaataatattgatgattttttttcgaatatctattagcttatggaaggacaggttctcggtacaatgacttggaagacacgcttgctcgtgctaatgcttggttaagttgttcacaagctaatggtgttcccattgtttttatgaatattcagactgaatctttgctcactaaggttagagattttttgttttgtgtaacattgtttttatgttgagagattaatatgaaaatgttgattgttttgtttcttatggtaaaaagatatctggagaaacagcgtcggcgacggtgaatacaacatcgctttcggatctatcgaatcttgcaaatacgagtctatatgggtttgaggattatcatggagttgatattggtgtggtgagagcggttcggctttggtttgctcctcttggtgttgagttcccacttgaaatcaaactcaaagatgatgataccaaacttggcttctccattagccgcaccgaagaggtaaaaccgtaaaagtccgcattgaacttctgtatctaccagacgaatcatgttctttcgttttatgaagttatgacttttagatgttttcacacacgatttctcgttctgaagtcatacaaaacattttaacatttggaaacatttctggtacagggtttcatttacgtgtcatcagtgacggaccacgaagacgagagtgcaccagctgcaagatccggcttgagctcattgtacagagaagcagccaaggcatcacgtcgtctggtggtttctcgtgtcggtaaccaaaaggtattgccatggatggtgtcctccacaggagcaattcgttgctacgacacagtttcgctcagccagaaactgtcactgcaccgtcacgctaaagtccacataggcctccatgtcttcctctgggactcctctgccacggcagatttctcctcgccaccaaggagtagcagcggtgggactcacttgttgtttagtaacgaaacgctggattccacggagttcccacggtatggtgaggttttaccgccacgacaagtcggagacagacaggtgatgccgttgccggatgaagatgtgtttaggtttgaacgtgaaaatgccggtaatgcttcatttaaattccaagagattcctttcaccaacgagtctttgtgatggaaatctacttttgtttttttcgttatgttatattttgggagatatgttttgatacgtgcatgtaaagtaattggaacactcgaggagatgaactaagggtaagttagttatatttctatatttagtttgctccggtgatagatcatggatgcttgttcagttgttcctttctttgtaatggaaggatttgttatcttcaactccataacatgatttaactttatataattatatattcatctttcagaataatgaacaaaaattgtcgacaaagtcaatagataattgaaatgttttggatttgtgccgaggtttgaggctaaacagagtaaaatgacaaagttttatgggctctattcataacagtgagtgggcttatgtataaagatttgcaattgggatttttttcaacaaatgtcaagcgtgatatatgtgtaaatcaacgtcaactattttgtttaatactataaaatattgctttaaaatgaatcaacgtgtacttacctagaagattttttttattaatttaaaacaaccaaataaaataaaattgagaagtaggaaaatattacatgtaatatttaatccttgtaattgagttttggagtggcaacaagtttatatatcttttttaaagcacgctgataatttttttattttgttataaaaagttcacatgatgggtattgcaaatattgtcaatttgtcatgataagattttttaataaaaattaagctatattattgtttacttgtgaccaattgaatttcaccagaaatgaacatgcgatatcagcaccaccacctaataataaatgatataattgcgttatatttccttttttcttcgtatgactacaattcacacgaaaaaattatgggtttatcttattatataaagtatggttttcaaagttactaactcataagatcgcgccacgtatcaagtcaaacgatcagatgtttacatgtgtcatttaaaatttaaatttttattctcttaaaaaaatagaaaatcttaaaaagtaaacaaaattacatatactaatttatatatctatatctttataaacaattaacatttattcaacaaaaggaaaattaacaaatttgtttttaactaatgtaatcgaaaatagaacatacaattaacatttattcaacaaaaggaaaattaacaaatttatctttaactaatgtaatcgaaaatagaacattttgagaaaaatagcttagcttataggatttaacttttcaattaaaattaacgttcgagattacggcatatataaaaaaaatatttttaacaatgtttggtttcaaaatatttttgtggatctgtttttttattaattattagccctacgcgtttgagtattcgggtcgggtatttcgggttcgggttttcgggcttagaagtttaggacccgttcggataatttaagatttcgggtcgggttcggttcgggttcaagtttatttatatattgaaatatcaaattttgtctgcaaatctattaaattagttgaaaattttaaaaattcccaaaacaacacgagtagttttgcttgaatatatctaaaaatacacaaaataaaataaaatatccaaaatatcctaatattttctattctattaaattacttaaaaattttaaaaattcccaaaacaacacgagtagttttgcttgaatatatctaaaaatacacacaaaaaaactaaaatatccaaaaaatcataatattttctatatataagtataaatataactaatatatacttatatttaagatatgtttggatacctattcgggtttgggttcgggtttttcgggtttgaagtttagacctgttcgggtatttgaaaattttgggttcgggttcggatcgggttttttggatcggtttttcgggtttgggtattatgcctaggcctattaattatgtttttttaattgttaattatttttaatactaagtaggatatagatttgatatgtcattaatataattttgatatgaaaatgttatcactcaatatgaagtgtgtagaatttaaatcgagtttattatgataacatagatagttaaactgtattacaaaattgaatggtgtaagatagaaatttgttttttttttttcttttctagatactaaatgaaatatagaataatggtcggttactttttagaattcaaatatcattgataagattgagtgtatataattaaaataaaatgcataagactgaaattttgtttaaaccaaaaattattaaattaaagatcagaaaaatatatagattggtatacaatattcaaatattatcgataaaaaaatatttttctatcttacacccgtctaaataggcggaccttatctagtatatatatatatatatatatattttgtaaacgattgagtaaaaaatgtttggaaaaataaaatgagtgacttaaaaatgattagaattgttttaattcctgatagagttagagaagatttatacttaccaaaacaaaagttaaagaacatttcttatttggaaatatttttccagattatcaccaagtttaaaactatttttataataatataattttaaagaaaaaaacgagtcttctccatctgaatggctgtgtttctcaatgtatttggacgaattagagaacgataaaaaaatattcacagattttttaaaaatattgaatctcttataacgtaaatgttaaagcggataatttgacaagaaaggttcatatccaaccgcattatatcatatatgtaaacaaaattgctcagaaatgactatattaaactctaactaatatcggttgacaacaaaataatcaagtacttgattccatcaattgaaaatttaagattttgatttaaacattaaagtagaaaatctaaatagaattaaaataaatacttataaagttataatgtaaacttcttttgctttctgattttaaatgggctcagtcaaatcttaataatatttatcttttccaagagctgtataatgataccaagttaggtcagaatgccgaccacaattataaatgaaaattttctaaatgtaaaagccatgtgaaatcaatattttactccatttctttttaaaagagaataaaataaaataaagtcgcggaggaaatgcacatcgagcacatcactctaattattttatttaacagaaaagacttatttaaacatggtaatgaaaagaaaacattagacgattaatatatggttcgttcttatctaaactctggttattttattaatcttcatttttctgcgaattagatttggatttctattggtcaatgactcgatgcttggtggtcccaaataaaattgtattaaaataattttacgattcatgattgcttccatttcctgtaatttaattaaaatttgtgttcatcaaatattttatacagattgagagaattaaatgaactttcattatattattattagctaaaagagccagaaaaaaaaaaactgaaaagaaaagaatatctagaaattgattttagtaggtcaacattatttatatttaagtaatctaaaacttgtaactgaaaaactacggattagagtttattactgctgttttcaaatgggcataaattagttgggtaagctataattgtgacgaagactttgggaaatgtaaaaggaaagaaatgaatgtaaagcaaacacaaaacaatactccaactaattaaaagggtttgcaaaataaaagcccttcggatttccacaaatacacgaaagaatataaaatggtactgtagtaaattctaacaatcagattggaattcaattttcagaaaacaattttatcgaattaagtgtttaagcacccaccaagtattccatttaattactaatttgttagtaccattttttttgttatgcaccaaattaattacaaaactctataatcatcgacacagtcgacctggtgatctacaaaactttaacttttattccggtataggttttaaaacattgagtaaaagtgaacatgtattaggagattcatgttcgtcgtagataaacttgaccaacactacatattagtatattaccatctcttgactcgttacatgtttaaacatttcaatatacctaggtttttaacccatcatcgatcacgtttatgtcctattgtttgttcagtggaaagaattgggctctatgtcttacattgaaaattgaaagaaatggataaattgggagttagatttagatgttggttcttttaagttattatagttatgcgatttaatacgtttttgctggcctcatatattgttagatgttaaattaatttaaattatttccatactaaatgatttatttatcattttagcagcctagttttacttgtcctttactccaaagcccgattattaattaaggaaaaagtatttttcaactggagaaattgaatatttataaataaaataaagcacacgtaaagaaaatatattttattatttttaagaaaacaatatacgcaggccatctttgtctttcccaaaaaaaatttaattgaattttgtatacccactttaattttgtctactatactatttcttattttattatgtatatttattaattccctcccatcggattccagctaaaaacacgaatatctatatattcctaaatgaaaatttaatataaatccagtgcgagctatattaaaataatcacgctattaaagatttccttttcgcattattgtataaaagtaaaaaaatggacagacataaacaaatcttacaatataaaaaatcattatataaaaagataaaataccttatttaatgacaagataaataaaccattttttatttcttcaatctaattcacaaagcataaataaatctaatttccttcactttcctctccaacattttcttattttccttcctaatttccaacctctgttcttagcaatatattttttctccaaaaataattctcagtttgattttcttcttctagctcttaagtatatttctttgttgttatttatcttttaatcctttaatctcatctttgtttatctttaatcaaaacccaaaatttacatgggttcttgaaaatctagaagaaataaaggaaacataacaaaaatagaaagaaaaagaagctaatggtcttaaatatggagtctaccggagaagctgttagatcaaccaccggtaacgacggtggtattacggtggttagatccgacgcgccgtcagatttccacgtagctcaaagatcagaaagctcaaaccaatctcccacctctgtcactcctcctccaccacagccatcgtctcatcacacagctcctccgccgctgcaaatttcgacggtgacgactacgactacgacggccgcgatggaaggtatctccggtggactgatgaagaagaagcgtggacggccaaggaagtatggaccggacgggactgttgtagcgttatctcctaaaccgatttcatcagcgccggcgccgtcgcatcttccgccgccgagttcacacgtcatcgatttctccgcttctgagaaacgtagcaaagtgaaaccaacgaactcgtttaacagaacaaagtatcatcaccaagttgagaatttgggtaattatatcttctttgctctgttttcttctctgttttttaagaagagtatttaagaaagaacaaaagataaaactatttttatcttgtcggaatcttgtttcgtagaccaatctaactctattgacaaaaaaaaaaaaaaatttgggtctgggatctcattttcatgcatgcttaagtaagtggggtctctgttttgtttctatgtttaatttgtctatggttatagatgtgtcctaaagctacaagtatctacacatatatgtcatgttgttaattgtcacttcttaaatgcaatactaagcttaatttagtagcagttttataagttaaacatgttggtcaaaattagagatttttgttttctacttggctacttaaatttagggacaacaaagtacatgattagtcaatattacaaattaattaataaaaatgttcctcttgtgttctgttatgtgtaggtgaatgggctccttgctccgtcggtggtaatttcacacctcatataatcacagtcaacaccggcgaggtaatctcatcggaatttttctttagatctagacatcaagtccttttttctatcttttacaagttttgaatgatgtattttggcataattaggatgtaacaatgaagataatctcgttttcgcaacaaggacctcgctctatttgtgttctgtcagcaaacggtgttatttcaagcgttacacttcgtcagccagattcctctggcggcacattgacatacgaagtatgtagatttcattctcatcgatcgatcaaatttttgttgaaagtgtaagatgatttatagtgttaattttcagggtcggtttgagatattatcattatccgggtcattcatgcctaatgattcaggcggaacacgaagtagaacgggaggaatgagtgtatcgttagcaagtcccgatggacgtgtagtaggcggtggcctcgccggtttactagtagccgcgagtccggttcaggtacgatatttgccagtccaaaaagctgcaaagtttgttaaccggaggatttaatttccttgtgtttgaaatcaacaggtggttgtaggaagttttttagcgggcactgaccatcaagatcagaaaccgaaaaagaacaaacatgatttcatgttgtcgagtcctaccgctgcaattcctatctctagtgcagctgatcaccggacaatccattcggtctcgtctcttccggtcaataataatacatggcagacttctttagcttccgatccaagaaacaagcataccgatattaatgtcaatgtaacttgaaatccaatctttctctgtattttctgttaacaagtttgatttggttgtttatctacattaggattttactaaaatggtagtattatttatagggttttagggtctttattttggttccactgttgtcacttgtaggataatttctatctttttattaggattgaatcatcttgtttccttaattttttgctaacgagtcatggtcctggttttgcatgtcattgtagtttcatatccgtgtaaaagaatacaaattaaccacacttgacttatctgaacgcgtaacatgaaagctatggagactaattttggagttctagatttccatctcttaatgtacacctaagatgtttcttatgatgacacaagaaccattatccctggagagaaagaatcactatctctatttcgacaaaccatcaaagattctattgacatgatatctacaacatctatagttcggtgcacactggacttgcttcacttgtttcaagaggcacaaggtcatatagggagatcttagcctagaaccttaaaatctaaggatcaagagttcccaaacatgtttcaaaactatcattcacacttatcacagaaacaaaccgtcgagattacttccgactttaccactaatctgacttcaatttcaatgtatcatacacaagctagctaccataacgatatacagggatactcactacacagcaagtttgtgaaaaagtaatctttcattgatgtgcattaaatttgtactcaaaaaaataagaaaatataacgtttctgaatatagcccataacaaaaatgctgaaacagaaaaatgaagaactacataaacatcttcgtagtcaccaaaatccattaggaattcgatcttaaaatgtaaaataaattgatgtagtccggtggtttctccaaccttagatgtctcctaatgccgagtggatcaaccttaaaccgaaaagtatagagaaaaataacaatttggatttagcttcgtaaacaatggagatatgaaaattagtagtgatatatataagagaaagaaatgtaccaataggttgtgataaaaatggagagagctatatgaccaatcttgtacactcgtttcttttgctcccatttatttgtgttgtataactctgttacgtctgccaaatgttccctcttcatgtatctttaaccggaaataacgaagagacattatcaaattaaaccgaactcggtgaaccaaattacccggttggtttcgagcaatgaacaaatgaatgagtaaattgtctaatttgagtatttgacttacagtctaatgttgtagaaaaggtggggaagagacaaaaccgccatgaaccaatgtccggttaggatatagtataagcaaagaagtccttgtaaaccaaattccggtagaaccattcggtttattctgctagatacatcgtaagggtttatgcgatcgaactctaaatctgccaaacatgtcagctgcatcaaaaacaaaaaagcaaatattcaagaaaattgctaagagaattatttctttctctatgaattggttttaaccacaaaactatattagggaattaattataagttagggcaaaaaacctgataaataacgatgattataagcgttgcgaggaataagaaagagataatccaatcgagtagatcgcccatcctccgctgtcttccgccgcgttacaacgttcaatctccgccttgctttgtctctctaacgtagaaatacggacggtgtttttggtcaaagctctggaaattgtaggtatatttatcagaaaattatacgcaatatataagagattaatttttataaaaactattaaaaccccactggatctggttggataaaaagctacttatttattcatatgcaaatatgatattcccatttaaagcatattcggaagtttgactttggcatgaaactcttaatcttatttgatatggttgacaaaaatatttttgtttctttacgatgaaatgcttttctatgcaagtaaccaatcaatgatcgtgcctattgcctattggtcaaagaaattactatctttcatccataagctacttatcagttaaagtgttaaatctgcagaaatagaatcgattcgaaattcggaaaccaccatcttttttttttaataaagaaaacaaagaagctaaagtaatgtgaatactactcaaattcaaatagctgcgagttttttttattcgtatgtaagtaaactctatatccaatggtttgggtttcatataaaattgcatatatttcttagcataatgtttttgggcagctggtggtcttaacataaaaattgtgtcaaccgaccatggcttatttgaatagatgtatgaaataagaatatcctttattaaaaagcatatccgttttatgacgtccttcaaataatatataaggataagttgaccaaattttttatcaattatttcaaaaaagattatttataggaaatttatttatctattaagaaagagttatttacgagataggcatttttttagaaaagtattgtctaataaagtatttctatccatgactccgaatttaagcattttttggttacgtgaatagacgagtttacctttagaaatttggaaaacaaaatttaagttatttaataataattatttttttgcgatgacggtttacgatttagagttttgggttttgggttttgggttttagggtttagattttagagtttaaaatttaggatttaggatttaggaaagtgaaaaaggggtaaagtcgttattttactgaaaccaaaaatgcttaaaactaataggatagaaagaaatatctaaaataaaagttttggactgacaaatgcccatttggaaagaaccccattaagaaatcaatgaatatgttcgattgcagttagccggttaggtaagagtggacaattaactggacccaacgaaataaattagaaccaaaaaacatcggttttatttcagcagattcttctccaaattaaatctatgtaatagactgaaccaaaaacattatcgcaattacataatacgtttccaaataaataaatacccaaccgcatgtaattgggtttctccttaaccaaactgaaccaaaacctaatgctcagtagtctcactcagtcactaatctattattgactgttcatataattacatatcaaatataactggggtaagttgacctcgtatcctacaacatgagttcgttggtgtttagttttgatgtgttagagtaactgatattttagataaagaacgcacttttaaaaaatggcaactatcataattgatataaatttcttataattgagaaattttcaaatgaaagaacaaggaatcaaaaccaaaacccatgatttttgtatatcagttttatgtgacttttttctttattatccatgtattcattataatttgtatcttttcttttagagtttgattattcttttcttacatcaaatttacaaacattttttgtacaaaatatatacttttaaaagactaatctatgtcaatatctaactgatggaggttcactacctcaaaaacttgtacgggtgacttttgatcaatttttctcatactacacctcaactttttgagttgacgctaaatgacaacgatacttgtgagtggcatgaaaatatcgactttgttgaactaagaggttggcatagagattttcttgcatgtattcattgtcacaaaaagtaagttactttattcttatgttaaaattttatttagatgtttggagttctactattatatttgcttaactcattatgtcacacaccaaaattaacaatatgatggtcgaccaatgatatttagggggttcatcacacaattaaagtttggaatcttttaagactatcatatgaagattatgctcaggtaccatgggttttgttttctagaacaactgggacagcatgagttgagttgtagtttcattctcatatgaagtctactcgtatttagagaaacacgagaagaagatgaggttggcgagaaggcaattgttttattttgtccagtttaaagcgtataaatatattgcattagaaaatgctcatgctaagcattttattgatggagactttctctagtcttatatgtatttatctacggtagagaaacatcaatgttataacagcactgaagtcaatacttaaatatctccccatgtttcattagtgggtgagttcattgtattttgaagcgtctgcatatatgaatatatattaatactagatcatgactctacgctacaacatgtattaaattttatttagtaacaaaatactatatattttatattttagaataaattgttgatataatatagtagtaagtggatttgtttttggtcattccctatatataatattataatgaatatattttcctttttatataatactcaaatatggataatttttttaagatataaaaacaaaatatagtattattttaaaaaattaattttatttgaataatgagtttatttatgttaacaaccacaaaattagattgcatttagttagttagattaaaaaaattaaaatatagccgcatttaacatgtagattatcttgagttgattaagttagttattattttcagctaatttaggatttaaaaaaaaaaaatctttggttgttgaaatgtatatttgtttgagctaattacagaatttaacaattattcgcataaaagttattattttatattttttcgatctcaacttaaaatcaacaaacagagtaatccaaaacaatccaaaatctgagcaacacataacaaaagcaattaaccaatgcaaaagcaattaacgctaattctcctcaataccattatgtagctacgcataacatcccatcgcttaagtatgagtgaaaacgtcccactttggttacagtgccagcaatatacttcccaaactattaacaaaagtttatgtataagctttcaattcactattcagttgagtattatccaatttctgatatggtaacgaaactccatttcccaactggtcaaaagctaattgataatatattacttatattctttagtatgctagttgaaaagtcttacaagagatcaatacagaaacgcaacacacgaccagactaacaattacaacttctatttagtttaatcctcatcatcatcatcatctatccactgcagttgatccgaaaattcaccctgtaaaaagaatcacatatactttttttatatacacagttcaagaatcaataaggggagatcaaataaacaaaaagtcataccggcacatgaagaccaaaaccctcaaaacagtctctgatggtcttatccaacaaatcgtcctgaccaaagcattgatgccatatcttatcgatgctagtatgcaactcctgcaaggagccttcttgcctagctccctctccttttgccaaaatgtaggctctcagaatgcggtctatataatcctccgaatctaccatagagaacaaacgatacattcttctaaggtcatcgatgagactctcatccattaatagcataaaaccctcttcaagaaaagaagagtgcgcctccaggagctgactctttaagactttcattagtcgagaccgggaagatgaaaagaagaaataatgcttatcgcatttttcctcttccgcaaggaaagtcctctgcaacaaacaatcacagggaagaatagctttcattttcagggtttaggaaggaaaggctaaaaaaacaaaatgataacgctaagttgaggtcttgagatgtatgtacctcgacatatttcaagtagtgggaaatgtcggatcgctgcaggacttgctctgcttcctcggcgtaaaacttagaagtggaatcaagaaaagggtccttatacacatatgtacactgccactgcatgcggaacatgtccataagattctttaggagatcactcgtgttgttcgcagccttgcctaatctggtagacaaacattaacacaaaatgcaagggaaagagtgagtagatcgagactggaacggttaaagaaagatgagactcctcttacttacatactaacctttcatcagtgatgagtcttaatatgccggtaataacttgatcttgaagttgaggggccatggagagttgtttatggaaaagcttctggcccacgtcccacaatgtcaagccattaagagtctgatacatggctacgtcagacacaagactcatcttccttttaaagtctagccagcgattgtacacgtgtggcaagaacacagagggatcatcactgccactgcaattcttttctaaagactgtataagctcagcaatgtgaggctcacactcatgcttgacaagattgaaaaccagttctgattgtcgaggatcgcctaagcaagcacgcttaacagctctaaaaatcgtagtgaaacagagaacgtcgccaggctttttgtattcatcatcatctaagatgattttgatcgctggctttagcaagtcccaagcttttgctaagtatagtttgtttctgtcttgtgtatctaatttggatgatatcaaaacatgagatttagaagatcaatcaacgagaacacaaaaaaaaaaacatcccaacgtacctttgacagaattgggatccaagttaaagataggaggaggctccctcgcctgggagataggaaggcatgagaggttttcatcgcttaaggtaaaaggaagacgataaggattgccctctgctcctccatcatccggtgagtggtgaacgagtttcggcgacttcgttgaggaaaaagggtcggggctgatcgagcgtttcatgataatccaattctgaagaaaaatgaatcgatagacaacactgatcaattcgcaatcgtatagtattcagtctcaaggaataaaatcggagaaacgtaaccctaaccctatggagaaacaattctagtaattaacaaaatttggaggactttattatttaaaaagatgattatgatatttatttatttacttaatatttttgtttccagaaaataggatgaattaaaatctccttctcaaatgaaaattatccactgctcttgatccgaaacttctaataatcacctctccacgcatttgtcaagttagtttaatcctcatcatcatatatccactgctcttgatccgaaaattcatcctgtaaaatgaatcatatacacttttttatatacacggttcaagaatcaatatgaggaatcacatttaaaaaaaaaagtcatattggcacatgaagacgacccaaaccctcaaaacaatctctgatggtcttatccaataaatcatcatcatcaaagcattgatgtcatatcttatcaatgctagtatgcaactcatgcaaggagccttcttggacacccaagaattttagttaatttgttgccattaacacatattaaaaacaaatatatcaaaatatattttccacactaactatttataatctaaagatttattttacgtataaagtaggatttttgatgacaaaaaaaaaagtataaagtagggttttagggcctgactggtttaaacgcagcgggtgcagttgcggttgcgggagtttgcgaaaacgggcagttgcggtttcaagcgttatcaagcgttttgaacgactggttgaacgtttgataatgggtgcgtttgcgggagttttatgactggtaaaccagcgggtgtgatagtaattaaacaaaaataaaccaaaataaatataatatattactattaaaagaaagaaaaaatacaatatattattatgataaattcataatattagaaaaattaaacataattaataattaaaaccataaataaaacattaaattcaaaaataaataaattttgtaagaaaaagtttaatactttatgcatttggtacattaccaaaaattgcatcaaatagtgtgataaactgtaaataacgttgaactcgcgggttttccggattgcctctatataataaagtttcttcaagatatccaaacgatttttaacacatctccaactaaatttttttccaaactggtcgtgaatggatgaacggatagatcatacttacgtttgattcttgattttgattttaattttcatccgtttgggtggatgccataattgagagaatagagttacaatatattgattagggttttctaacaagaataagatatatagggtttgggtggaagatataattattttaattaattataaaaaataaatttttgttgtaacttaaccgctaccgcccgcaaccgcaaacgcttgcgggaaggagcttttgagatctgacgatttcgagcggtccaaagcggtatctagcggtttttatgattggtgccaatcgctaacaaccgctaccacccgcaaacgctgcgtttgcgggtggcagagggagaaccaatcaagcccttagttattataaaaaggacagtttctatatgttaatagattgagctgtggcccaataacaataagaagtgttcaaacaagttagagaaaaatccacaacactcaaacattattggtgttgacaattgaataatgggttcaaacttaattgctctaacaaaaatgaactacaaattattgttcatataattaaatatgaattttaactggtgtcagttgaccccatatcctacaacataggtctgtaagtgtttggcctttatgtgttagagtgaatgattttttagataaagaaagcattttgaaaagatggaatctatcatgatcgatatgaatttcttatacttgagaaattttcaccttaacaaactagaatcaaagccaagcgcatgatataatctgtatattagttttatgagagtttttctttattgtccatgtattcactatattttgtatatttttttcatttcttttgtttttaaatttttgattattctctttgtacatcaaatttataaacattttttgtacaaagaaatatatttttaatagactaattacttccattaaacataatatagtattttttattttgtttttgtcaaccaaacattaataaaaatatatctccatgattggttgctaattaatatagtattaatatgtataatttctttagtgctattttttcagtcagatgtatcatgatttacatattttactagttttctcaaaaacatttattattaaaatctcataataatatgtcatagagattttatagatgacttcagttttctccaaaagacattgtaataaggcaactcattgtttatctaaacatggatgtacatctttctttttttttttcactgataacatgtggccacctagttggctatctgaacaattatatcaacataattacattttagatgaaaaaagacttcatttttcttcaaacctatgaattctatttgaccttcttctacatcattctatatcattgttttttcgtatctataaaatcagtcccatatattttcaatcgatgttaactttgtagtattttttggtactccagaaaccgtaagtgttatgtggcttatgtgttggaacgctttacaacttcagtggaaagaggagctctctcaattacaagacgaaaactctgtctcactagggccttcatcgctacgcagatttttctcggaggatgaaaattatgtgtttttctcgacaagtgcgatgccaagtgtaattctctacaaaaaaatatattgatatggaacctaacgaatattgttgacgtctgtctgttggaaattgctaacgacatgaacatcaatgttctaacattgaagcagatacccaaatatctcgccatatttcattaatgggtaagttcattgtatttttaaacttctgcatatatattgaatagaaaaatcccacgcaacaatatattaaaatatggtttgttattctattgaaagtagttcattgttatatatataaatatatcttacaactttataagataaatatataacaaaaaatctttttattacaattatatatatataactaaaaaaaaattgttttgttaatattgttagttttgtttagtgcttaaaattgtagttagattattaattttaggatttcacgtgtggtatattgtcccgtattaatatcgatccaaatccgttacacaatataacttcgtttcgttaaattaaacaatattttgttattttagtttttaataatacttttgtttgacatacatatatttagagtcagtttaaaagtttttttctaaattgttctcaaatatattattataattttataaagttcaaaaaaatagcattataattatatagttaattttataaatgtcaatataacattattttgatttgtatttttttgtagaagggaaatggatctattgtacagtaaaacttttataaattaataatgttagaaccatgtaattctattaattttctttttcccttcttcccaagtgatgatgatgttgtttagttgctcaagcctgtctttttttatggtatttttgggatttgggtttatatttcactagcaccaagacattgttttcttttaaagtttttagttgttttcatgaaattcgaatgttgtttaatattgttgaaaaaataacaatttgtaattctctttttagtatctctatatatctttactatcttacggtatttcatctataattaatgttgaaaaattaataattatctagtttccaactttttatttgaatagtttcatttacacttaattgaatattaggcttagtgatgttataatatatttgatataaatattcataactacaagtattgaatacgccattaataagtttcttagtcttctataaaatttagttataataagaaaccaaacaaatactagaaacttatatatacatcgaaactccggtcatgttatcttcatattagttttcttcctttaaaagaaaaacagagcaaaatgcagacttttatcgttttgttaataatgtcaacatttactttaccttttttctttaaattttaatcatatatagttatgtgaattgggataaaggagaggtgaaatggaatagtgacgcacaaatgatttgaaagtgtcgaatcataatcatagttcataggtctaccaatattgatctctttcaaatctaaatcattaattagatatagttctgattatctttagccattattttggattttaagactttgcttgctttatttagctcgagacaaaatagttttgcaaacctcccaataaatatctattataaataaaggtttttttttagcatatatagataatacatatgaattacatatatatatatatatatagactgtttatcctcgtcaataatacaatttttgtagatgaaattcaaaataaccatctatatcaactttcaacaatgcatattccaatttcttgtatctagcattcatcctagaaaagtttaattttctttatctaattttttttctttcaaaaataaagaattatttttttaaacgtaagtgatctgtaattttctccacttcaatattttcaaattgcaaagggaaaaatatagtctttaaacttttaaaaacatatcattttttcgaatgtagtgaccgacatcacgagggtttgaacaaagaaaaaatatctaattaaaaatcttagttaactaaatgagtactttctttcttttgttttgctaaagataactaattctaaatgatttctcaccatattaattttgttactaatactaatgttactaataaaaagcttctctattatatgagtagagtgacaacaaataaagaaaaaaaaaaaatatatatatatatatatatgagtagagtaaagttttagtttaaaaacaaaagaaagatagctttgcatgcgtaattaatagagaatctttttttgccgcaaatgtaaatatggactattacgttaatcaacagttttagaccgattaatgatttgctcagtttgggttgaaaacttgaaatcgcaagtaagcgtgacgacaaattaatcattaaaaggtaatttacattgaacttagtacttaaaaacttatttaacaaaaaaaaaaacttgatactaatatcatccatttagaaaaacttttgtttttaaagtaaacctgtcttttgttttgtatcctctttaaaaaaacatcgttcccttaattatttaccttgactagctacatcccttgatgatgactgctatgtttgtcctcgactcctcgtcaactattctaatgaatggaaagaagtatttgagccaatattttaaaatttagtggaaaaacactcaactgttttgtgtgaaaatgcttgcttacttaccgtacaaaaaatctaagatatatatagcaccaatttttaaagagtttgtttttttgtgatttcatgatatttatcaaatacacatgccataaataatctaatttttcatgtctttttagcactagttggctagctaatttttcatgtcttttttatcaaatacacatgccacaaaatagtcttaactcaacaaagtatttattaatttcccaataacacaaaacatttgagaattgggaagagaaaaatatatatatcacaaaaagttaagactatatctagtggcacaaaataaaatcccgtgatgcaatttaatcccaaagtaatataaatactaatcactggagccacgtcttcactccaaaaacattcgccaactatacacatataacaaaacaaaacactctcctgtgacttctcttctcttcttctctctcgatctcttccccaaaaatcttcagatctctacatcaccggagagacgagaaacactcaccgtgagaaaaccatgattccttacgctacagtcgaagaagcttcaatcgcactgggacgaaacctcacacgtctcgaaactctatggttcgattactccgccacgaagtccgattactatctctactgtcacaacattttgttcttgttcctcgtcttctctctcgttcctctccctctcgttttcgtcgaattggctcgatctgcttctggtttgtttaatcggtataagatccagcctaaggttaattactctttatctgatatgttcaaatgttacaaagacgtcatgacgatgtttatcctcgtcgttggtccattgcaactcgtttcttatccttcgattcaggtaatttgagaacacacttggtttttaatttgaatttgaatgaatttcacttaaaaattgtgtgtttttgaattgaatcgcttcgaatttgataatgaatttgacactattgtaaccgaattaccaagtgtcaatagctcaactggcatagaggtcgctggttcgagtggcacttgttacagttacagaactaattttgattatgtgttgttgaacagatgattgagatacgatctggattaccattaccaacaattacagagatgctgtcacagttagtagtctacttcttgatagaagactacactaactactgggtacatagattctttcatagtaaatggggatacgataagattcatcgagttcatcacgagtacacagctcctataggatatgctgctccttatgcacattgggctgaagttttgcttctcggaatcccgacgtttatgggaccagctattgctcctggtcatatgataaccttttggttgtggattgctttaaggcaaatggaagctattgagactcacagtgggtaagtaggcgtggtttaaagaatcatataacaaatcctttgctttttaactttacagagtctttttttctttctttattatatagtatgtgtgactgcatcatactaaatttgaattgtttgttagtatatgtatttattgtatataaagagcttaaggtgtgtagattcattagtggctcacctttttacaacttgagctaagttaggtattaggttttttgtctgaatgctttttaggcttttttaagctattgtggtttgttttggaactggttagatatataccttttgatgaacaattagataggcttattttttttaatttgattaacttttggggttacccaaaacatactaaagtaaagaggactaggtcccttagtttattgtttgtttttttactttacactcctgtgagaatgagaaatgtttcttgcttgcttgagtttggtgttagtaaagcataatattcaatttgttccattgcagatatgattttccatggagtccaacaaaatacatccctttctacggtggtgctgagtaccatgactatcatcactacgttggaggacaaagtcaaagcaacttcgcttcagtgttcacgtactgtgattacatttatggaactgacaaggttagtattcatcaaaagtttaatcaaaaactcaccaaattaggtttccatttttccggtttctatatactaattctggctgaaaacatttgatcatgtggctatatcagggttacagattccaaaagaagcttcttgagcaggtaaatctatggatgccacttttacttttccgaagacctgtaaaatgtttctatttaaccgtgattttcatgtatgcttcattcatttcagatcaaggagtcgtcgaagaagagcaacaagcataacggaggaataaaatccgattagtaaaaaccggagaagaagattttaacctttcaaagaatagctaagcatgcactactacaagttacgtagtcagcttcacgaaaagagaaagggagtggattgaaatttcgggtgtgtctctcttatgtcatcagagttgttactaactaccttctttctttagttcacatgaaaaatgctctgcttccgacatgtgggtcattgatgtataagtgtgtcggaactgggttttgctctctgtcattttttaatatttatgtttcgtcgtcttgaagaaagaagatgtcgtcatcaaagtcttgtttgtctttcatagtaagagaccttgttcgtaaatcacctctttggtaacttaccacttaggttaacggtaatattatatactggttgtctaacttacaaatcaccaagcccgtctagctcagttggtagagcgcaaggctcttaaccttgtggtcgtgggttcgagccccacggtgggcgatttctttttggtctcccttttttaaaaaaacacgcgtaagtcagtaagaagtaagaagcatgaagtattcaattaaataaagcaaccccgttagttagtcaaaccaaaggaacaaataaattgtatttatttacatagggaacatatgtccgtcccatcattttattaccaaaacaaaattcgataccaagttgctaatcaaatgacaatatcatcaagtgagatctcctcttcttcgtttagttgtttcattttctgcacataacaagaacacaatcgtagtcattagacagagagaaatagagatattgagtgtacagaaatccaaagtgaagagatgctatacagtgaggaaagttaggggatcaaggaagctggaggagcctaagatcacttctctgtcgagcttctccgtaagtttgtggcaaacccttaactgcaacaacccaaaatgtatcagtaaccgaatcattgattacacagggttcacaacaaatttatttctcagaccaggtcatttcagtacctctgatctcgttgctcctcctactatgaacacgaaaatccgctgtccctttctcttgaacccactagatgctcgtcctagaaccgagtcactgaaacacatcgagagatttattaatcttcattaacaccctcatatgtcatccaaattactggattgtaagattcggtgtaatatataactatcattagattcacgaataaaccagctctcagattaccaacaaacaaaagataaacaaagaaactaaacggaaatacctgaaatatccatcatcagaaagatggcgtcttgcccatgttggtgttcgtcttgaatgaggcaataccggactcgctgatggagacagagagccagaataaaaggttggctttggttcattcatacaagggtaatcttgttttggcaaatgacctttgctaagtttctcaacaagttcctgaaaagatattacccacaaatacaaagaagccaaacatgtcactggttctttagtgcatacatactagtaatagaaaattttaattttcaaaaggtaaagacctcaacaatcgggtaaaaacgagacagttgccatgtttgagtttcaccaactcggtctcttcgagcagctcgcttcgtctgagtcacatggatcaaaagattccagatattagactgtcagcaaaatcttggtctaagtcattctagtaaaaacaagattgaggaagaatatgtaccttaaggacatcaaacttgagaggaaaagatcctgttgtgctctttttgcactccgtatgtactggtccaagtaatctcatattgttcacagctactacatcatcgcccgacaattttgctagctgaaagatttaatcatgaagtacaaaagcttaagaaatgataattaatcaccttagtcaaacctttttgaagttgaataatttaatttacctccatcatcttacgtcccttttcaccttcgaacttcttcggatatattgcagcaacaatcataattaacctcagcttgctttcgtggcttataatctggacatgttgctcattttcagtataaaatctcctgatgtatgaaactaaaaagcagagcatcttacatggttggtgctcagaaatttgataacgtcctttcttccagcatccccaaaaacaaggtcctgctcgagctgcccgagatctcttagaccttgttccatgatagttctgtttattgttctagcgatctgcagtgacatcaacaatacttattttatgaagaacaaaggatctacattatcacatcacactaatcaacttgcagaattgacctcaacatgtagagaaagcttgtcaatttgctcactgtactgaggcaaagcgtgaaccatcttctgcaagtcttttgatgaaaggtcaccaaagtctctgcatacaagaagtcaataaattaatcaccaaagttctagtggatcacttgaaacaagaaactgaaacaaaactggtaactactttgaactgtgtttcaattgcgcagctttgttcttcgacacgaagtttgtcatcttttcatgcaatctttcacttgcctgaaaagaaaaacagattactaccaaaaaaatccacataaccatgtgaaatcttaaaattctgaaaatgaggaggcacgacatacatctgcaatatgagcatcacgaagctccacccaaatggaatcttcctcatctagaagaacctctttcttctcaggtttatcaccagttttactcggaacctatacactaagaaataaaagggaaattaccatatgctgtagtgataagctacaactaacttttacaagatttgaaagcgaaaccaaaatgtcacctcgtgtgtgtatttatttccttccatattaagcaaatcgtggcacatcgcatcatatgtccactcatgaatgagaggtgcgatctgagaagcatagaatgttatattctgttattaagtggctatgacatatcaagcaaaactgattgtctgagtgaaaatcctgacctggtctatggatcgatccaagataagtagttcgcatgtttcagtctgaggaaaatcttcgattgtctgtttgtatcttgcaagacaattccatacactagcagcaagctttgtaggaatcaactctcggtaagttgtcattgttgtggcatcaagagctttggctccgcggtagcgaacaaagggatattcctgtatatcagaaaaattaaccgtcataggaatgccaaaacaataaacaagctgtagcaatttgtgcctcgtacctttagtgaggccaaaactgtagcaattcttttagctaccacatttaagcaagcatctgctctttgatggttttcgtcgtcacagaaaagctcttctaaagcattttcattatttgtaacaaagccctgccgagacataatacataggggcacttaagtaagcagatttcaatataaaacgccatgcattggcctacagacgaagtgattttgataacgtcaagctatacaaattgttatacatgcaagctgtatttgaggttggcctaaagaaaaaaccaccattaacttgattggtcaagcatgaaactcattattaaatatcacaatttttcatactatgaaaatcttaaggaatagacagaactaaatctggacttttaatcatataagatacctggatgtccatgctaatatactccaagttcatctgcataatatggaaatccaactttacattatcttaactatcttgtgagattgcatgtagataaggaaagtcagaaaaaatataaaagtggcatatagaagcaacctctttcaatcccccaattcgtttcattgctctcatgtccttcttaatgagattaactaagcttctcgaaacaggagaactaaagaaaacaaaagccctgaagccacaataaagaaaggattatcatttcacaaagacagtccataaatataagaacttctgaaacaagaaggaattgtgcacatacttcttgtaaagtggtgattttccagtcatatctgataaaaacgcagtgacactgcaaaacaaaagcggaaacttcagaaaatcataaaatttcattggcgagaaattgatgtcaaagatagaagaattgttacttctcttcggtcggttgaataaagtatatgacttccattgctgtcataggttgcctatgtttagttataacctcaaccactagaaaataaaacacaacatcaaaatatttccatataaaacaatgcgaagaagatagaattctgaacaagatggttcttacaagaaatgccttcttgtgtgatctcagacattttgcaagcagatgacattatcttcacagtgaacttgtccattacaagtacctaaataatacattcatatgttcagtgaatcaatgagcaaacccatagaatcaaaaacaataaagtaaaaccaagattttcaaggtaaatttataagaaagctggatcaaaaaaaattaccttccaagttaatttagagcttccatttctttctggcctaagcatttcacaaagtaatcctgaaaccaaaatggacatagtaattacctaaaatgcaaaaccctcattttcctgatatgcaaagtttttgcttcaatgaacattgtgatcacgatgacctaattcgaaactccataaacccaatgattttctcatactaatccaacgaaaccctagaacctagagaccagaagcttccagacaaaccctataacagagtctaatgatctaatcaaaaacccaatttcgaaaaatccaaaattggtaagagaaagggtaaaagaagctaactttctctggtgatttgtctgaaattcttgtactctccgccataagaggacgatccagaatcggagaaggacatcgcgtgaaatcgtcgacgaaatgttttttgatggaaagggaaagtagaatcgaatatcaaaaaaaaaaacagattcgcgaggaagaagaagaagaatgaaatttccgttgaaattgtggatctagggtttacttggtgacgaagacaacaacgacgttaaagagttgaagaaaacttggcgcttctagatttttgccgttcctgggtcggctccagcgagcccatgagttttcaaactttgaatgagttgttttctcagacgtgtgttaaagtcaaaatatagggacgaattatataatattataatagtcaaatgacaaacgtaaccttgatattaactaattttgcaaagtaagccactatatcaagatactttacagtaatcacccaactaattaaaatttgaaatatagcccccaagtcaaactatgattcactactttaatagttattaaaacttataactaaagccaaggaacatcaagcttagaatagaagcctagaacctaaatcgatttcgtagaccaaaactctaaatctttgtcaaactcgtaaacaaaaggtataaaaatcaaatatttaataatctaacttataatctaaaaacaaatcataaaatataaacaaaactgaaatccagattttagaataagtttaccaaacaaggttaacttttatccgatttttctcaaatttgttttaatatctttctagtttctgaataaaaaccaatccaatagttttgtgtttacaaatgtgaattatataccttttttgatagataaacgagaaaactatatgtgtttgtttttagtaaaaccaaatggcgaattttaaattattttattgcgatatatattgtcataattacgctatattgaggcttttatatttgtttgatgtttttatgtcaagtttcgtaagtataaataattttccatactttggttaatttgagggctgtttgcaattttacttatagtattattgcaactgatcttgctatatttatttatttatattctgttgaagtgatcttgcatttttatgtttacttttatcttccaaacttttagtttctacattcacatctttcttttacatttttcatctgttcttagttagttccaaatctttattttatcattatcattaaagaaaaacgttatgagacataaatcttgttgagttttaacttttaagtttaacctggttcaagcatgccgttttttctcaaattttatttctaacattttgatcaatctgcattctatgtaacaaaggcttttgtttgaatatattttttcatgcaaaaaagaaaacattttgatcaaactaataaggaacaagaaaaggtatagtgttaggtaatctttttttcttgttcatattttacagtgatttattacatcaaaaaaatttagcacataatgaacactacttattgtcgtattattaccaaactcacatatctcacatcactacacttctttaatttgttctacactacttaatgccttcaattaagatgaagtcgcttctgaattcaggttttttcttcgtagacagcttccaccgcaagaaaaacacaaccatgttaacaacaacaacgatcataatcaaccctacactgatcaataaataccacattttatctggagatatcatatcacagccattgagactaataagaaagagacatggagactggagaggcaacatcatccatagaaacgcccacatttctataatataatattctccagctggtaaaaagcaaaacaccatgacaaccagctgatgttgcaagatatatatctagagcgattaataaaccatcttggtcatggatgttttggtggttaacctctggagatcctagcaacagctttattgccttgattttgttctgacatgtttctatgtgcaaggcggtgttaccatttgatcacgtccgttcagttcttgtgtctctagcgattcagcaactacatgacgcagagtacttcgagttcttcatatctatcattcataaccgcaatgtgtagagcggtctcatcgttcacattaacatctctaacacaaccgggacaagccaatcataagatcaatctcctcttctcactaccatatgaaatggcgtcgtacatgttatcataataaagaatgtacctctcacatgcataccaaaaaaataaaccatgtattaaacaaaacaaacatattagtgtttattacaaaaaaaaattatactttcgtttcctagaagacgaacaaggtcaggatcattctcttaaacattgatacgaaaaaagaaaatttcctaacattctaaagctaatgaatgtaatcaacaactttattttcttatgtccgtaaaccaaatttctttggaaaatttactaaaatgctctgttagttataaatttagattattggtgactggtcgtcgtaataaacgggaagaaacgaccgaatcttaaaaaacatgttgtattgagaaaaaatctctcttttgtggtttggttcagtaatttcatcgaacacttgctaagcaaccgcataaacttccgtacttttattacacgtgtcgcaaaccaaagatagttcccattgacacgtattcgatcacgtggctttgtcctgagcttttctttctctaacgcaaatgtttaaccacagtggccacgaagaagaacgatactaacagagccttcacagagagatgtttcgattcaatttccgtcgtgaaatctccaaatataccggaatttatcaccggaagatacacagcggtctagaagatgccggtccgatggcgtctcgccttaaatcacgttccgttgtccggtttagcggaccggatacggttaagtttcttcaaggtttgttaaccaacgatgtacggagattcggcgaatcctccggcgagaagaactcggcggttcctacgccgaacatggcttccgttacgaatccgcctatgtacgcagcgttgttaactcctcaaggaaggtttctatacgattttttcttgtatagcccttcgagacccgatgaaaagcttgatcggactggttcaggacccgggtcggattcgggtcgtgatgggtctgttgagttgtttgcagatgttgatgttgatgtcctcgatgaattgcttgaaactctcaaaaagtaagctttttgaagaagaaatttgaaaaattaggtcttttggatcttattgttggcattgtcaatgtagattaggtttttttgacttgtagatgattgtaagataatgcttaggttttgattggtatattatctctattgattttactggaatgagtaaaaagctcagatttttagaaaagaaacgactcacattttcagatattcgacaacattaggtctttttggatcccaattttagcaatgttaatgtagattagggttaatttacttgatgatgattataagataaggcctagaatttgaatttagatgtgtcatctctattgatttgttggagaaggaaccagttttagttctgatttgtgtgatatgaatgttgatagatatcgcttgaggtccaaagtggatattgaaaacgttgcagaggagttttcgtgttggcagcgttacggtaggaatcttactggatcatcatctgttggttggggtggtggtgttgatcgtgctggtgagtctacagctagtggtaataagtatggatggcaatggtataaggatccgaggttggagtgtctcggttacagaagtatctttccgtctgatgcaactcgtgagtttcttaatcgaatataagcttttgagttcttgagcttgtgcaaaagcttagagatttgtttgttttgcagcgcctttagttgaggcagataaagaaacagatgaaagcaattatcttttatggagattagagcatggagttgctgaaggatcagctgaaattcctaaaggtatgatctgtttaacttcttgatctctcttcttctaggtgtagttataatatgtttttgtggtttgtacaggtgaagcaattccgcttgaatataatttcgttggtcttaatgctataagctttgacaaaggctgctatgttggtcaagagcttatagctcgtacccatcaccgaggtgtcatccgcaaacgcttaatcccattacggtttatcgatagcaatggaaaaggtaaactgattttccttataaagaactcgaatttctcacatgccggtcttaaaccgaatcaccaatgcagagttaaaccagaaaattgcggctggagctgaagtagtagaatcaggaacgggcaagaaaatggggacggtttcaacagctctgggtagccggggaatgggtgtaatgagggtagaggaagcctttaaaccatcagctgaattagcagtaaaggactcagaggaggtgaaagtcgaggcaatcaaaccaacatggtggccagctgaatggttccaacagaatcaatcaggagttgctgcagcgtagtaacttactaaggtaaaaaaagaattacaaaattttgtgattttacttgatagagttgaggattgaatgatcttctgagtaatgaaaatttgttcctattgtcagattatttttgcagttgaaaaaaataaagttggatactttccggcgaggtttctgtactggaaagcaacaagctcgtagctttcattgtattccactatttaactaataaatgttggaaccttccggcgagtttatagccgtcggataactttgtactaactgctacaaattttgttgtgtccacttatcaagtttcaagttattgagttttgtggtttttgtagttaaaacttggtaaatgttaaagttctatatagcgttaataaatcaaaatttcaaactgaaggaggagaagtttggttctgaattgtgtggtatgattctgttttaaaacaagcttggttcgattccggttaagtattcggtttactattttggctcttcctgtggtagttagtagtagttactgtcaacagagaagaacaaaaaggcaaggagcatgatcattctcagtttaggagataagatcctgcgaaagataatgaaagaagaaacagctactggtatgatacaagttgtagacaaatactatatgactacttctttagctaggaggttttacttaagaggaaagttgcatagttttaggatggacgaaagcaagtctgttatgaagaacgttgatgagtttcagaggttgattgatgaattacgtaatgctaaagtagagatatctgatgaagaccaagctatatttttgttgatctctttgccggagcagtttgatgaggttagatcattgatgagtctgtgtagtctgttgaggaaaacattgatgagtctacaagttgcatgtgaacttaaaaacagcaaagtttagagttaatattattagaagtaatgatgctattacaaaacctcttgttgatatgttattagaagtaatgatgctattacaaaacctcttattgatatagaatttgaaaccttgataactaaattacataaacttttcattaaatgcaatagagtagctagatgacaccctagtttcaatcctctgttccaatcatcatcatcgatcgtagagcacagtccgacacatcgggcaagtgttttttctcttgagccactccacgagacagctactatggaagacatgggaacaactcatgcgagtgggtcctgttttcgaactggagactagactctgtagacagatggaacacgaatctgtttccatgttaaaactcttcaattcctctgctttcatgctccctagtcgaaccatcctcgattcctttgatgatgtctcctcgacatggacatactggtaagtaactgtgacgccaacggtcaattcaacgccgttgttcataaaacctgcgttgattgcagccgttgagatctttgggactaagtgatcgcacaaccaattgtcgtcgctatggagttgatcgtggagtaacgattggatgtggtggtgactacaactagggagactgaaattgatgggaagtgatttataggaaagcggagtggacgtttcggctcgatggccagtgacagggtttataaggatctcatccttaatggtattgacgatgaggaagatcgagtttgtagagactttcacagcttggacctgaacgctcactatgggtttgggaatgggatcattcatgtttggaagaggcttctcaaagagattcacaagaagtcgtaaattgagagaagagaattgtgaagatttaggagataggggtaacgtagtaagatatatataagcgtctgtgtgttcaactatatcttaggctaagattagcgaagatttatatcttaagaaatatctaagttatatcttagctaataaattgattaaatttaataaaagcagctaagattagctaagatttatatcttaactaagatattttcttaagtttaagaagtaaacaggtgttgtgtatttattgggtacacaaataaacaaaatgaaggaaaaaaaaaccattggagcataaataatttaaattttttcccttaagaacttcttacttctaaccattggagcataataagttaagatattctctaacatatcttaactttgaaaaagcaaaattttaagtaaaaaaaaaggttaagatccaagattaagatgctttaacatcttaaccactggagatgctctaggttctatagtttcttttcttttatttgtcaccaaaaagttcctttttatttgtcactaagagcatttctattggttatctcaccaaaataatattaatttaagttgaaaacctcattatcaaatacaatctctattagagaagcccaatgggtatctcataaatatattaataatatttttctttttttagcaaaaaaatagtgatcatattaatatttagtttaaaatttatgttaaattttcattaatattttttgaacaaatatcaatttataagttaaatgtactcaatataagtaatcttaatcttaataacaacaattaacaatacaatccattgtaaataatacaatcaaagagttataatttcctaaataacacaattaagcaaaaactatatagagtaaacttaagaaaagtaatataattttgttaactagaaatggttttatcaaatttttgacaaaaatcattaaatataattaaaaaacagatatttttgttttgaaaaaattaaaatagcatttttaaaattattacattatgtttaggtatgcatttaattattatattattgtaggtataattgaatattttatattaacattaagtaatatcaattcaaattagtattaatatataatttaaacttgtatactggtgcttgatatatagataacattttttctttatgatttatatataataacaacatatacactactttaattaatatactaaactatgagataattgatttatcaaagaaaaacaattatagaatgacaagtgttcatgtttcgagagagggtttatctcatttgaaacctcaaatgaagatggcctaagaagtttcgtatctctctttttttttgggtcttttgggtttatatattacgtattattgcagccagtggtaattccaggtagatatgtcagtgtcaatatttcctaactttgattggagaatagcaaaatcttactatttcctaattttgatattacaaactgattcaaaaccgtaaaacacacatattcaatttattacactaaaaacagagtgtgacacacaaactcagaatttcaaacttgaacttgaaaaccttgataacaaaaccacattaaataaaatccttaagaaactaaagcttgtgacccacgttgttcaatcaatagatgaaacatggcattcgtgttaagccgataggtttcggaccggagactagactctcgagacagatggaacaccgctctgtttcgatcttcaaactcttcaattcctctgcttttattttcccgactagaattgtcctcaatgatttctcgtcgtttgacgtaacggagacggtccggtaagtaactttagcgtccatggtcaaggtaaagccgttgcgtccaaaacctaagttgataaactccgttgagatctttggggataagaaatcgcacaaggaacgccaagggttgctgattgtggataggaattgattgtggagaagctttcggatgtggccgtgagtagaacgacaaatattgatataacgtgaacggacatgtgtacttccacttgaggagaagtcatgtcttttgcaatgttctaagcacacaaaagtttcatagaacaggtatgattcttgatttgatggaagctttaacgattgaggaggaggatgggatcaaatatgttggaacaggtctagaagagaagaagagaaaggcaatgagcatgatctaagctgtgtaagactaacaagacttacctacaatataagctgtgtagtctgttgaggaaaacattgatgagtctataagttgcatgtgaacttaaaaacagcaaagtttagagtttatgtgattacaattaatgatgctattacaaatttcaaacctcttcttgaatttagaattttaaaccttgataactaaatttcataaaatgcaatagagtagctagatgacaccctaatttgcatcctctgttccaatcatcatcatcgatcatagagcacagtcctacacatcgggcaagtgtttttgcggtttagccactccacgagacaaccattgtggaagacatgggaacaactcatgcgagtgggtgctgttttcgaactggagactagactctggagacaaatggaacacgactctgcgttcaaactctttgtttcctctacgctcatgaacccttgtagaaccatcctcgatatctttaatgctgcctcgtcgacacggacgtacttgtaagtaaccgcgacgctcacggtcaagtcaacaaaacctgagctgatagcacttgagatctttgggactaagtgatcgcacaaccaatggtcgtctctatggagtcgatcatggagtaacgattggatgtggtggtgactacaactagggagagtgtaattgatgggaagtgatttataggaaagcggagtggacgttgcggttcgatggccagtgccagggtttataaggatctcatccttaatggtattgacgatgaggaagatcgagtttgtatttccttgtgatggagagcgagagactctctcagcttggacctgaacgctcactacggctttgggaatgggatcattcatgtttgaaagaggcttctcaacacaaaacagaagaataagaatttgcaaatcgtaatgagagcaaattgagagagaagacaattgtgaatagctttagggttacgtagtgagtatatatatatgagctgtgttcaacggtcaatacatttcagattctagtttccttttgttctttgttaccaataaatttccttttttgccacaaagaaatttccgtttctttaattcttcttttgggatgatatctgttatttcttttgttattcaaaactacttgtattaactattaagagacattactcaaagtttgaatatttagatatcataattaaagaattcattcatatgatcattttttttttttgaatgaatgttagatttattaaaccaaaaaaagacctttgtacaatgaatgtaaccttatactaaaagttccgaattttttaaataaaagataccaaatacaataatcacttgggtcttccagcaccaaaccaacttcgcaagccatcctcaaatttggttgcggtttcctttagattagaaagtctgttccgaactatacgttcaatgtaagaagacatgagggtaggagacaagttttgttccccatgtcgacgcttatttctttcagaccatatggagtgcacacaaacttggaatacataccgtagaataaacctcaccgtgggggtgaatcttgaatccagcagcttagatacaatatcattgtatgaggtagtaaactgaccttgtaataaaccttctgcaatatcatatgatcatttctttttgaaaataatgttaaattatattcaatgaaaaatagcgtttgtacaactagtgcatcatgagattgaaatgagttacaagaatttgctacttaatttcgagagtcgaaccaagtttgtaatcccttatcataacgtctatctcctgtgagccgaatggttgaaaacctgtttctcatttgcttgtcaatccactctgttagtcgggtttgacggtttggagtttcaccatgccttctgcagttcctttctcgccatatagtataaatcactgtctgaaacacgtagcgggctatgaagctttccatacaatcacgccatggacctcaaactgaagagattaaaaagaatgccaatccgttgagtacttctctttgtagatgttttttgccactgcagcccatacttcagagcaaaagacacaagaaaagaaaagatggtctctagattctagagcgttgttgcagagaatacatgtcccaagagcgccactgttcctctgcaacatacgttccccagtagagagtctattactgaccgctaaccacacgcaaaaagaaaattttggggttgcatgtaaaccaaactccgttatgccaagtaaccgtgatgccctctttgcgaatatggttccaagtgtctctagtagagaacttgggttgtaaacatcgtgtttgcctctccacaatacaacatccggctctcttttgtgggtttgacgttttagttcgagcgcctcctccaacaagttcaatgtcacagtcctatgtctcctctgccgtctaaagtcccaagcctctgcaactgtcaatagcctgcttattcccatgtcaacaaaccttctgtttccaaccaagtccagcggcctacccatgttggaccatatgatcatttatctttttcagacatttttattcgcctaatcacttgttcactacttcattcatgttacctaatcttgacggtatattaattttactaattccaaatttgaagttattgagtttggtggtgtatatgtagataaatcttgtagatgttttctgctaaatatgtataagcaaaaagcatgtttaatttttcttaatgatcttagactaaggggagacaattgtcattaaaccttcaacctaaacctacctattataagacatgactcgacgactcgttgaacacaaaaaagaagaagataggactcatgattctgaaaaggtaagttataaggagacatttatttaccgcttcattactcttattgtttatcatcttctttcttcaaaatcttcgaagattgtgctgacaacaacttgaccagctcttgcttgatgtgagtcagaacaagctcgattacgtcttggctttgactgttgagaactttctggagcgtcgtcttcagactattgtgttcaagtctggtatggctaagtctatatccatcactctcgtgtcctcatcacgcacaggcatatcaggtattcatgctcttcgattcatttgtgcttgtaaaattaaaattttctctattcgaattttggactcaaggcgcatgagaacactcttggaagctagcacgggaaacatgaagacaaagggataagaaacaaggaatctataggagacaatggattattggtggtgcagaagtaacgtgattgtcacgttaatgacacatcaactattgtgtctggtcattgatggtgtagtggattatggtgattaattaatctactgaggtgtgtgcttctgtgtaagttctacattatgcaggtgtataaaagatcaaaacttcaagtctagatccggatgtcaaaggttctacgaggcaagtcagtagaagatttcaagcttggctcaaggtggatattgtaagaatatgatccaacttgaagaagcgtcaagaggaaaaagcaatagggaagaataacaaaaagaggagaagtgttttatgctcaactgtatcaaatacactaaaaaagagccagagggttaattccttaaggaatgaagtggaagatgctgaaggagatagagtctctcaagatgtatcctaattggccacacgctcgttgacacgtgtgaagtcgttagggttttgggtaatcacgtaggttacgtactatgttttactataaaaaagaggctccgcttcttagttgaacgaagccgttttcgagcgcttcgattgttggtagagcgagagattgctatagagagataggctgttttatctttttacctttttccttttgaataaaatgtaaaatttattcgaaacaactgtttacatccagtgcagtgttttgcactgaaatggttgtaatacgatgcttatgaaaacaaaaaccaaagagccgagctcgttcttattgtgatgcaaaccaaatcgccatgcacccgtcatatctttgattgggttttaaatattaacaaaacataattgaaaaaacatcatgtatatattattgtcacaaaccccaaaacttgtagatgtttttacataaaaatagaaatttagaaagatttaaatctttgtatgagatatgaatagaatataaatagaaaccccataactattttctatttttattattttatacaaaaggtatgaaatataaatatttttgtttctcaagatgtataagaatgaaaaaaaaattaatatgtaagaaagataaaaatatgtattaaaacttaaaaacactaaagagacacaaataagaacagttaattgaagagaaattgcaagaaaaatatatatatcttttatattttataatcatcagcaagaaatatttcattaaccaattagccaaacaagtcttacattataccataccaagtcttattcataattgaaagagacaaatgacgacgctgtagtagcaaacgtttgacaaaggaaacagcaaacataaataatcggacgagccaaggaaaatcacaggtacttattggcgagctgacctaacatctgtgggtaatatccgaggactctttccttttcttctccgcctttaaagacaatagtgatcggatgatattctatgcggtaatcctttgctagctccaactcctcgtcagtgtcgactgtgtagaattttaacatatattcgtattctgagtctaggaattcgagctcgggcatcaaactaccacattcggcacagtccttggctatgaatacaactattaccgggactttagattggatcacaagtgaattc

SEQ ID NO: 572 - DNA, 85356 bp, Arabidopsis thaliana
ggctcttcctgtggtagttagtagtagttactgtcaacagagaagaacaaaaaggcaaggagcatgatcattctcagtttaggagataagatcctgcgaaagataatgaaagaagaaacagctactggtatgatacaagttgtagacaaatactatatgactacttctttagctaggaggttttacttaagaggaaagttgcatagttttaggatggacgaaagcaagtctgttatgaagaacgttgatgagtttcagaggttgattgatgaattacgtaatgctaaagtagagatatctgatgaagaccaagctatatttttgttgatctctttgccggagcagtttgatgaggttagatcattgatgagtctgtgtagtctgttgaggaaaacattgatgagtctacaagttgcatgtgaacttaaaaacagcaaagtttagagttaatattattagaagtaatgatgctattacaaaacctcttgttgatatgttattagaagtaatgatgctattacaaaacctcttattgatatagaatttgaaaccttgataactaaattacataaacttttcattaaatgcaatagagtagctagatgacaccctagtttcaatcctctgttccaatcatcatcatcgatcgtagagcacagtccgacacatcgggcaagtgttttttctcttgagccactccacgagacagctactatggaagacatgggaacaactcatgcgagtgggtcctgttttcgaactggagactagactctgtagacagatggaacacgaatctgtttccatgttaaaactcttcaattcctctgctttcatgctccctagtcgaaccatcctcgattcctttgatgatgtctcctcgacatggacatactggtaagtaactgtgacgccaacggtcaattcaacgccgttgttcataaaacctgcgttgattgcagccgttgagatctttgggactaagtgatcgcacaaccaattgtcgtcgctatggagttgatcgtggagtaacgattggatgtggtggtgactacaactagggagactgaaattgatgggaagtgatttataggaaagcggagtggacgtttcggctcgatggccagtgacagggtttataaggatctcatccttaatggtattgacgatgaggaagatcgagtttgtagagactttcacagcttggacctgaacgctcactatgggtttgggaatgggatcattcatgtttggaagaggcttctcaaagagattcacaagaagtcgtaaattgagagaagagaattgtgaagatttaggagataggggtaacgtagtaagatatatataagcgtctgtgtgttcaactatatcttaggctaagattagcgaagatttatatcttaagaaatatctaagttatatcttagctaataaattgattaaatttaataaaagcagctaagattagctaagatttatatcttaactaagatattttcttaagtttaagaagtaaacaggtgttgtgtatttattgggtacacaaataaacaaaatgaaggaaaaaaaaaccattggagcataaataatttaaattttttcccttaagaacttcttacttctaaccattggagcataataagttaagatattctctaacatatcttaactttgaaaaagcaaaattttaagtaaaaaaaaaggttaagatccaagattaagatgctttaacatcttaaccactggagatgctctaggttctatagtttcttttcttttatttgtcaccaaaaagttcctttttatttgtcactaagagcatttctattggttatctcaccaaaataatattaatttaagttgaaaacctcattatcaaatacaatctctattagagaagcccaatgggtatctcataaatatattaataatatttttctttttttagcaaaaaaatagtgatcatattaatatttagtttaaaatttatgttaaattttcattaatattttttgaacaaatatcaatttataagttaaatgtactcaatataagtaatcttaatcttaataacaacaattaacaatacaatccattgtaaataatacaatcaaagagttataatttcctaaataacacaattaagcaaaaactatatagagtaaacttaagaaaagtaatataattttgttaactagaaatggttttatcaaatttttgacaaaaatcattaaatataattaaaaaacagatatttttgttttgaaaaaattaaaatagcatttttaaaattattacattatgtttaggtatgcatttaattattatattattgtaggtataattgaatattttatattaacattaagtaatatcaattcaaattagtattaatatataatttaaacttgtatactggtgcttgatatatagataacattttttctttatgatttatatataataacaacatatacactactttaattaatatactaaactatgagataattgatttatcaaagaaaaacaattatagaatgacaagtgttcatgtttcgagagagggtttatctcatttgaaacctcaaatgaagatggcctaagaagtttcgtatctctctttttttttgggtcttttgggtttatatattacgtattattgcagccagtggtaattccaggtagatatgtcagtgtcaatatttcctaactttgattggagaatagcaaaatcttactatttcctaattttgatattacaaactgattcaaaaccgtaaaacacacatattcaatttattacactaaaaacagagtgtgacacacaaactcagaatttcaaacttgaacttgaaaaccttgataacaaaaccacattaaataaaatccttaagaaactaaagcttgtgacccacgttgttcaatcaatagatgaaacatggcattcgtgttaagccgataggtttcggaccggagactagactctcgagacagatggaacaccgctctgtttcgatcttcaaactcttcaattcctctgcttttattttcccgactagaattgtcctcaatgatttctcgtcgtttgacgtaacggagacggtccggtaagtaactttagcgtccatggtcaaggtaaagccgttgcgtccaaaacctaagttgataaactccgttgagatctttggggataagaaatcgcacaaggaacgccaagggttgctgattgtggataggaattgattgtggagaagctttcggatgtggccgtgagtagaacgacaaatattgatataacgtgaacggacatgtgtacttccacttgaggagaagtcatgtcttttgcaatgttctaagcacacaaaagtttcatagaacaggtatgattcttgatttgatggaagctttaacgattgaggaggaggatgggatcaaatatgttggaacaggtctagaagagaagaagagaaaggcaatgagcatgatctaagctgtgtaagactaacaagacttacctacaatataagctgtgtagtctgttgaggaaaacattgatgagtctataagttgcatgtgaacttaaaaacagcaaagtttagagtttatgtgattacaattaatgatgctattacaaatttcaaacctcttcttgaatttagaattttaaaccttgataactaaatttcataaaatgcaatagagtagctagatgacaccctaatttgcatcctctgttccaatcatcatcatcgatcatagagcacagtcctacacatcgggcaagtgtttttgcggtttagccactccacgagacaaccattgtggaagacatgggaacaactcatgcgagtgggtgctgttttcgaactggagactagactctggagacaaatggaacacgactctgcgttcaaactctttgtttcctctacgctcatgaacccttgtagaaccatcctcgatatctttaatgctgcctcgtcgacacggacgtacttgtaagtaaccgcgacgctcacggtcaagtcaacaaaacctgagctgatagcacttgagatctttgggactaagtgatcgcacaaccaatggtcgtctctatggagtcgatcatggagtaacgattggatgtggtggtgactacaactagggagagtgtaattgatgggaagtgatttataggaaagcggagtggacgttgcggttcgatggccagtgccagggtttataaggatctcatccttaatggtattgacgatgaggaagatcgagtttgtatttccttgtgatggagagcgagagactctctcagcttggacctgaacgctcactacggctttgggaatgggatcattcatgtttgaaagaggcttctcaacacaaaacagaagaataagaatttgcaaatcgtaatgagagcaaattgagagagaagacaattgtgaatagctttagggttacgtagtgagtatatatatatgagctgtgttcaacggtcaatacatttcagattctagtttccttttgttctttgttaccaataaatttccttttttgccacaaagaaatttccgtttctttaattcttcttttgggatgatatctgttatttcttttgttattcaaaactacttgtattaactattaagagacattactcaaagtttgaatatttagatatcataattaaagaattcattcatatgatcattttttttttttgaatgaatgttagatttattaaaccaaaaaaagacctttgtacaatgaatgtaaccttatactaaaagttccgaattttttaaataaaagataccaaatacaataatcacttgggtcttccagcaccaaaccaacttcgcaagccatcctcaaatttggttgcggtttcctttagattagaaagtctgttccgaactatacgttcaatgtaagaagacatgagggtaggagacaagttttgttccccatgtcgacgcttatttctttcagaccatatggagtgcacacaaacttggaatacataccgtagaataaacctcaccgtgggggtgaatcttgaatccagcagcttagatacaatatcattgtatgaggtagtaaactgaccttgtaataaaccttctgcaatatcatatgatcatttctttttgaaaataatgttaaattatattcaatgaaaaatagcgtttgtacaactagtgcatcatgagattgaaatgagttacaagaatttgctacttaatttcgagagtcgaaccaagtttgtaatcccttatcataacgtctatctcctgtgagccgaatggttgaaaacctgtttctcatttgcttgtcaatccactctgttagtcgggtttgacggtttggagtttcaccatgccttctgcagttcctttctcgccatatagtataaatcactgtctgaaacacgtagcgggctatgaagctttccatacaatcacgccatggacctcaaactgaagagattaaaaagaatgccaatccgttgagtacttctctttgtagatgttttttgccactgcagcccatacttcagagcaaaagacacaagaaaagaaaagatggtctctagattctagagcgttgttgcagagaatacatgtcccaagagcgccactgttcctctgcaacatacgttccccagtagagagtctattactgaccgctaaccacacgcaaaaagaaaattttggggttgcatgtaaaccaaactccgttatgccaagtaaccgtgatgccctctttgcgaatatggttccaagtgtctctagtagagaacttgggttgtaaacatcgtgtttgcctctccacaatacaacatccggctctcttttgtgggtttgacgttttagttcgagcgcctcctccaacaagttcaatgtcacagtcctatgtctcctctgccgtctaaagtcccaagcctctgcaactgtcaatagcctgcttattcccatgtcaacaaaccttctgtttccaaccaagtccagcggcctacccatgttggaccatatgatcatttatctttttcagacatttttattcgcctaatcacttgttcactacttcattcatgttacctaatcttgacggtatattaattttactaattccaaatttgaagttattgagtttggtggtgtatatgtagataaatcttgtagatgttttctgctaaatatgtataagcaaaaagcatgtttaatttttcttaatgatcttagactaaggggagacaattgtcattaaaccttcaacctaaacctacctattataagacatgactcgacgactcgttgaacacaaaaaagaagaagataggactcatgattctgaaaaggtaagttataaggagacatttatttaccgcttcattactcttattgtttatcatcttctttcttcaaaatcttcgaagattgtgctgacaacaacttgaccagctcttgcttgatgtgagtcagaacaagctcgattacgtcttggctttgactgttgagaactttctggagcgtcgtcttcagactattgtgttcaagtctggtatggctaagtctatatccatcactctcgtgtcctcatcacgcacaggcatatcaggtattcatgctcttcgattcatttgtgcttgtaaaattaaaattttctctattcgaattttggactcaaggcgcatgagaacactcttggaagctagcacgggaaacatgaagacaaagggataagaaacaaggaatctataggagacaatggattattggtggtgcagaagtaacgtgattgtcacgttaatgacacatcaactattgtgtctggtcattgatggtgtagtggattatggtgattaattaatctactgaggtgtgtgcttctgtgtaagttctacattatgcaggtgtataaaagatcaaaacttcaagtctagatccggatgtcaaaggttctacgaggcaagtcagtagaagatttcaagcttggctcaaggtggatattgtaagaatatgatccaacttgaagaagcgtcaagaggaaaaagcaatagggaagaataacaaaaagaggagaagtgttttatgctcaactgtatcaaatacactaaaaaagagccagagggttaattccttaaggaatgaagtggaagatgctgaaggagatagagtctctcaagatgtatcctaattggccacacgctcgttgacacgtgtgaagtcgttagggttttgggtaatcacgtaggttacgtactatgttttactataaaaaagaggctccgcttcttagttgaacgaagccgttttcgagcgcttcgattgttggtagagcgagagattgctatagagagataggctgttttatctttttacctttttccttttgaataaaatgtaaaatttattcgaaacaactgtttacatccagtgcagtgttttgcactgaaatggttgtaatacgatgcttatgaaaacaaaaaccaaagagccgagctcgttcttattgtgatgcaaaccaaatcgccatgcacccgtcatatctttgattgggttttaaatattaacaaaacataattgaaaaaacatcatgtatatattattgtcacaaaccccaaaacttgtagatgtttttacataaaaatagaaatttagaaagatttaaatctttgtatgagatatgaatagaatataaatagaaaccccataactattttctatttttattattttatacaaaaggtatgaaatataaatatttttgtttctcaagatgtataagaatgaaaaaaaaattaatatgtaagaaagataaaaatatgtattaaaacttaaaaacactaaagagacacaaataagaacagttaattgaagagaaattgcaagaaaaatatatatatcttttatattttataatcatcagcaagaaatatttcattaaccaattagccaaacaagtcttacattataccataccaagtcttattcataattgaaagagacaaatgacgacgctgtagtagcaaacgtttgacaaaggaaacagcaaacataaataatcggacgagccaaggaaaatcacaggtacttattggcgagctgacctaacatctgtgggtaatatccgaggactctttccttttcttctccgcctttaaagacaatagtgatcggatgatattctatgcggtaatcctttgctagctccaactcctcgtcagtgtcgactgtgtagaattttaacatatattcgtattctgagtctaggaattcgagctcgggcatcaaactaccacattcggcacagtccttggctatgaatacaactattaccgggactttagattggatcacaagtgaattccattccgatgcagatagactttgtactacatacatcaattgaatatagagatttaaaacgttatatagaaatattactcaagcgaaatacagataaatttattacaacatgtgtttttttggtaaagatgttgtgggaatagtaacaattttctacatagaaaatgaaaaattatgtcgctattcctgtgaacaaaagtcaaaaactgtaagataacctaaaaatctaagtgaaaattatcttcattacaatatttcgaaagtatagatatgatattaaaacaattcatgttttcaaaataccttctacacaaattggagtttttttaactttttataattaactttaaaacaaatctagttaagttacccaagccatcgtgagacggtagtgatgaagacacgtaagccttgatgaagggatccgaatccgatcctgaacacatgctaacattaaatcctaaacacaccaagcacgtcaccgtcactaccaagtgatacaaacccctaatttgctccatcgatgctttctgatctctcaacccgttttatgttatgaaaacaaaaccatctactctaaatttataagcgtttaagatttaaccaccacatctctcacagaatcatactatatattttacatggtaaataatgtgttcttttattagcataaacaaatcactacatctcagtcatggttttgttttgtctttatcttccccaacaacacttaaaatactaaacacgagtttcccgtatacattattagtattgttttttcgtaaaataacgcaatgaaacagctcactaaaggcattatcacgatctcctaactaaatttgtgctgactaccgcaaaagaaaaaaatatatataaatatggtaatacattaccaagtaattctgaatttgaatctgtttggaagagattgcaattttcttaaaaaagaatttacagaaagactggcatgagtaaggaagattataggcctcactttattagaaagaatacattactacagtctcactagtctttatttttttttcttagatgtagttaaaaatatattttaagtcactattttttgtatgtttactttacatctatctccaaaaaaaaaatgatagtcaaatctttaaagtcaaatttaataggtaatataacttgtatgaaaatatgggtttacaactcaaaaccaattggcaagggataatttgatgattgggttgatgtttgcttgtgatggagagagtttcgtttgatgattcatgaaacgagaattcatgttttgaaaccgagaagagattcaaacagaggagaagaagaagacttcgcaaatcgtagtgactagagagagcaaattgagagagaagagaattgtgaatagctttagggttacgtaatgaggatatatcaaacaatgaagttttccttttttttctttgtcattgtttgacaatgaagctcattgaagttcattgtttccgtttccgtttgtttccttgtaacgccctcaaagtctccatatacaatggagtaaattcaacaattctagctctaatcccaaagaaaatggaagccaaggagattaaagattacagaccaatctcctgttgcaatgtcctctataaagtcatttcaaaaattattgcaaacaggttaaaacgggtgttgccacagttcatagcggggaatcagtccgctttcatcaaggatcgacttttgattgaaaatctgctgcttgcaacggagttagtcaaggactatcacaaagattcagtttcagaacgttgtgctataaaaatcgacatctccaaggcttttgattctgttcaatggtccttcctcaggaatgtccttttaactctagactttcctcaagaatttgttcactggatcatgctttgcgttaccacagcatctttctcggttcaggttaatcgggaactagctggatattttaatagtttgcgggggctgcgtcagggatgctctttaactccttatctctttgtcattgtaatggatgttctatccaagaagcttgacagagcagcaggtttgaggaaattcggttatcatccaaaatgtaaaaatcttggtctaacacatctttcttttgctgatgacattatggtgctcaccgacgggaagcttcgttcccttgagggtattgtggaggtttttgatagtttcgcaaagcaatcgggtcttaagatcagcatggcgaaaactacaatttactttgcaggtatctcgaaatctgtatgcaaagaatttgaagaccaattccattttgcagtaggacgtctcccggtgcggtatctctgtttacctctcgtcaccaagcgattcacttcacaggactacagcccgctactcgagcaaataaagcgacgaataggaacttggacagcccgtttcttgtcttacgcgggtcgtctaaatttggtcagttcggtcctatggagtatttgcaatttttggctctctgcttttaggcttccccgtgaatgtgttagggaaatcgataagctatgttccgccttcctctggtcaggaccagaactgagtactaataaggctaagatcgcatgggagacagtttgcaggccaaaacgagagggcggattgggtctgcagtcaatcaaagaggctaatgacgtttgttgtctgaaactgatttggcgaatcgtctcgcaaggtgactcgctatgggtgcagtggattaggacttatcttctcaagcgcaacactttttggtcttttcggtcagcatctcagggctcatggatgtggaaaaagctgttaaaatatcgggacactgcaaaagccttttctaaggtcgacattagaaatggtgaaactgcgtctttttggtatgatgattggtcatccaagggccggctgattgacgtgctgggagaacgcggtcaattcgacatggggataagcaagtttaagacacttgcagaggcatgggatcgcaggagatcacgttatcaccgagcagaaacgcttaataccattgaacaagaactccttttggcaaagcaaaacagagtggcagtagaggacgtctttctttggaaggggaaaaacgatactttccggccacagttttcagcacgtgatacttggagccacacacgttctatttcgacagaggtcacatggcataagagtgtctggtttgcaggagggactcccaaattctccttctgcgtttggatggcggctcacaatcgtttatcaactggagatcggatgctcagctggaacaggggtctctccacaggctgcgctctttgtaaccacatgctggaacccgtaatcacctttttttctcttgtgtttacgcctcagaaatttggcaggctctagcttggaacatctatggagcaaagtatactacacactggaatgacttgatcgcagcaacctcaggacattggcaggatgatcgaacaacgggcttcatagctcgctatgtctttcaagctgccgtttataccatctggagggaacgtaataaccggcggcatggtgaactaccaaactcaccggtacgtctaatcagatggattgacaagcaagtacgagatcgaatttcattactcaacacaagcggtgacagaagatacgtgacgggattacaagtttggtttgcagcaagaagttaactttttttttcactttgatcaaagttgtatttagctttttcaaacacacgttgcactgagtgtacaaatgacacctttcttttgaatctaatttaacattacattcaaaaaagaagatcaaaagcttcatatatagaagaggtgattacggaagatcagagtccgtgctcatcttggtattctttgtttgatggaagctttaaaagattgaagaaaaggatggaaacaaatatgttgaaatagctgaagtgatttgtgctgtattatccaaagagttgaaatttgcagaaggacttcatgtgagaggtgaaacaaatcacattgaagaagacgcataaggaatcatcatttaatttcagcaacagcttgatgtgaaagggtattaaaaatttcaatcctcttctctaactgtgttaagcccttaaaaacaacaaattacattcaatttcttgaactagttaaagagcgtgcgtgacacaaaattagaatttctaacttctattggaaaccttaatactcaaaattacatgaaatttccttacataaaaccctaatttcaatctttttttgcagtcatcaatcaatcgtagagctcagtccgacaaaggggacaagtgttcttacgcttgagccactctaaaagacagccattgtggaagacatgagaacaagtcatgcgtgtgatgtccctaggtttaggaccggagactagactctcgagacagatggaacacggctctgtttccatcttcaaactcttcaattcctctgtttttattctccctagcagaaccatcctcaatgatctctcgttgtctgacgtaacggagacggtcaggtaagtaactgtagcgtccacggtcaaggtaaagccgttgcgcccaaaacctaagtctattgcagccgttgagatctctgtggctaagtcatcgcacaagtaactccaaaaggggtatccgactaatcgatcgtggagaagcgttcggatgtggtcgtgactagaactacagagattgatattgatgagaaaaggttctgaaacctgagtccggcgggtttggcgaccggttgtttggtcttcaatgatctcttcagatatgttttcgacgcttatgatgactggtttaagtttgagtttggttctgatggagagagtccccttccactgacgtgaacttccatttcaagagaagtcatgttttgaaacgaacagagaaaatcccaaagaaaacaaaatcagaggagattcacacaaagaagaagtcgaaaatcgtaatgagagcaaactgagagaaaattgagagagaagagagaattgtgaatagctttagttagggttacgtagtgacagagatatataaagcgtgttcacgaagaaatttcctttttttatatatgggcttttaatttgggtcgacaatttaacttgggcttttagtcctgatggattatgggatgagatgcataatcttgtttatggctaattaggagaagtttggttcttaattatgtggtgtggttttgtttaaatatgcttggttcaattccggttaacctttggttaactgttttgtctcttcctgttttgttctgtgacgttactgtaatttcactgataatgcaaaacagagagacgtcgtttgtttgcagtgatggctctggcttttacggaaacttcagtactcttttcgtttaatttcattgtaattcttctcatataatagacctgtgtatgttctagcttatgatagagcactgtaagacaatttacgttttttgttttagtatttttttttgtgcacagaagttgttcgacgaaatgactgttagacagctactggtatgatacaagttgtagacaaatactatatgactacttctttagctaggaggttttacttgagagaaaagttgcatagttttagaatgggcgaaagcaagtctgttatggagaacgttgatgagtttcagtggttgattgatgaactaagtaatgctaaagtagagatatttgatgaagatcaggctatatatttgatgatttctttgccagaacagattgaaaagtttgatgggagaggtgattacattttggggaagacgaagatccttgctcgttttgagattcttgatgtgattgatgctttaaagattgaggaggatgagaacaaatctgttggaacagatgaaggtaagagtcattgtgtagctttgagtctagatctagaagagaagaagagaaaggcaatgagcatgattgttcagagcgtagaaaatcagaatctgcgaaagaaacttatgaaggagaagacagctgctggtatgttatatgttctcgacaaactctacattactagctagatctgctggtagtgtagagtgtaggactggcaggacttacctacaatataagctgtgtagttttaggatatatgaaagccagtctgttgaggaaaacatcgatgagtttgagagattagttgaagacgaaagcgatacgtttgctgatttctttaccaaattaatttgatgaccttacgctagacgaagtgatttgtgctgtactatccaaagagttccaaaggatataaagaaactgcagaggaacttcatgtgagacgcaggtctgttagtagagataggtcaaaatccaaaggagagaaaggggcttgctggatttgtggggaagatggccactacaaaaacgactgtccatctaggaactctgagaagccgaaggaacatgcttataaagcacaagaagcatctgttccaagaaggaataatgcttgagcattttaggaagaattatactttgtgggaagtgccaatgtatgtatctctgtaagtgtcaatatttcgtaactttgattggtgactagcaaatatgttgaagtagctgaagtattatccaaagagttgaaattgcataaggatattataaagacacactgcagaaggacttcatgtgagaggtgaaacaatcacattgaagaagacacatatgaatcatgatttaatttcagcaacagcttgatgaagggttttggttattttgttaagaatttaagagttgcaacttgcaagtgaataacttaaaaccgacaaagtttgtagttttttgttgtgattaaaaacttctctaattgagtaaaactcttaaaaacaacaaattacattcaatttcttcagcgtgtgtgacacaaaattagaatttttttctatcgaaaaccctaatttcaatctttttctaacttctaatggaaaccataatttcaaccttaatacgaaaattacatgaaattttcatacataaaaccctaatatcaatctttggttccagtcatcgatcgtagagctccgtccgacacaggggacaagtgtttttacgcatgaaccactccaagagacagggattgtggaagacatgagaacaagtcatgcgtgtgaggtcgctaggttttggaccggagactagattctcaagacagattgaacaagactctgtttccatcttcaaactcttcaattcctctgcttttatccttcctagtagaactatcctcaaagatttcttgttgtttgacgttaccgagacagtccggtaagtaactgtgacgaccacggtgatggtaaaaccgtttcgtccaaaacctaagtcgatagccgccgttgagatctctgaggctaggtcatcacacaaccaatggtggctagcgaatcgggtacggagaagtgatcggatgtggtcgtgactagaactactgagattgatagtgtcgagacaagatagagtagccggagtggaccggcgggtttggtgatcggttgtttggtttacaaagatctcttcagatttggtatcgatctcaacgatgactgagtttgcatgtgatggagaagagagtttcctttgaagattggtgaagcgaaattccactttgcgagaattcatgttttgaaacggaaagagaaacagagaagtagaagaagaagacttggcaaatcgtagtgactagcgagagcaaattgagagaggagagaatttgtgaagctttagggttacgtagtgaggatatatatacgcgtcttcaacgttcagatattttaggttctagtttcctttttttctctgtcacctaacaatttcctttttttttaagaagtttccttttttcctttttaacagttttatttgtagagtttgatttgaaggggttttggttattacttattagtttaagacttagcaataattattggtaagtttttagtgggttcttaaattaatttgagaataaaattaaatgctaaaggatgtattaacttaagagggcctcttatacaagaggcgaaaaatgatggtaagagacgatgatgtggcaaactatgtgtgggccatgggaaaatacaaacttcattctacgaagactaatatcttaagatgtgcaatgaaaacaaatcaaaatccttgaaaggcttaaagccacagaaaagtaaatcaaactagtttcaatacctctatgtcaagaactcaatgcaatccagagacttaaaaatcatacttttgttggcgacttgattagattctgctgggataataagctctgactgcaaattgaggacgaatactttattgagcaacacatgtacttccaaattgtattatagccatatttagctcaatacactccctgtaacacaatataagtaggtctcagcctcaaagtctagctttttaactctaaaaatgcagaaagcaatcatttttttctcaaaaatttgttttgattatgaactcttaaataccaattatgaatctcttttatatctttgtgtcaatacaccaaacaccaccaattacttcatcgcatatattccttctctccacaaaaccacacataaaccaaaatcatatctttttttttttaagaatcctaacttaatatactatcattgaggatgactaaacttaaaaatcttacccaaactcttaactaccaaattttcaaaatctattcctaaattattgctaagagccattgttaataacctcccattaatgatggtccaatgatcttatttaaaacccttaaaagcacaaaattacattcaatttctggaagcacagagcgaatgaaacaaaattagatttgaaaccttaataaacaaaatcacataaaatttccccaatatagagcgtacgtgtgacacaagttatgcaatcagtagatgaaaccctaatactttcaattcttagaacaagtcatgcgtgggagatcgctaggtttcggactggagagatcgtggaaacagatggaacacgactctgtttccatgttcgaactctttaattcctctgcttttatcctctctagtagaaccattctcaatgatttctgtgtcgtttgaagtaacggagacggtccggttagtaactgtgacgaccacggtgaaggtaaagccgtttcgtccaaaacctaagttgattgcctccgtcgcgatctctggggctaagatatcacacaaaaaatggtagctaacgaaccgactacggagaagtgatcggatgtggtggtgactagaactacagagattgatagtatcgaaaaaagatggtgaagccggagtggaccggctggtttggtgaccggttgttgggtttacaaagatctcttcagatttggtttcgatgaaaacgagaactgagtttggttgtgatggagagagtttcctttggttgatgaagcgtaattccactttgcaatatttcatgttttgaaacgaaaagaaaaacagagaagagattcaaacagagaagaagacgacttcgcaaatcgtaatgagagaaaattgagagagaagagaattgtgaatagctttagggttacgtagtatagtcacatatttcaggttctagtgtccttttttcttgtcatcaaacaaatttccttttctttaagaagtttccttttttccatgtgttttgggtcgataatttactaaatattggagacaatgttaattccaggtggatatatgttacttatttcttttaactgattctcgattaattttaagagtagtacgtaaaatagatctttatatttttggcaaccgatattaattagaattcaaaatagttaatcccaaaaaatattgtttacatatatggtataatacggtttgatacgaatctttcgtgctaaattatctacttttacatttgcactatgaaaaattaaaaataaagaaaagtttgtgcatttttctgcaattattccaaatatattaaaaatatgggtaattcggttgggaaagacagatcaataaaatgaaagaaattatatcaaaatccaaatattcttggaaattgattcataccgaaatctaatcaaaacatatgtgaaaatagatgttgatgagtcacatgatgaccattaattattacatactttacgtcgttaactgagaatgactgctacaatcacggaccattcacggcgtcaacgttgacaggcagttgatataggagactctgttatctcgccgttatataattcctatcgaaaatcagagcaaaaaaaaataaaaaagattaattgcaaagttgttcgtgaagagcaaaagcgaaattaaatacataaattcgatcggatgttgaaaatctccgatcggcgatgaaaggcgtctcttcgacgcccggagattacgtctactttaaatctcaggttcctcttcacaagattcccgtatgtttcttcttcctctctctctctttgacttttgatgaattttcgattctgcattctattcggctactaaattaggtttaatctcgagcttttgaggttttgatttttgtttttttttttgttgattttcgattaatctcatgtgggttttaatcgtttgggtttatgcagaattttttgtgtgagtagttctatcgtaaatgggtttatcctgctgagtttgggttcaaattttatgcttagaattttaatttttgggttcttgtctaaaagcaagaacttggtagtctttagtttagtgatgggtattctccatttttgatctttttaacttctgtagattcttttagtgttgcttttgatttgatctatgagtagcctgtgacacacttagtgatttgtctttgtttatgttcgcatatttagttcttagctctactaatcccaagcaactattgaatggctctatagatgtaatgtttgttcgggttgtgttgcttagagtttggaaaactgtgatttgttaagcatttgtacatgtatgtccactgtttcaagcttcggaatgaaagatttcattttttttgttttttcttggaatgtcatttgctcagagcataaacaatcttataaatatctagctttatgtgcatgctaactgcagattgggacaaagcaatggcgttactatgactttggtccaaagactgttcctccgctcatatgtattcctggaattgcaggaactgcagatgtttactataaacagattatggcactctctatgaaggtttgtcaagttctagtctttcaacagttatctgcaaacaatcttttcttaatcacaggtagctttaaacatttgttaggatatggtaacttagatgcttatgtgttgatgtgatccttggggactgattagatatctccaaaaatgttgaacttatgttgttaaatctgcaattccagggttatcgggtaatctcagttgatattccacgggtttggaattatcatgagtggattcaagcatttgagaagttcttggacaccattgatgttcatcacgtaagatctctttaagttacaaatcaccatctaagttcctaaatttttttattggtgcggaaatatatggcattgtaagtgattgtacttgaccattcttaataggtgcatctctacggtacttcccttggaggcttcttagcacaactctttgctcatcaccgtccaaggcgggttaaatcattagttctatcaaatacatatttggatactcgtacttttgctactgcaatgccatgggctcctttgtatgtctctcttatacgattattccttctttatttttattgtttgtgcctaagtatttgtactgactctcaacgcttttcgtgatgctctgtgcagtgtcagttggaccccttcttttttgcttaaacgatacgtcttaacaggaattcgtgacggacctcatgaaccctttatagctgactctgtcgactttgctgtttctcaggttgctatcctgattatttcatctatgatattttcttgaacggatctgaataacatgtggacaaggaattttagataaacttaccagctcggtttctttggtttactctgatttaggtggagacattgtcgaaagatgatttggcttcccggttaactttaactgtggatgctgcttccgtgggatctctactactctctgattcttcagttactataatggatgtaggtttcgattagctatatacgggacttttcgtattatcaatgcaagtaattttatcgttgtctaacaatgctgttatgtcttccaaatcagacaaatgattactgcgcaataccacaacatcttaaagatgaactaacagagaggtatcctgaagcaaggagagcttacttaaagagtggaggagatttcccattcctatcacggcccgacgaagtcaatttgcatctacaggtacatatctactcagtatctaaagccaaatttgaagtatacatatactcagtttcgacagccgaatttatatactcctaaggctcttttcaagaaattatgaacttttaaagaaacttgaaacttctctacctattttttagatttcataccgttgaagggatttttttttccaatcaaaccggttttattgcttggtaaaggaacatcatgttactgcatcaaaacattatattcttatgatgaatctcactcttatgttttcagctacacttaaggcgggtaggagtagaaccacgacccgaagtggttaaaagcattccaaaaggcggcgcagatggcacagacggtagcagccagagcaagaagaagagtgatgaggagaaggacgaccgtaacaacaatatgcctcaagactctggaagctcatcttcagatcaatcaccgacatttccagaaagttccggaagctccaacgatccgcctttacccacagacaccattcagttactgagttcatcattgaacaacctcatattagttcaactcgctggtgaagtttatcagtcttgtgtggttttcacattgtgttactgtacattggttttggttcacggtggtggttttatctccagacaattggtttagtgttctttatttatttattacctcttttgttgtttaaatctttttacttttgggtttctttgatctgttttggtttctcttgactttttgtataagtttgtaagacaaagcaagagttctctgtatgtttcaagttattacacttttggaagaaaactttggttgggttttgggattaaaccaatgtgctttctattatttacacattttgctcttttaaaatttagtcgctcattatttatttgtttttatcttttactgtattcaaaacaataacagtaataacctaatgcagtagaaatttgataattttctatgaacagtggtgtgttttgttccctaataaagttaaggaagaaaattgtaacatttacaaagttcagggttataggtgttatattttgtatttcaattcgtcttcttctttgctccagattgaacttacatgagaatcgccgaactctaatcggatccgggtcgggtatgtaatgtaaaccgggttttttgaagcccccatcttctccgtcgattttaaagatcccggcgatgttttcaagatttgtcctaaaaagttggagacctaaaacccaaaccacatctctcaattcaatcaaaggttttagctttagctctagctcgataaaccctaaacccaaaatccgagtaggggtttggtgggatctagacaacaaaccaccagcctctttcccgccttacgacgccgccgtcaagctccgaaccgccgcgtcgtctttcggaaccgtgaagctaatgatggcgtatgcgaatcgtcacgcctttagctacgttcctttagaagttcgagaacagaggaaagataggaaattgctaaacaaattagagaacaaaggtttagttaaaccaccggagccttacttctgcggtgtttgtgaccggagattctacactaacgagaagctaattaatcatttcaagcagattcatgagacagagaatcagaaacgtatgagacagattgaatcttcgaaaggacatcgaagagtgagacttgtggctaagtattcgatgaagattgagaagtataaaagagcggcgaggaatgttttgactccgaaggaaggttacggtttagctgatgagctgaaacgagctggtttttgggtgaagatggttagtgataagccagatgctgctgataaggcgttgaaggaacatttggttgaagtgatggataagagagaagtggagtgtgttgttttagtgtctgatgattctgattttgcggggattttgtgggaagctaaggagaggtgtttgaggacggttgtgattggagattcgaacgaaggtgcgctgaagcgagtagcggatgttgcgtattcgtggaaggaagtgacgatggggaaggcgaagaaggaagttgagaaagttgtggggaagtggaaggatagagatgtgttgaagaagttggagtggacttatgatcctgctttggagaaagagagaggtggttcttgcggtgtttgggattacgagtttgattatgatgatgagattgagaatggaacagaggtggaacctgtggagattggtgatggtgttgactggtggaagatcgatactgaagatggtgttggatcttcaagaacttgtcgataacatcatcgcatatgtcgtggttgattgcgcagaggaagataacatggtataggctagagaacaatcttgtgaatctattggcatattacataaacttcaggctagagaacattcattgtttcttgttataagattatgcagtgatttgatttgttcttccaaaccatcatcgttagtcaagtgattagagctatgtaaaaattggtcagaataagaataaatatatgtttgaattcacaagaaacaagtgacaatagattgaattactacagagtatatgcatcaaaatccaagctactttattcctccgacatgatggaaaagacaattgagtttcgacaattgaaacatctaagtgatgaagctgtacattgctcaaaatctactaacaaataaatgaagcaaaatctagcaacacagaaacaatgcagatacgtaagtgatttttcctggcaatgcaagtgctcggtttcaaaagcttaacctagagcgaactccaagctcaacaaggggaaacagagaccatgacttaagcagagagacagagctcaccaagaactcttcttcttcgagccagtgtaaaaacccatataccatttcacaaactttttcaaacccgtctcaagatcaaccgcaggtttataaccgagctctgcttgcgctaacgtgatattggcatgagtaaactcaacatccccattcctcggtagaggcatgatctttttcttagctttcatcttcaaaagcttctctaatatagtcacaagcttagtaacaggaacaggagaagtattccccaaattataaatcctaaacatagcaggacctttcttcttaccaccactaccagtactcttctcagcagtatctaacgcacctaaacaaccttttacaatatcatcaatgtaagtgaagtccctagcaacactacctttatcaggagattcaaacacagtaatcgtcttccctttaagaatatctttagtaaagaagaaatacgccatatctggtctaccccaaggtccatagacagtgaaaaaccgcaaacccgttaacgataatccgtagatgtgattgtaagtatgcgcaattccttcacctgctttcttcgtagctgcgtacaaactcgctggttgatcggtacggtctttctccgaaaagggtactttcgaattcagaccataaacagagctagaggaagcccagactatagcaggttgcggattcgctgatttcgatacttctaatagattcacaaacccagcaatgttactgttaacatatgagccagggttttgcattgcgtaacgcacaccagcttgagcagcgagatgcataacatgtgtgaagaggacaacatcaaagagctttctgagtaaaacggcgtcgtttatatcgccttcgactacgaaaacacctgatctttctaaaaggccttgtcttgctcgtttaagctttggatcgtagtatcgattgaaattgtcgagacctagaacaccatcgccgcgtcttcgtaacgcgatcgagacgtgagtaccgacgaatccggaagctccggtgactaataccgttaaaccgccgtgagacctaggacgagcggatttacggacttgtttctcccagtgagagccgccgtatttcgcggcggaaatggaggaagaatcgttgagattccggcgagatggtgacggaggaggagataaaacgaggtagaagaggaagagagcgaggaagagagaagcccaaagggtgagttttgagagacggaggtaacggtggtggtggagaatcccgtacggtggaactttatcggttttgtactttccgggagtagaaggaagatcatcaaggtgagacattttcaccggaggaggatttagaaatcggagaaaatgtcgattagggttaggtttggatttttgggtcttaaggaagcaaaattgagcaagtcaaaaatgagaggattttccgggaaagaagaaagagacgatcttttacttacttgttgtaattaaattaaatgtggatggtttaatttggttaatgatgtaaatttatttatttggttcaatctttaagatatggtaataagaaagctgccagagagtatatttagattcatgaattttagattgcttttcaaagttaaaacgtgtttgtagattgttgacatttgtatagttgtattgcattctatattgatcatgttatgcatgtacttttgtacacgatcacatatacactatttttacacgcaataattgtttaataatatttactacttttgcttttaacttctgtatttctttgttccgattgataataaaaagaaaaattatacaataacaaaaggttataagaaatgtgaaataacgggggtaataatgataaaaatagatataaaatcgatcgtatcatgtcatatatataaataatatctttcgggattaactttttttagttctaatttatatcgattgacaaaaaagtaaataatacaaaatcggttatttttgaggaattttattacgagttattttttattttatgaaattgatctgttttttaggaggtaaacaataaaattgcattaaaaaatgtagtgatttttttattttttaataagaattttctacttataatgtgaacaatactatgtggatacatgctagtatgttagcaatgtgaacaatattcgtgataagttaaatattattttaatttagtttatgattgttatatctcacctaaccattattttcgacatcaaacgaaaattaatgttatatattcctagtgtcatagtaaaagctttaagaaataatccacatttaataagatatacaaatcgtaatataccatataatcacgcaacactgatattaatcagcttagtatagttaacctatcagaaaattgatctctttataataaaattctatttctttatggtaataaggagccaaatcaattactaccaaaatatcggttatgccatatacagttaatttgtaattactctggttagattaggatattatcaaaatcaagattgactttgtccttctagcgatcattaactaattttactagagcataaccggctgggtcaaagaaatttgcttttattgcacaaaattctaaatttatttcaaaaaattgttgtttgacgcttgtactaattatcaagctagtccgtacacatcgtctgatatacactcatttggttgataggagtatttttctcctagtcctgggcgtttgggtattcggttcgggttcggatcgattttttcgggttcggatttttcggaactataattttagaccccgttcgggtatttgaaaacttcggttcgggttcgatccggtaaattttgggtttgggtaggtattggtacttccattgaaaaatccaaaaagtaaccgaatattattcgatactagtttataactactataatatacccgaacatacttgatactaaccacatataccataaaacctgtaaatttgtaataaaaaaaacttaaagtaaaatcaataaagcatgacataataaaagtttcatacgttcaacccaaaaagcaagattcaaaacatccaaataaaaccattcaaatagaagaaagaagttcaaatccaaagcaagacataaaaacatcgtttagaatcgaatccaaagcattcaaagtaaagaaagaagttcaaatccaaagcaacatccaaacatgatagattccccatgacttgttcctgttacatcaaaaccaaataagctcagttgaaaaataaaaaaccataataaacattaaaccataaaccaagtaaaagtcaaatacgaaatgatcgttgattcataagtctagtatattaacattgagctataaaccaagttcagaagtaaaagaaaacaaaatggagtgatgaagttaccttgtagtcgtttccttgattagtcttttagtccaaattcacttcagtttgaaactctgaaaaagattcaatcaacacccaagttgtgttagaacataagagagttttcaaacaacatctaaaactaaaactagtaaactacatagataaagttacctttctcaagcttatcaagtaattctatatcagcaagaagttgtgtatttgttagaaaagtgttttcactcagcttgatttcacttttcaaccactgctcaaggcaaaccaaagtctctaccatataatgagtaaggcagcttctacttggctccaaaagacgaccactggtgctaaaagcactttcagatgcgacatatgacacttgcattgcaagtacatctcttgcaatttctgataaaactggatacttctgactattgagtctccaccaagacaagacatcccactccattccaggaagagtcttaggattttctacctctgccttcagatatatatctaactcatctttaggatcagtaaccctaatttcattaaccatctctttataagacctgtccatcctttcaaactcaacattactatcttcagctaactcacatgcaaaaatatctctggcagcagtagatgaaggcggattagactgagatgattgtgtgtttggtcccttgaaaataacagtgtactccttcagcatagccttcatgacatcataaacagaattatacatctccttggcttctgaagtgtctacaccataaagtttctcaaagcacattttagcaaattccattttctgtctagaatcaaacacactagcaattatttttggatatttctcttagttagtttgaaggttcactttatttgtaatttaatgcttttgataattggaagggtcgtgggctcgtacatttcctcgagctatttgtattttactagcaatgtatgtcaaatatttggtgtactttaacaattgttagaattcagttaactataaatctacatatgtcatattattatgaaaattagacaaaactagggggtgttataggttttctgatttaaatagagttttaatgaattaataaaatattacatagaatctgttgttgttcaatcaagattcttataaagtttggtgttattaattttaagatttgtaaataatgatctaaaatctttgtaaatttggagtaattggattcatatttttataaagtcataaaaagttttgtgttattcaatcaaacaaaagaatctatgtttgttaatgaattaagttattatgttattgtttataactttctacacttttcttcgcaacatgaagtcataaaaagtatcatcaaaatagaaagattgtttgagaaactttacaagattgtgaaaaactaattaacaagattatagaaaagtctctaacaataattaaaaatattttatttatttattttatatgatattactaaagtcatcaaaatttcttgtaaattaagaacctataacattgctttagtgttactttgattaagagaaattaataagttcaaatttctgtctaagaaaaaagaacaacaagaaatgaagttcaattaatagtgaatccaatgataataattaaataaaatcttatcttcttatagtgacaaggtcttacagttacccactcgacacaaattattatcattatatatgtatgcttagcacatgaccaattttattaacacaaattttacctagatctctaagaagtaaagaacactttaaaacctatatttttatatatctttgtgttttaactcatggtagacaccgagctgtattcagataggccgtttaatgcagacacctctttcaacatcttgataacgttaacaccatcagatgtgggtttgagtaatatgataacgttttcaaaagagatagtagaaaccaaaatgttacctttactgcctaagaatcgtttcataggttatttggactttttttattttgaaactaaaattgtaacaactcttactgtacaagaagatgcaaatggagattttcaatttcatggatggagtatgattctccaacgaaacaattacaagacagacgatattataggattttggtgggatgccaataactctagatttaatttttcaggtactcatgatcgcttagttgatggagtggatctttgcaacttcgtttctcaaatatgttaggttccttattttatttatttaattttgcaaatttgtcttctcgatattggttcataagttatttttagttctatcttaattatgttttttaggatcatcttttctttttcaattataaatggatatatttggtgttaagacagtttggagttgcttattctccagatttacctatctatgattttcgttttaacgagtataaatacttttgctatagtaaggttgttgatttgattattaaaattaacgagtttttgataatcattgagaagaatattctcaaacgaagtttttgttgaacgtgaatccattgatctccgataacaatagaactctaagatatgattctcttacttgagatctattgatattcaagattactatcgtaatttattctggtacactaactatttacaccatttttaataaattagataaaatcacacaaacatgtttatatttggaccttcactatgaataaacttggtttatttgactaatatttcaccatataattttcaaaaattcgatttcaaaaaactattagttcaaaccaaacttggttgtaggatctgaagacttgtagttaggttgtttggtttgaactattattttccaagataaaagtagatctcttttgatttgaatatgtggtttgattaaaatattatcaaaatcaaaattgactttgtccttctcacgatcattaattaatcttactagaaccgttagagcaaaactggctgggtcaaggaaacttgcttttattgcacaaaattctaaatttacttcgaagacgtgttgcttgacgcttgtcgttacttctgataaatgattttgagtaaaattcaactaacattaaggttgtgatgcttcctatataacaaaggaagtctataataaaatccaaacgaaaagccataaaattgactaatctaattcccaaaagttttatatttgactgcatattgttttggaattttatagttttttttttttttttctccttgctagttgctaccatcgaattcgaaaaaaaaaaaaaaacgaaaaaaaatactaaagtatcttatttttaaaaatatgttctcttgttgaaataaataggggaaatagcctcgccacgtttttacgcaacctttgctttgactttaaatttcatatcacaccatactcttatttctcttatggactgcaatattttagtttaaaatttaagtaaatgtataaatgagtgatggttaaagaaaataacagataaaggaacatgacttgttttttaatccaagttaaagagtatatatatatatattatttctctaacaaagttaaaagtggttaaaactcacatgaaacctaaaaagaatctaccaactcaaccatattgtcttatgattcaatccctaagattcatttccaagcaatatattagatatctcatatgtaagtgtatataatatataatatatatagatgatcaaaatcaaaatttaggcattgaagagattgtgtatcagttcatgaataaattggaacctaccattgtctctttcgccaactctaatgccaattttttttggtttgattctctggtgaacaatgcagcatatctataagtacctttataaatcatccttccagtttttatactaaaatgattacttatgtctctcctcttttgtgccttctcatcgactacctttcattatgtaaacacttaaaagctaagcctgaattttatttaaggcaggtaagttagtattgggctttaaatataattaagtgggccttggaccgtatatcgacaaatcaagtgatgtcgtgtgcttcgtaaaattcccacatcgcttgtctagaaacgtaacttaatgtatatatttagacaaatcattacggtcacagttatgtttacgtacttgtcacttgttctcatactatgatgtagttgtctagttgatctcagttatgtttcatgaattgatacgtttttaatcaaggtgacaagattaatagagattaactacctctacacaactggacattggacaattcagattcaaggttgatatccttaaaaacaccaatacactcctctataaatatttacgtacttgtcacttgttctctttttattggttataaaattttaaaaatttttaaaaaataaataaactaaagggctctctaaagtctaaactacattacaaataatatattattgtattttaagagacactctccatccattgatggagatgatgttatggtttgatcaagaagatatcaactacaagacattacgcttctagttaaaaatagttggtcaacttaaaatcacgttgcatgtcttaatcacgttggtcatatattcccaattgccctcaaacgtcaaacattgaacatcatgtccgtgattctaaaatcttgtaatgttattttggcaaatttccttcttaaaacatgaataaaaaaatcaagaaaatttacatatctcagacggttcttctcgtgtgttttagtcttctaagcaccaatgccaatcttagtggatctggatctatccaagtagatatgaataaacaatacaagtctaccacacacacaatcacacattactcagctaaaccaactgagatctagagagagtaagagtgtgagaactttcatggagccaaaactctcctctcgtttgtttcttctcatcaccacggcttgtttcatcctcttattcacttccactaacttctctcaagcgccatcatccacggcgaagcttttcgactgcacaaaatcttcgtcttcacctttttgtgcgtcaagaaacttcctctttaacaaaaacactcggcccatttctaaaaacattcccaaaacaaaacccaaaaaccatgaccacgtttccgatacaccgaaccaccctcttgacccacttaccgtcatggagatcaacaaagtccgatcaatcctctcctcccacgcgctcttcgcctcacgtgtaccccacttgcttaactccgtcgttcttgaagagccagacaagaatctagtcagacaatgggagaaaggagaccaactaccaccaagaaaggcctcagtgatcgcacgtgttggcggcaactcgcacttgctcatcgttgacttatctacaagtcgtgttgatcaagcggatagtccggttcctgaatccggttacccgattgtgacgtcggaggagatggacagtgccgcgtctgcaccgttctcaaacgcagatttcaaccgtacgatcaactctcgtggagttaatctaacggacgtgatttgtatcccaatctctagtggctggtttggtaataaagacgacaacaccaaaagggttactaaaattcagtgtttctcaactcaagatacccctaatttctacatgcgacctatcgaaggtttgactctgctttttgatttagacacgaagcgaatacttgagataacagataccggtcaatcaatacccatacccggttcaactaataccgattatcgatattctactcttccaaaccatgacaaaaccagacccctcaatacaatatcactcgagcagccacgtggaccaagcttcgttatcgaagataaccatttagtaaaatgggcaaattgggaatttcatttaaaaccagacccgagagccggtctgattatgtcccaggtcaaaatacacgacccggatacacaagaaacacgtgaagtgatgtacaaaggtttcgtgtcggagctttttgttccgtacatggatccatcggaagcttggtactttaagacttacatggacgcaggagagtacgggttcgggttacaagccatgccgctggagccagtggcggagccaaaaaacttattcatcggggtcaaatgttttttgaaaacaaaaataagaaactgaagcaaaaaaactataacattgttagattaaggacgaataaatattaaaattttaggttatttttttatatcaatgggcttaatatttactcaaaacaaattttattagacttagcacaatatgtatacaaatattgtataattattgggcttaaaatattatagttatgtaacataaatttgataggggtcaatattattattttattggggtcaatttcatagtttaaataaaatatcagctactttttaaaaatccaccggggtcaattgacccctatacttgtgcattccctccgcccctggctggagccgcttaatgattgtccaagaaacgccgtttatatggacggaacattcgcggcggctgacggaacgccatatgtgagagagaatatgatttgtgtgtttgagagttatgccggagatattgcgtggcgtcacaccgagtatcccgtcaacggtatgccggtgagttctctttgcttctcatttaaatataagcactaaaacaagtaaacataacaaatcatgggttattatttaaggatttgtgcaaaaatattcttcaaatggctaatttttgtaattttacaattctaaaaatacagatttatcctataaaattaaaaataatactcaatataacccttatacatatattgtcacgatccaaataaatctacatttttaaaaagtagtttttgaaaatcagaattgacctaataaataattatatctttttaacaattctaaaaatcacctttacaagtattcaatggccaaaatctaccaaaagggtagtggtctatcgataatacaaggagtttgttcttttgtaccctcggttcaatctctctttagaactgagagtcattctttaaatcagaatgaattaaaagttggctccggataccagaaaagattataactaattatctggaactctcaagcacttttttttaaaaaaaggccaaatatctgtttacataatcattttcagaattacctactgatgtgattcccaaaattgtaaccaaaattgtaattttcaaaaataataagtttatgatgagttactaaaagggtatctcttaaacagtttaataaacttttataaacttaagcagtcagaaacttaaaatttgtgatattttttgaattttttctgttgtgatatttttgaaacagcatcctacattgactcctagacagatttctaacattcgttttgtacttcttattgcataaaaatacatgtcaacatttctgatataactaaaagtctaaaaccaatatctaatgaataaatcgattcttaattagttatttatatttttttgtcgattgagggggcaatgccccctactatttattcaaaaaacttataaaaaattacaaacgaatattgcgtgggaacgaggttccaacagaatcctctaccataatcgaattgacagaagccggacaatcatccaataactgcaaaccaatcggtaaagtgaacgcatagtttgctaatccgtccgcgaggcgattagcttccctatacacatgtgtaacccggactaaccagtcccttgcgataaagccttggcacaaacgtaccaggaaagccagtggatgcgtatcccttatccctgactgtagaaacccgaccaccaacttcgactcaacctccaacaccacccgccgtacccctctctcccaagcagtcaccagcccataatatactccccacagttcagctaagggagctgaacacactccgatgttaagcgcaaaccctcccagccaactgccctccccatccctaaccacaccccttgccgtcgcgaaccccggatttccgtgtgaggccccgtccgtgttcaccgttgcccatcgttcgctcggcttcttccaaacgatctgcctctccactctttctcccaaattcctgcccgcattgactttcaagtacgccgccccaacctccgcagccatgtcccgtacaaaccgaacccgatccctacatggtctcaactcgccaaacacattcatgcatctccatttccatccccaccatatcgacatagcaaacaacgtaggccaccctcccctactcggatcctctttctggtgtagattctcataaagccattccaagagagatcttgtgaagaacctctcacgttcccgggcaggcactaaccgtaaccaaataccactcattgctggacaatcccgaaggacatgtataattgtctccttcgctcctctacacacttggcaaacgtcggtatcccccatgtgtctccgagctctctccacattcgttaatatagcctggttccctacaagccataaaaaaactcgtaccctttccggagccaatactctccatatcctggaaaagaaacgctccatgtcctgagtctgcgatccctcctccatgagtagagaataagccgaccccactgtaaactctccattctccgtaccagaccatgacagagtatccgctactccgggaccgcctcccaacacgaccgcagtcaatcgtaacagcagcttctccggtaagaaacacgaaattctgcccatgtcccaaccaacacgaaattcttaattagttatttataagattgagatttcaccggggcagaaaaatgattaattgtcatgatttatgaataaaagaaaaaagaaatctacttacacttaaaatggaaacagtttatactgtgagataaagagattgattaattacgatttaagtaaaagaaagaaaaataactttgaattgtgaattgaatacaacaaaaacaatatgcacgcattacaaatatttagtcttgttttttattagccgttaagggaagtgagaccaaaggtgacacttgtggtacgaatggtagcttcagtgggtaactacgattacatcattgattatgagttccaaactgatggggttatgagagcaaaggtactttcaatatttgacttttatctcattttgacaaaaacaaatcataaaaggttccgtattgaaaatattttacttttggtaatatcaacgacaggttgggcttagtggaatgttgatggtgaaagggacaacgtacgagaacaagaaccaagtgaagaaagacaaagaaggtaatgaagaagagctttatggcacgattctgtccgaaaatgtaattggagttattcacgaccactacgtcactttttaccttgacctcgatgtcgatggcccggacaattcctttgttaaagtgaacctcaagaggcaagagacggcgccaggtgagtcacctaggaaaagttacatgaaagcagttaggaacattgtgaaaaccgaaaaagacggtcagatcaagcttagcttgtacgatccatcagaataccacgtcattaatcctggtaaaacaactcgagttggtaacccgacgggttacaaggttgtccctagagccacagcagctagtctacttgaccatgatgatccaccgcagaagagaggagcttttactaataaccaaatttgggttactccctacaataagtccgagcaatgggctagtggtttattcacttaccaaagccatggtgatgatactcttgcggtttggtccgacaggtgattagttgcaaagaattaccctttttattagttatattatagttaatattgttacgattgatttagtgtctttatttggtgtgatgcagagatagagatatagagaataaggacattgtggtgtggtacacgcttgggttccatcacattccatgtcaagaagattttccgataatgcccactgtttcttcaagtttcgatttgaagcccgtaaattttttcgagcgcaatccaatccttaaggccgctccaaactttgaatatgaccttccggtttgcggagccaaatctgattctgcttgagaagaataaagaaccaacaaaagaaattatccaactttttggatcttattggcaaaactacaaatcaagttacatgatattcactttcctatgtgttattggcgaaatcccaactcctacaaaacttataagcgcaaaaatagtatataacatgtccaattcacaccggaatgttaatctcaaggaattgtattttctcctagaatcactacttttgtgatagaagactttttttttgtcaaccttgatagaagatcttgataagattttttgtttttgtttttggcattgataacacattattctttcctaaaagaaattagtactcccctatatctcagtcaatttactaatgtttgatcttatgtttgtatatcttctcaaagcttgatcgtatctttctcttaatttgtatctcagtgtcattttatcaattaatgcttgattgtatacggagtattggtatttaacataattttaatgttcactgtgtgaatctaagtaaatcaacagtccagagactcagattgataatgctactacctaattccttgacgtaacaaatgcttatatctcatctaagaaatattcagtcgaaaataaagcatttccatcactctctgctcataaaactatcacaatagatattgacaaaaaaaatgggcttctgccttctgttagatttatctatcaaaccaactctccgaagtgggcttctaacagagaaacaagacatgggccacaaaacaattaagcccactcagaagcccaagacgaaaactgtgcaacggtcgtcttcaatgtttcagcataaagacaaagggaacaaaactgcagagatgacgaaagcttgtacggaggagatagcactctccaatcaattctcagcccttgatggcttagagacatcaagatgaagacatgtgtaagggtttatctagggttttagttcacatatgtccttgtataaaaacccaaacaatagccgcttgtaatctctaagaagcagaatgaatgaaaaccaaaacttttcataaagatttataaacttcttcattatcgacatcatgagcctcttgggccttcatcattcttcaaaatcataccatagtttatagtttttactgcgtaccacaaatatggcaccgtacatatatcattataggtttctaggagttgacaaatgtttagtcctccatttttcaatcgtcaaagataagattccttataattcgtgtacataattgttttttaatatataccatagcatgtggtagatattttattttcgggattgatatttggatatctctttatactgtaagtgtaaggtgacggtacttagttaaggctcactagtttctttaaattctatataatacgataccaattcctatgatcttcactctccaaagacccaaaccaaaaaaaaagttgacatggaccaaaaaagctttttccgggttgatttttctcatagtcacagctggtttcatcatctccttcacttccactaacttccctcacgcgccgacgaggcttcttgattgcaccgactcttcttcttcacctctttgcgcttcgagaaactttcttttcaacaaacaacaaccacgacctattcctaaacatgatcctaaaccaaataccaaaaaccatgatcacgtgtccgatacaccaaaccatcctctagacccactcacggtgtcggagattaacaaaatccgatcaatactctcttctcacgcgctattcacttccggtacaccacacgcgctccacaccgtcgttcttgaagagcctgagaagaatcttgtccgtcactgggaaaaagggaacccacttcctccgaggaaagcttccgtcatcgcacgtgttggcgcggacacgcacgtgctcaccgttgatatctctacgggtcgggtagattcagagaatagcccggttcgtgtttctggttacccgatgatgactatagaagagatgaacgatatcactgttgtaccattttcaaacgcggatttcaaccgtacgatcatctctcgtggagttaatctaacggacgtgatttgtttcccaatctcttgtggttggtttggtaataaagaagaaaacgcgagggtaattaaaagtcagtgtttcatgacacaaggaacacctaacttctacatgcgtcctatcgaaggtttaaccattctcatcgatttagatacaaagcaagtgatcgagataaccgatacaggtcgggctatacccatacccggttcaaccaataccgattaccgcttccaaaagctcgcaaccaccgacaaaactcggcctctaaacccgatatccattgagcagccacgtggtccaagcttcgtgatagaggacaaccatctagtgaaatgggcaaattgggaatttcatctaaaacctgacccgagagcaggtgtggtaatatcacgggtaagagtacacgacccggatactcatgagacacgtgacgtgatgtacaaaggtttcgtgtctgaactttttgttccgtacatggatccatcggacgcgtggtactttaagacttacatggacgcaggggaatacgggttcgggttacaagccatgccactcgtaccgcttaatgattgtccacgaaacgcagcctatatggacggagttttcgccgcagccgatggaacaccgttcgtgagagaaaacatggtttgtatctttgagagttacgccggagatattgggtggcgtcactccgaaagccccatcaccggtataccggtcagtctttttttcttatgggtattatttacatagaaaaaagtttagggtttgaaaagtaaatcttaaaatttttgagttttaatgtaaattataatttggatttagtagataagggaagtgagaccaaaagtgacgctagtggtacgaatggcagcttcggtaggtaactatgattacatcattgattacgagttccaaactgatgggcttataaaagctaaggtatttttctactttatatcagtttccaaattataaaagattccatatatatacgattccgtggaataataaatatttcactttttttgtcactaactaatgtacgtaataatgacaggtcgggctaagtggaatactaatggtgaaagggacaacatatcaaaacaaaaaccaagtggagaaagataaagacggtaatgaagaagagcttcacggcacgcttctgtctgaaaatgtaattggagtaatacacgatcactacgtcactttttaccttgaccttgacgtcgatggcccggacaactcatttgttaaagtgaatctcaagaggcaagagaccgagccaggcgagtcaccgaggaaaagttacctaaaagctgttaggaacattgcgaaaaccgaaaaggatggtcagatcaagcttagcttgtacgatccatcagaattccacgtcatcaactctggtaaaaccactcgggtcggaaacccgacgggttataaggtcgttcctagaacgacggcagctagtctacttgaccatgatgatccgccgcagaagagaggagcttttaccaacaaccaaatttgggtcactccgtacaataagtcggagcaatgggctggtggcttgttcacttaccaaagccatggtgatgacactcttgcagtttggtcagacaggtgataagttcaaattaataataactagttatatatgtagtgatgattcgaatgttttatttgatacattattggtgtgatgcagggatagagacatagagaacaaggatatagttgtgtggtatacacttggtttccatcacattccatgtcaagaagattttccgataatgcccacggtttcttcgagtttcgatttgaagcccgtaaactttttcgagcgcaatccaatcctcagtgccgctccaaactttgaacatgatctcccggtttgtggagttcaatctgtttctgcttgagaagagtaaagtacgaaataaagaaatagcaacttttgtatatttgtgttactctcaaggtacacaatgtaatttgtggccttaaaactggtaattagatgtataaatgtaaatgctaatgtatatgtgtttaaacgagaatccatatattcatgcggattatggaattattaccctgcaccagtgacaccttaaacgatgaacaaatgtaattagatgtatattgtttctgtctcggtaactttcactatgaaagaattttggagtcgagtttaactttaaccagtacaaacatcgtgattcttcgtctcccacaagatattttaaccgatacaaacacgcgaaccatatttcccacgctgcctaggcagccaatttctagcctcctagccattaacatatcacgttttggtcaaaataagtcggtggtaatcaactaaaactatcccaaacacttacccaaactttacgaaaatgttcaaatttcttcaaaggtttgaaaattttgcaagttgtaggaaaaaattgttaagttttttagatttttctggtaagttcaagaaaaacaaaaactcttgtaagttagttcaagtggctgacaactctctagcatttctatcacatataaatatgtcacatgtcttatctgagtcgttgtttgtcacatgcttacacataaatgtaattatgtaactcgctaggggtccttacctcacctaatcatgttagcttttagaggaaaatttgatatgtataatgtattgtactgatttacgtcatcatattcatcacccatcatgatttaatacagaaaacaaatccatgattatcatctacacatttggaatatgattagtagttttagatcttctatttttagcaattatcgagagaggaccacaccgtgctagttatgcaagtcagattgatgtttgattttccttgcaaaaccagaaatacattacatttttaccccaaaataaaacaggtactacttttatttctatggtataagaattgcctaatgtaacgatctttgcccctataggtaaagattcgaatccgaaaacctcggaatgggcaaggcaacaagagggatcttgagcttcaagacaatcccaaacttctctttcaaatccaacacgtggccttccggtatcttccaatcgaacgaatgcaatagtgtcgcgagagtgtataaaaccatcctctcggcgagtgctacaccggcacaaattctccggccagatccaaatggaaaatagctataattggctccagtgaaatcacaagagttattatcaagaaacctctcaggacgaaactcagttggattctcccacacattggggtctctctgaatagaccaaacatttacgaagatcttagtatctttagggatggtgtagccgcccaccacggtgttttcagccggacggtgagggactaacaaaggaagggttgggtgaagcctaagtgtttctttcataatggctaaaatgtaaggaagtctagtgatgtgtgattcttcaacaatgttgtctttgcctacaacttcatctagctcttcttgtgctcttttgatcagctccgggttgctcattagctctgccatcgcaaactctatcgtgtttgtcgatgtgtcagtgccaccaaccaccatatccttcatatgtaaaacaataacattaatgatcaaatcacttttcataaacaaataaatatctacaatctctatttatacaaatacttaaatcctaaaattatgaaactaaaagcattaattaattaccgtgagtaaggctttgacatgattaatggtgatgggaacctccgagtcaccttcttgatcctttaatttcatcaaatattgcaagaagtctttaacttcatcatcatctcttcctcttaacggtttcatctgctcgatggctcgatcaagtaccgcatcaagctcgcgggcacacacacccatcctcttcacaagtccttgaagatcgaacctcgctagccaaggaaaaaagtcagaaacattaggctcactcaaaagcctagtaatttcagaaatcactcctttaaactctgttccaacactctccatctcctctgctttcaccgaccctccccataacatattcatcgttagattcatcatcgtcaaaaacaattgatctccgactttaaccggggattgttttcgaccttgctcgtacaaatatctagttctttcccggacttctttgcgtcggagctcgtagaaagaatccaaagttttgcggctaaggagttttaggacgcatatttttctaagctgtctccattcggcaccgtatggtgtccaaacgatgtctatacctccataggtagcggctcggccagtgagagggacgtctcggtttgagaaattgatgtcttgatctttcaagatctctcgagccagcgatggagagttgactacgatggttagctttgagccaagattgagtttaaagattggaccgtgactttgagcgaggtttgcgaagtaggtgtgaaggtccggatcaagaaacgggaggttcccgactataggcagccctcgtggtccaggcggtagggacggttgcggcgagcgcttaaagatataccatagaatcgagaagacagtggtgagaatgacaattgcgtaaggagtgagattgattgtgttgtcgggaaagagatttgaaatcggagacatttttgataaatgttttgactttggaagaagaaattatgagatcgataagaggaaagttttatgatagtatattatcttttcattttttttttttttgggtcaggacggtctcatgtagtcatgttgatgaattctgagcggctgtgatacttcccaatgttttaaaaatactttttacaatcaatcatatttagctatatttagataaataaagctaatgttttaatggtaaaagagtaagaggggaaagtaagctgccacctttccaaagagtaggaccaaaattcatttcgatggctaaacttcactatgcagaggtatgaatcaatgcatgggaccattttgcaaagactttttgagagcaatattccaaaaaatctaaattttctcaagtttaatattcataaataaacacaaaattccagatggatagaacataattgatgattttttgtgtcttccaatgttttatctgaatttcaatgagactccaaaaaaaaaatgctcgttaagctgatattgttttcaaaaagatttatgacctcattgaattctctaatattctaaccaaaaaatacaccaaaaaagagtcaaactaggactcgacacaaagtaagtacttgctaattttcaagtttctataatcctgtttggttttgttcaaaatagaaaataaaaaaaaatgatatctcacatcaaacaaaactggaacgaaaaacaaaattgatatctaacaacaattaagtaaaatttataagtggtcctagttcaataatgttgctgtttatggaaaccgatgtttggatttcattacaaaacttatatgacagttaaaaacgtatataataaaaatcgcaaacataacaatctttttgctttttaagaaaactataaagattttagcattagaaataaaaattggaattggacaaccttggaatgggcaaggcaacaagaggggtcttgagcttcaagacaatcccaaacttctcttccaaatccaacacgtgtccatccggaatcgtccaatcgaatgaatgcaatagagtcgcgagagtgtacaaaatcatcctctcggcgagtgctatacctgcgcaaattctcctgccagatccaaacggaagatagctataatcagttccagtgaaatcacaagacttcttatcaagaaacctctcgggacgaaactcagtcggatactcccacacatttgggtctctctggatagaccaaacattgatgaagatcttagtgttttttgggatggtgtagccgccgaccagcgcggtttcagacggacggtgagggactagcaaaggaatggttggataaagtctaagtgtttctttcaaaacggctaatatgtaaggaaggctagtgatatgtgattcttcaacaatgttgtctttgcccacaacttcatctagctcttgttgcgctcttctcatcaactctgggttacttattagttcagccatcacaaactctatcgtgttggttgatgactctgtaccaccaactaccatatccttcacacattgattaagtcatgagcaaataaacatcttacaaataacatctaaatgctaaagcgactaatgctgattggtaatctacataatggcgaaatgactaaaaacttatttttgcatgattttaccaatcgaaaaactaatgccttatcatgaatttcaaatattattctgcaatactaatgaaaaatataattgtgaaattatcattccgacttttcatataatttaagtgtttgtctattagtatttcaaacttttcatttccgatatatactttttgtcaatttcaacagatatgctattctccgataattatattcttaagtataaaaattgaaaccatttaatttcattaccatgagtacggctttgacatggttcattgtaatagggacgtccgagtcagcttcttggtcccttaacttcatcaagtgttgtaaaaaatctttacattcaccatcatcaccatccctacttcttagccgttgcatctgctcgatggctcgatcgagtatcgcatcgagatctcgagcatacaaatgcatcttcttaacaagcccttgaagatcgaatctagctagcatcgggaaaaaatcagaaacattaggcacacccaaaagcctagttatctcagaaatcactcctttaaactctgttccaacactctccatatcctctgctttcactgaccctccccataacatattcatcattagattcatcatcgtcaaaaacaactgctctccaacattcaccggtgatttttctagacctttctggtacaaacatctcgttctttctcggatttctttgcgtcgaagctcataaaaggaatccaaagttttgcggctaaaaagtttggcagcacaaacttttctaagcattctccattcggcaccgtatggtaaccatacaaggtccagaccaccataagtaacggctcgggccgtgagagggacgtcatggtttgagaaattgatatcttgatctttaaggatctcgctagccagcgatggagagtttaccacgacagttagttttgagccaagattgagtttgaagattggaccatgactttgagcgagttttgtgaagtaggtgtgaagatccgggtcaaggaagggaaggtttccgactataggtagccctcgcggtccaggtggtagaggcggttgcggcgagcgtttgaagatgtaccatagaatcgagaaggtagctgtgagaatgagtactgcgtaagcgtaaggagtgagactgattgcgttgtcggggaagagatttgaaagcatagacatttttgccaattgtggaaaggaactatgagaaccaaaaaaggaaagtgtactttagtgttagttatttgatatttcatctttcatttatagtattaatagattaataatgtgaaattcaataatgagacggtctcaagctgataagttttgagcggatgtgattcttcccaattttgaaaatactttttaaatatgattggatataattcgaacatttggtggatagtgcttaaaaatagggaaatattattacttcgtgaatctaatttaacagttaaaagaggaaatgaaaaatgtacggtgccacattttggtggatataagtttcatttactcttttacccgttaaattagggacatatttcaaaagactattttcgctggctaattttattatggggccattttgctgagattttgagagtactccaaaaaccctaaattttcacaatttttaaagggtatttataagaagtatacatagaagaacagaaaattaactaatgtgtcactatttacacagtacattagcaaagaaaattacatcattatccttatgtctttttatatttttatctttcatctcaaaattggttaacaatcaaattaccgatttaaataaaactttatctagaggtagtgataatattaatcttattggatgaaattcagattttgcacgttatagtaactcgttaattttgtttatatgatataataaatgagttaagacggtaactataaatatatcacataaattataacttattgcggtacaaaataactttgcatgatataattataaacttattgatataaatattttgttatcatgttaacctaaaaagtattaccgagatatttgttatcatgttatcctgataatacgttatctgctaactattctgatgcatgtatttttttacatgattattgaatcgcaagtcaacttttgttaccttttaataataatgttatcgtcttcgcctatatatccgtataataatcatattatagctatgtcaattttgtaattaatccaaatatgaaggatatttttggtttatattttctttctctttcatacttacctaatttttaaattatctctcctacttttttaatttccacttcttctgagtatataaatttaattcacccatttttaaaacataataattaaacacaagatttcaaatggatagaacatttttcttttttttttttggtcaaaaggatagaacataactaatgacttttatgtcttccactattttacgtgaatctctttttttttacaataaaactttacgtgaatctctatgatgaaactcctaataatgtgctcgttaaacttatattatatttgggattcttcttcatgtatgggcattgggctcaatgaatccccaatagattaaggtttaataacaaatagctataaacgggtatcctcctaatatatctccaaatgaacatccgtttttttaggaataaatttacaactgtcaaaacttttggtcacccccatgcttgtcatatatgtagtgaacgtgtagcaaatctctaaccatgccaacaagtaaaaaatatcatcaattccttggacaagaaatacttcagattctaagaaaatattgtatggttcctggtcttagccctgaaaaccgtttagaaaggtgaggtatctgctataaaaaaactgtttatatcacaaacttctataagcttttcctgcacttcctccatcgtagatttctgttggatttgggaaaaatatatttcataacagctttgcaaggaaatttgagtttggtaattaaactacggttttaatgataactcattatcaaagcggtataatttatacaattttgacaattatcatttacaaaaactttatcaaaaacgttataatttttttttattttcagctttattatagagctttttcatataactcctttttacaaatttgcataaagctttatattactaatcagatctacgttttacaaagatataattttcttatactatattttgttgatagtacaaaataactagaagaaattaatctaagattcttgcacgtctaccacatatgccacatgccatatcttattcattatccattataatattaataattaaaaaaaaaataagaaatcttccattatgacacggtccacgcttcctgtgagttatctagatagaacaaaactgaaatacgataaaactgataattttgctgtttatagaaaccgatgtatgattctcattactaacttatatgatgattaaaaacttcagaaaagaaaaaactaaataaaaccaggcgttatttttgtctatcataaaaatgttcaatataaaaatctttttcctttttttaaggaaaagtaacgagtatagcgtttataaataaagattcgaattggacaacctcggaacgggcaaggcaacaagaggggacttgagcttcaagacaatcccaaacttctctttcaaatccaaaatgtggccttccggtatcttccaatcaaacgaatgcaatagcgtcgcgagagtgtacaaaatcatcctctcggcgagtgctatacctgcgcaaattctcctgccagatccaaacggaagatagctataatcagttccagtgaaatcacaagacttcttatcaagaaacctctcgggacgaaactcagtcggatactcccacacatttgggtctctctggatagaccaaacattgatgaagatcttagtgttttttgggatggtgtagccgccgaccagcgcggtttcagacggacggtgagggactagcaggggaatggttggataaagtctaagtgtttctttcattatggctgatatgaaaggcaatctagtgatgtgtgattcttcaataatgttatctttgcctacaacttcgtctagctcttgttgtgctctcttcatcaactccggctttcttattagttcggccattgcaaactctattgtgttggtcgatgtatccgtaccaccaaccaccaaatccttcacatatatataacaaacacattgtcacgactcacttctcatgaacaaataagtaaataaatatattcttaccccaagatcttaagattaatctatatatcctccgaagtttttattctaaattatgaaaactgaaatcatttcattaccacgagtacggctttgacatggttaaccgtaatgggaacctccgagtcagcttcttggtcctttaacttcatcaaatgttgcaaaaagtctttacattcaccatcatcaccatccctagttcttagtagttgcatctgctcgatggctcgatcaagtatggcatcgagctcccgagcacacacatgcatcttcttcacaagtccttgaagatcgaatctcgctaaccgtgggaaaaagtcagaaacattaggctctcccaaaagcctagtaatttcagaaatcacttctttaaactctgttccaacactctccatttcctctgctttcacagaacctccccataacatattcatagttagattcatcatcgtcaaaaagacctgttctccaacattcaccggtgattcttcttgacctttctggtacaaatatctcgttctttcccggatttctttacgtcgaagctcgtagaaagaattcaacgttctgtggctaagaagcttaagaacgcaaactttcctaagcatcctccattcagcaccgtatggtaaccagacaaggtcgagaccgccataggtaacggctcgggctgtgagagggacgtcatggtttgagaaattgatatcttgatctttcaagatctctcgagccagcgatggagtgttgaccacgacagttagttttgagccaagattggagtttgaagattggaccataactttcagcaagttttgtgaagtaggtgtgaaggtccgggtcaagaaagggaaggtttccgacaataggtagccctcgcggtccagggggtagatgcggttgcggcgagcgtttgaagaggtaccatagtatcgagaagatagcaatgagaatgagaattgcgtaaggagtgagattgattgtgttgccagcgaagagatttgatatgggagacattattcacagctgttttgtagaagttatgagattgaagttgttgtccctataatagtaatttttaaggttacaacgtacaccatcatttagtagtataccatccactcaacgtacaacgtacacccattacatatagtaatacattaatagggaaaaccactcaagggtcttaagataataagatgataatatttgagtggatggtatactttttaattgttttttcttttatcgaaatgttacttttaaatagggtttagtcatcaataatgataaattgataatatctctctgcatgtggacgcaaattttgaagccatcaggaaaaaggaaaaaaaaataaaaataaaaatctttttggacctcaagaaaagagagtttgtgtagtaagatgattcatggactataaatatcgtaatttatttttgtgtacatcgtaaaatacaatagcttaaggaactaaaaaacaatcatcataacttatttttgtgtacatagtagaatacaatagcttaaattgtagtatatatacatgagggcacaatttcgaatctaaaacaaattttgtttgaaggcatgctatatatcaaactttgatattacataaaaatgataaaaacaactattctatggtaaatcatttaccatacattctaattctttatttttgcttcaaagatattaattacatttgataaaaacctcaaacaataaaatagtataaattatattatttactggtttggacggtggcagcagaccccacacctttatacgttggtttgctgctgtggagggaaattagtcaaactcctttatatatgcatttgaaagtttgtatgacttgtttagccgtaaaataagaatcagtgtagttttcaacaaaagagcatataacattgaagattttttcatgaaatcacttggatttggatatgtggacatatatagtccatgcgaccatgtctaaaacacatattacatcatgcatagtactaaaatataggtggaatcatcatatatgtaacaatacataatacggcattagataagacaccgtcacattgaacattatataagttcacataaacaaaaagagcaattacttttctcctttcacttaaactgttaaagaaaaaggtttggatccgacaatcttagcacgggtgttgcaacaagtggattcttcaacttcaataaaatcccaaacttctcctcgagctccactttctctccttccccaattctccaatcaaaagaatgcaaaagcgttgcaagattgtaaagaacaactttctcggccatggccattcccgcacaaattctccggccagatccaaacgggaaataactatagtcattaccactaaagtcgtaacctttatcaagaaacctatcaggattaaactccaacggattctcccatacgttcggatttctatgaatcgcccacacattgatgaaaaccttagaatcattaggaattgtgtagccacctataaccgtggtttcagatgggcagcgaggtattagaagaggaagagctgggtgaagccttagggtttctttcataatggagagaatgtatggaagtttagtgatatgtttttcttcgacgatgttgtttttccccacaaccttgtcaagctcttgttgagctctcttcatgatctccagtttgtttataagctctgccattgcgaactctattgtgttcaaagatgtgtctgtaccaccaagcaccatatcctaatgatcaagagtcatatgttacacaaaataatttgttacgcaatgataaatgttttgtatttcctatgcaaaatttaaataagcaatgattatgttgggtacaaaccaaaggtcccacatcaaaaaattagaaaaaaaatttataatatataaaccaaatccaattctatttagtataagtcttttgagaagcaccccaataacaaaatcatgcggacttaattcaaagtagacaatataatacgaaagggagttggaatgagctcggaaagtccaataatatcatgtagcaatattagtaaaataataagaagctcaattaccattagcaaggccttgacatggttcatggacatgttttcatcttcatccttagcattcaacaaaaccatcaaaaaatctccaccgttccctttacttcccttatccattcccatccgttgacttataatccggtcgaacatccggtccatcctctgagccgatctacgcacacgcttagccaaaccctgaaggtcaaaccggctcaaaaccgggaaaaaatcagagacatttggctttcccacaacatcaattatttccgtaatcaattccaaaaattcagctccaactttctctctctcctcgtcgtccgcaacagtttctccccacaacatctgagtcaccacatttaatatcgtgacaaatatttgttctccaacgttaaccgccaacccggcccgagcccggtctgccaaataccggactgttcgcctggtctcctggcggcgaagtgcactaaaagaatttgaatccaacgtggcgttgcttaacattttgttaatgcagatttttcttagcattggccattctggtccgtacggtgaccagacaatgtctacgccaccatacgtgctgagtgagcctgcgacgggaacgtcgtcgttcgcaaagatgacgtcattagttcttagaatatcccgcgttgcttcggaagaggttatcacgatggttagttttgcgccgagccatagtttgaaaacgggtccgtgtttttgagctagactgtgaaagtaggtgtgaagctccgggtggaggaatgggaggtttccgacgatgggaagaccccgaggtcccggtggtaacggtggaaacagtcgtttcgatttgacgtaaacccatatataccaaaaaacagaggatatgactattgtagctaaaacaaagtcgaagtggtcattacgattttggatcgtaaagaaagtgaaaatatctgtcattggttcttgtttatgtagaaaacacaagaatcaatttggaaattttgtttcttttaattgttccaatgtttttctctttgtatcaaattttgacatgaaggagaggttatatagatgctagattgataagttttataattttattttgtcatcaaagattatatacttttcacattaaatctaataatttgtcaacggtatacctcatcatttacttataatatattatctttaaatgattagaaagaaaagaaatctttatatgactgactattgcagatgataacatgtggatggttagattgtttgataatcaaatgtggctaaaatttggatttttaaccttagaaaacgagttaaagtatttaaactaagatactaattcaaagttcaaatcgcttaacacactttattaattgaaaaaaaaacttgtacaatgattatcaaatgaaaatttcattatcaattatgtaatgtcaaatgttacttgctccactataacaagattatataattactaaattagaacccgtacaatacacgagttaatcaatatatgtttttcttacaaatttaagttcgtttgttgtaatcgtatgtatatattatgttaaaaaaaaattgaaaatttaaaatatgtttttaaagtttcaacaattaaatcgggttttatgaatttttaaccgcacacaaatcacatccacataaaagctgtattctatgaaaataataatcaaagaacgaggaagtaatgttccttacaaaaccttaacacaacaacacttatcaatgaaatcacaagaactattaagaaacctcttaggcttaaactcttttggatccttcttcctcccaattcttagtatctctattaatcgcccaaacattgatgaaaatctttaaatctttcagaaccgtgtatcccgcaacaaccgaggttttactattccggtgaggaactgtaagataaaggtagcgtctctttcattatagcttgcaagtaaagtaacctaggaatatgaggctctttaaccgatgtatcgaacccaccaagaaccatatccataagcaatgacttgatatgagtcattgataatggagctttctcatcatcatctataactctcaacaaatactgaagaaaatcttcttcttccttcatcactctttttgccaaccattttcacatgattctccatcacctgatcgactaaaagatcaagttttcgacatgaactcgcatttccttagttagtctttggaaatcaaaccgcgcgaaaaccatacgagtatttttgagcttccttcgatatctggaataacagaatcagtttcttgagctcgtttccaagaattgttctttcttcttcttcaacaattgcacccaacatcatacgagtcatgacattaaagatcgaaagaaatatctgttctccaagattcaccctgttgagagtattgctgctaagagtatgaaaacagaggagtgcggatatttaaagaaactgaacattgaagccattggagattactcgtgaaaataatgacagattagttacttggattcttagaagaaatagaaaaccaacattgcaagaatctaaacaaaaaaagaaagtagaagataagccaaaatagttaatcaagaacatagttttgaaagttttatctcatgaacataatcacagattctgcttattttttttctttcttttttgctttcatgaaatcaaaaggaaacaagcacaattcttctgtgtcattcatatgatctcagaaagcaaaaactattcccttcgtgtctcaaaaaagtccttttgaatcttattatctctacttttcttcaggattcacttgctgtctggaccggcgtgcacaatcctggaaactcttaacgaaaccgctacatttcaacggactaccgatgttctccttgtagcatttcatccaggcttcgtgatctgacgaacaaggcattggtttaggttccgggatcttaaactctttctccctcagatccttggctctctccgtaacttcacgaacaatgttcttctcttgtaactccagcttctcaagaaccttctcactctctttcacaacggattttatcgattccagctctgtgcttgctgctccttgtggtggtattgggaagaaaaacggtggctgcatcggtaattcagccactggattaggtttcttctcttcatcttggtttgttttctgtttgctctgtggtgagactttaggtttggttttctttgccctcctctttggttgatcgttaccttcagctagctgattgatcagcttagaactgatctgaatcgagaaatctcccataattacctggaagatgaaatacatccacacaacttagtaaacaagagtatctcctcaaaatctaatgcgagtctcaatgtgaacatctcacaacaaagcttcttcacatcaacgattcacgcaatagatttttgaaattctctgcttatagtatttcaaagatcttcaatttcacgaatcaaaacatcgaaaccgaaagcaaacagatatctaatcaagttcgtaactaagaagatgatagaatcaacatcgatcgatacaaaatcgaaggagtaattcttcgacatcgatatagatgaattctggaaacttaaaacaaaaacctagaatctacaccaagcttcaataaatcgatgcaaaaattcacagattacctgggaggagatgaacaaagaaacgaatcggtgaacggcgattctctcttcttcgccagaagaaatcttgttacagctgcgaaactgcgacgctcttcacagtagatctgggcttagtttgcaagattaaaaaaatactatctttagcccaagttatcttattgggcctagaaggctattacatttatgtacatataaacaaaagtttattgggctacctgatatttcctctaaatgtttttatttttttttgacaaaacaaatactaaattttcatgcattactgtatacagaattattcatttcattttttttttatactctatcggctgatccggtcagttttagtaaaaacgcaccaatatgctacaaagtggactattcccgatccaggtagagttagaccaccacactaccagattcgagtttgaaatgtctttcgactaatgttatagaataatcaggtcgtctccatttcttactaccatataaactaattaaagcacgacccaaccgataaattttccaaataaatataattttattctaagaaagaatcgaatttagatatgggagtttcacccttcgccagagttttctctaaacaaaacgttgtacttcttctaacacagactaatcacgcatgtttttacaatattataaaaaaatgaattaatttgggaaaagccctctacagctaaacttacaagtcagtcacccatgaagtgggaaagttttacaacataaattagatttagttctgtatacgtacgtgtcaaataggtgttcgtctttataatttttccgtatagacaacatgcaaagatatattactataactctataagatagcttatttgttaattagccacacgtgtataaacgtacgactacgaacaaaaatgtttacttactttttgcggtattgtccacggcaatgcctaaactaagacaacttcataacctttgacgatgttagatttcgaacactaattgtatattgtttttatcgaaaaatctttactataataagtttttgtatcagtagcaactagcaagtgtcttttgtatgttattgtgtgttcagctaattttaggatcaactgttttaataataaaatattcctttccaaagcattaggatttacaaaatttaccattcaatcaatggtttacactaagtctgaatcacatgctaaatatatatgcataccttcctatatttgtttcatcaaaacatattctaattgaatttaaactttcattttggtgttaaagttctactggtcgtacgcgtgtacattcgcaggtatgtaccctatcatttcacattagttcaaaagtcattttcagttttcaccaaccaattaatcaaggttttccaacactcctcagttttcgtaaaatgatattaattaaacaactataattaaaatccataacaatgatttattttagacaaaaacattaactttttttcttcaccaaaatgatttgatcataagaaatcgtatatatatcgagaaagaaacatttctatcgacattaacaattctgtgaagtatatatatatacgatttctagtttatcctccaaaatgttttaatcatctcaccatcacaagttagtttatgcacgcatgtgatgtataaatattttatacgtgaaaatgaaccatgcatatatattattgttaggtatactgtatacatagaatattgatcatcataagaaaggtacaaatttaatttcttggaaattgttgaaatttccccatcacacataccatattaattaccatgtatttattttttaaaactatacgtattctggataattacttttatatatgtattcaggttgttaattcaagtaaatcaaataacatgtgatgcgtataccttagacgtcgtatatttctgtatagttactttataccaaaagcctatataatttatgaacctaaagcctaaagaatgtttgcaataatctggctaatactcaccatacttaaatatttagatcgtatttcgttcttctgtactctatacacattttgttggaaggaagaatttttattattactaagatcgaaccaaatatttatattttagcatctgatatataatataatcatgaaaatatttgatctaatcatattataaaatattcaattaactgcaatctatgcaattataatgattacttcccacgaacaataatgattgaattaaagaagatgattttaacaataaattcctaacaaaacatatagcgtcattaactatttggtttcactactcacctaagtgggtcaaatgagatactaattttctaactaaaataaaaaatatgtggtgaatgatgtaagaaatacttgggttatatataggtgggtgagcttaggtgcttataggcttttgacagaaatcttctaattggtatatactttctactttcaaaatatttaaggtctcatctctctctctcaaattaacacacaaaacatatataaacagtcaaatataaattaatgggaaggcagccatgttgtgacaagctcatggtgaagaagggccgtggacggcggaggaagacaagaaactgataaactttatcttgaccaacggccactgttgctggagggctttgccgaagctggccggtctccgtcgctgtgggaagagctgccgtctacggtggaccaattatctccgacctgacttgaagagaggtcttctctccgacgccgaggaacagcttgtcatcgaccttcatgctcttctcggcaacaggtttgagcttgttttaaccttgtatttcgtttatatgtaattgatcatttgttatatatttttactacacattattaaacatgcattaactaagccgaatttgttagtaatcttttttttaacaacaacatgaattacggatataaatccaaatatcgacagcacgaggatattatcataaacaacaaggctatattccaaaaaacaattttcggtaggaatgttaagtactatatgccaaatttcaccaatatattgtatcatatgcatgttgttagctaattatgtatttaccaaaaatggttaatcttctacatataatcatatgattgtcatcattatagtcatataacccgaggttaaataacgttcacctatacttatatacaaataataataaaaattagtcaattctaagatgttactttttgtgaaacacagtaaaaaaactattaacatatatgttgactaatgataaatgctgtagaaaatgtatttgtgatgtacaattgaaaattaatccataatattttaatataagataatgtatggatcatttgagactgaatagttttataagaaaacgatatatcttaattcagtttcctttctttgaattaaagtcttctaaatatttgtataaaaaagttgtacatcttatttcaacttcgagacaaagtaacgttcctcgtttccaaatagaatatcatagcgtatatatattgtcaactttcttgtgttagattccaagacacaagactttgacatctccaccaacacctagctcaaatcattatttttcaaaggtaaacatattcaatgtaactaaacatatttcttaaaattctttttatgtatatatagatggtccaagatcgctgcaagattaccaggaagaacagacaacgaaataaaaaatcattggaatactcatatcaagaagaagctccttaagatggaaatcgatccttcgacccatcaacctttaaacaaagtatttaccgatacaaacttagtcgataaatctgaaacttcatcgaaagccgacaatgtaaatgataataaaatcgtagagatcgatgggacaacgacaaatacaatagatgatagcattatcactcatcaaaatagttcaaatgatgattatgaattacttggtgatataattcataattatggagatttatttaatattctatggaccaacgatgaacctcctctagtcgatgatgcatcatggagcaatcataacgttggtattggaggaacagctgcagttgcagcctcagacaagaacaacactgctgccgaggaagatttcccggaaagatcatttgaaaaacagaacggcgaaagttggatgttcttggattattgccaagaatttggtgttgaagattttgggttcgagtgttaccatggttttggtcaaagctccatgaagacgggtcacaaggactagcatttgcaagaatacataacatatataccgatatactacataatatgtgtatataatttatacgtacgcatcataaaagtaatgtaagaaaaatcatgtaaagcagtaaagaagcaccatggttttttcaaagtctaatattaggggaacagaaaaaggatcactaggagttatagtaagagttattgacttatttccctatcttttatgtctgtttcctgcatttatttcaaattataattagttcaacccaacagttttttcgccttgattttaaattctgttttgtataaatttaataatttatgctaggatatccttcattaaattgattaaaaatattggtagtcaaatttttctatgttgatcaggattgatttttagagtaagtccatgatttattaaatcaaccggaaaatacagagcttttttttaatttgtaaaatcgttgtaaaaaataattttgttgaatttggtgttccccaataaattaaagatgaatttggtgttccccaaaatatataactatttgatgataattaatttcagcgactttgataaaatttatctgtgaatttgaatgatctcatgataaaagtttaccaaaattctaaatttacaaaaccatctggacaactaagcttcttgtttatatctgttttatcattggccagataataacacacaaatatgaattgagaaagtaataaatatattgccagttttttttttttgaagctatcattttacgtggatacaaaaaagacttggtgtgtatattattatcattaaataataaaaaatcgatattgaaatttattatttatgtgaaagagttcaaaaatggacatctctacatcacatcctggcggaatcaattgtcacaactcacaacaataattttgtttatatccaattgcaatttgaagcaatttctctttgtggaaatcacacatgtgaaatatataactttgagttacaaccatatgaactagacaaatatctcatcttaaatagtttgtaagaatatcctaatcagtaataatctattaacactaaaaactaaaacaaaaaagtaataaatactactaacaaaactaaaatctattttcttttagctacttcgaagaaataatttggaaaaaataaaaaaattggtcaagaaatgtattttttttatatgaatctctaattatcgtaggaaataattgtagaaataagtttcttttctacagatatatttaagacacctaaattaaccgctctataatgtcatatatcatgtacaaacaagattttcaagtgcacgatcacatttcacatatattaaatttgagttgtaataaacaaaatgacattaaaggcgacaacaacaatatttttaaaaactctagatgtaaaaaacaaaattcaaaataaaacgccatgtataattgatccaaacacaattctcacatatagccggataggaatataggctatagtctatataaagcactccaatggttaagaatatataattcaattttaataaaacatcgcagcaatcgtgatcacgacgattccgaccaagcctgttcccgcgagtttgcttgcggcatccttgtcagatttgggtgctcctagaaatgacgaatcaagtatttttagtaaaacttgtgtcaaattgagaaatctttttacaatctcaaccttcgattttaattttttaaaaatgcttaacattttcctcatactttacgataaattttatcaaacttaacaaaacatattagaattgttccttacctggaacaggtgctgccgtcttcggcaaaggagcctgggctacaaaatacaaaaggacaacaaaaatcacattatcaaatatgaactgacctggttacaaaatatatctacaatgtgtatgtttctttgctaaataaaactagcagcaacaataatgtggtggcaaagctgcaaataaatgatgtattctttttatctatgatataaacatatatatgagacttgttttaaaagagataaatggcatttaaggcgacaacaacaacaatatttggctatctaatgttttaatgcatgtattctacaaaagttataaccaaaatgttaccggcagtttcggaacacaagttgggatcagtggtgagtccacaagttttggagaaaagagcattgaagtcggtgacattgaaagggatcaacaacattggacttttgatgaaaccgcaaagacaagatagctgagttgtcaacgccgtctctacggctgtgcagcattcctgcgacggaggtcctcgctgagtaattgccggaagacaaacagccaaaccagccgcacagttcatagcttcgttgactgaaggactaggagccagcggaatatgaggtccctgtcctgaaacagtcgtagctgccactagcaatgtggctaggagtaagatcaaggtggtggtttgagccattattaatcgtgggagaatcgttttcttttgtttttgatgcttccttaattagtatgtatatacacaatcaaccgtgaaagttattgacttagtgatagggttatgtcagcttgtggtatatgtatacttctaattggcatagtttattcgtggacttttgtaacacaaagacatattctgttccaaatttgaaacagatatttatatctggcataataatataagtacatccagtgaactaattactaattcacggacattttattaggaaaggacccggcaaagaaaatgattgacaatatgaattgccctggaaaataataataaaaatatagaaagaaccatgatgcacgtcagaattcgaaattagaattagctaatgtaatcaactattattttttttcttaatataaaacctatgttcaaagtggttcatacggtcactatgaatctatgatagtttacttcgccggcattgaaaatgctgaatagtagtgaaaagttatttttaaaacatagttggtgcgatgaagaacaaattgacaaagaaatggtaatatctatctataataatctgccaatgctagaatatgtggagccgcaaaatggtggaaaccgccagaaaagtttgtaagagtttttacatttgtgttattgctgactaagcttcttagtttttttttatttagtgacaaaccattaaattttattatatgacaaaaacgcatgctatggtttcgagtttacgggattacgggcttcgacccagaatctcctggtattcaaaaaaaaaaaaaaaaaagacaaatgatatgctaagaaaaaataagaaaagtaaagagagatgttttttttttggtgagaaaataaaaagaaatgttaagataacattaaaaaggttattttaatagtatactattttattttattttgaacaacaactcttctattagaattaggtttccatacaagaggccaaaagagcagtttttgctaatgcattggcttgctgattgttttctctaggagtaaaattgaaagaacaacagatgaaattagatgataaaacttggtttagccgtttaaaagtataatattacaatacacatttaataggttaaattctttggtttagccgtttagggagggattacggggattggggtggtcggattggattgggaattttggaagggtttgatatttttctaaattcctgttattcaattgattggaagggtggtctctctcaaaagtcaaatcttagaatttacttaaataatcattaattcaaagttactgaaacctattcttatttaatcagtactttgtaaaaagcatattaaatcctgtattaatcaaatttagtcagtttttaaagaaaatgtttttgaagcattttatgactcttcatattatcatatagatattttaattaaaaagtgtacaaaaaatcatacatagagggtccgattggtaacctacgaaggaatacaaagaatgaagaggaacatgactaaaaaagaacaaaaaagaaaagaaaaaatgataaaataggaatgaaaaggaatcagtgtagaggaaaaatagaacaaatgttactgtaaatgataacaaaaaatagaataaatagtaacaaaaattaaaaataaagaaattattttctaaattaaatagtcacgttatcacctatgtttttttcttctaactttccataaattaatttttaattaataaatatttaatttgttttcctgtttgttcttcatcaaatttgggaaggaacagttttcttgtacgattcctcaaaaaataaggaatgattaggaatagtgtagggtccacatgttacaatttgggaaaaaaattcctgctgaatggtgaaaaagaagaggaacatgttattcctacccattcattttctaaaaagtggtcaccaatgggactcacagttttttttttttttttttttggcaaagcatacatacagtctaagacattaataaaatttgccagttgggagagattctaatcaaattaataaaacaaaaacgctgggaccttttatcaatatgtctgtagtcttttattttcttagtaaattattttcattgttacatgattacataaatcagtggttatgtaaatatcagattctactctttttctttgtcaatataaatatccaccacgtcagcaaacaattagggtttttgaagtaatacaaataggtttcgagtggggacttacccaatcttcttcaggcaaatttgttttcgtcgcaaactttcctttatggcggctcgttcgaggattcttcaatttcatcgcttctcgcttcgtcgtcgtctatcactatgcccggccaaaaagggaggtttagctcgtgagtttccgtaaattttaatagatttagcatcgaatatccgaattattcatgttttttctgttgtctaggttttatctcttgaagcgtttttttggttgtaaattaacaatttcaagagacttaataatatttagtgatttttctttttttttgtgtgtggaaatgatcagatctaataggatcttgaagtgttctagggttcttattgagttatgtaataatcaaagattatatctagtttgttaattcaaaactcttttacaggtcaaacgtagatgtcaaaggattcagtttccttgagagcaagaatcagagcaaaaaagaagcgaagccaagttttgctgacctgacattatgcctcttggaagtaataatatctcaacttgacttaaaagataacattcgcgcatctgctgtctgtaaaacatggcgtgaagctggtctttatgtccggaaagtagacaagcctccttggcttatgtacttaccaaaacgtggcaatttgttcgaactctatgatccattgcatcagaagatgtacacattgaatctacctgagcttgccaaatctacggtttgttactcaagagatggatggttactaatgcgtaaaaccatttcaagagaaatgttcttcttcaacccgtttactcgtgagctcataaacgtaccaaaatgtactttatcatatgatgcgatcgctttctcttgtgcacctacatcaggtacttgcgtgttgctagcatttaagcatgtttcgtatcgtatcaccactacgagcacttgccatcccaaagcaaccgagtgggttactgaggatctacaattccatcgtcgcttccgcagtgaaacacttaaccacagcaatgttgtctatgccaaacgtcgcttctattgccttgacggtcaaggaagcttatattactttgatccgtcttctcgaagatgggattttagttacacctatttactgccatgtccttatatctcggatagatttagttaccagtatgagcggaagaagaagagaattttcttggctgtgcggaaaggagtgttctttaagatatttacatgtgatggtgagaagccgatagtgcataagttagaagatatcaattgggaggagatcaatagtactacgattgatggattgacaatctttacgggtctttattcctctgaggtgagacttaatctaccatggatgaggaatagtgtttactttcctagacttcgttttaatgtcaagcgttgtgtatcatattcgcttgatgaagagaggtattatccgcggaagcagtggcaagaacaggaggatttatgtcctattgagaatctttggattaggccaccgaagaaagctgtagatttcatgtgaagataaaagtaatggccaagcttggttatggtggaagagtaagatcatctcaattatcttaggactcaactcttggttatggttgaagctttttatttgtttaactgctttgtattctcagattctgtttctttctactctttggatttttttttttttttataaatatctttggatcagaataaagttttcatttttttttcttgaactctgttggaacataacaaaacttctgtatttaattatggaacacgtttcataaacgtatgtataatctgagagccgagatgataaattggctaatacgcaggttatgataatgtatcaaattgagccaaattacccatttttaaaaatcaagatagaaacggtaggggctatatacgtacaatatgctaaactttattttttgtattctgtctttatcaaatgtttccgtgatgggtttgggtgttttggtggttttcaaatgagcaaaggaaggagcttgaactttgttgctttcacataaaatagagttagacgtagtgagaaggaatgggcgaaggcatgggcaatgttgatacacaaatcaaacaagtacgagtggaatgtttagggaaggtgaagaatcaatcacgagatcacgagcttcaactaaagtcgactcactacgagctggacggctggagaacgggctgaatgccttggcaacgaactgattacttggtgacgagctggcgacctagtgacgagctgatgacttgaacaaagaagccaaagaccaacatacgattcaagggcttggacaaccccaagtccccaagtcactttcgtcagaaaatcctcgttcatcaccggaataaatttagttttgtaaattacaaatcgataagaaacctagcaacaacaacgatcctccgatgagacattatccgaatttggttctcgagtacacaaaatgaaagagacggattattaaaaaaaaaacaaaaaaaagagaaagacaaaaaaaattaaaaacataaaattagatctactgattgttattgaattgggcttacccggcccatagaaatatttataagcccgtttgaataactgacgtcgtatgatccaaaaaaaacgaaacaatcgcttccttcttcctcaccttcaagcgccgacttcaatcttttctcttcttctttgtttttttgctcttggttgatctctgtatcgggtacgtttcttatctcgatttcagtcttcatttgtttgttttttcttttcttatgtagctatgagaaccagaaccagaacgatgcaatagatactaaaaagcctttagaaatttttaaccatttttctccatttcacctgttgttgggttctagattaaatcaaactagagtatagtttctaatttctataggcatggttttagattttttgttttttttttggtttgatcactttgagaataatttaaagttgattgttttgtagatttcaagatatgtgtaagaagatcatgaacccgagttttgctgacctaccatcaagcctcatagaggttataatgtcacatcttgccttaaaaaataacatacgagcatcagccgcttgtaagtcatggtatgaagttggtgtctctgttcgtgtagtcgaaaagcatccttggcttatttgttttcctaaacgtggcaacttgttcgagttccgcgaccctttacactggaagttgtacactttgggtctcccagagttagctgaatcaactgtttgttactcaagatttggttggttacttatgcgtaaagctacatcaaaagacgtgttctttttcaatccgttttctagggatatcataagtttgccaaagtgtgagcttgcttttgagcatattacattctattgtcctcacatcagatgattgtgtgttactagcgataaagtttgttctggctgataatctcgtcactgtcagtacttgcaatcctggagcaactgactgggtcactgatgacttccctacttttataagaccgttttaaatccaaaccaaccttgtatatcgcagagataaattctattgctttaatgctgaaggaatttttgtataactttgatccatcttaccgcacatgaaattacatttgataaactcatatgatcatatgcccgtatgtccatgagaagcaatatgtgtggcgtgagaacgtagttgtcttggtagagaagaaaggagagctttttgttatgtttacatgtagtaacgagaagccaatagtgtataaactattctctttggagtggaaggagatgagtaggacaacacttgatggcttgacattctttgtcagttttcataactctgagttgaggaataatctaccatggatgaggaacaatgtctatttctcaaggtttggtttcaatcgccaaacattgtgtttcctactcgtttgatgaaagtaggtacaatctacacaagaaattggagaaatgggtagaactatgtcctcctcaaagcctatggatcgatatgccgaagaacgtgttagattttttgatgaaagattttcataacaattgagatggtttatttattgggttaaaatagatagaagtcatgtttacttgggaacttgggagtcatcactattgtgttttcgtaaaagtcttcttcttctaatgacattggactgtttctgattctccctacattgcagggcatagacttttttcagctttgctggttaacacttctttagtttacataggtcatcatattagtttccctaagtaatcaaggtcatactacggccaataggttatatccatgtatgatctcttaagtcaccaacgttttcaactgaatacatgtcacctgaggcgaaaaatcttttgttacttctacaagagaacctatctatatcttattgtcgttacaaaatagtgttcaatctcagcaacaagacgcatgtgtagttactcaagattgatgtaattgtggctccacttagaatctcatattgaactctctggtttgtgctctactgtatgggtctaattttttgaaagccccaattttcattgcctaacctgcatatttggtggaaaataattatatataaaactggacaagtttgacataaatcacatatcaacggaaactatggaagtgttttgtttatttttataagtgatggatctgggaaacagtatcagattttttctctgaaatactaaaagctgatattaaaaataaataaaaaatagtatatgaaaagatggtaaaacatgcaaaagctaatcaaaggaccaaaaagaagacatgtgaccaccatatcccccttttacatatttctatggtagaaagataaatactaatctatgctatataataatacatatatatcctctcaaacttgaacaagcatatatggaagattataaacagtggtttctactagggaattattgttgtatacttgtatcagaattccaaagtgtattgttttctaatcactaaatggaaaaccatttggagtttattttttaatacagattgtctttttgtaaacaatatctataacaaaaaaaaatacaataaatgtagctctcctataaataacacctcactcgtgtatacacacatatgccttttaattgaaacgcaccacaaatagaacaaagaaccccacacacacaccaatggaaccaaagctaacccatctttgttattgccttctactttttcttccactactctgccaatccaccatagccaaaccttcatcatcaccaaaccctagcagcagcatcaacttcattgtctcatcatgccgcgtcacgcgttaccaaactctctgcgtcaaatgccttgccgcttttgcagacaaaatccgccgcaacgaaaaccagttagctcaaaccgctttagccgttactctagtccgggttcagtccacgacaatctatgtagggaagctgactaaagctaggagaatcaaaaggagagagtacttagccgtgaaggattgtgttgaaaatcttggagacggtttagagatgttggctcagtcgatgagggagttgaagcaagttggtcgatctggtcgtgatcgagacgagttcttgtggagactaagtaacgttgagacttgggttagtgctgccttaacggatgagacaacgtgtctggatgggttcgatggaaaggttatggacggtgtggtaaaatcagcgattagaagaagagtggttcatgtggctcgagttactagtaatgcattggctcttgtaaaccggttcgcggctaggcataagtcatagaatattcggctaataaattaaaattcggtccttaataaggttttgtcatgtattttcttttttgtcctagtgggtgatttgtttctttatgatactttgtatttatgtgtaggcttgggatgtttatgcttttgtcatggtttcgactagagataacgatgattttaacgggtttatggagaaaaagaattggccacaaaaattggatgagctcctacatttcaatatagttacggtctcggatataagcaatggatggccacaataatgtttaccatttttaaccactctaataaccaatgctgttttctaaaatcagatgagtttcttacttcacacatatacactttttctaagcatacaaattataacctctaagttggacaaatctcctactttctgcataccctttagtgtttttgttccttttcacggaaaccattagaccaagagctagtcactttactatttgaataatcttatgatgacattctttccacataagctccatttactttggtagtttgggagcaggtgtgaaaatcttatcactagtctaaagttaaacactaagtgctcttttgatttaatttaaataaaccttcggattgttagcttttgggaaagacaagtccaagaagtaacggtgaagagtgatcatggaagcaaattaggtacaattatggaaatacaaatatttttaggctgtttgccacatgaacaaaacatgcaagtatatatgaattatatcctcttaaattactatttaacatctattaacccttttgcatggaatgtttatgaaaaatctatgcaaattctattgcaagaaaaaaaaaaagtactctgtaatttggttaaccatcggtacacctccccttacgaatttgtgatttgtgtagtgaaccgattaaccgaatagtatttattaggaacatgtcataattttgaaaataatcgttaattaacaaaataaaaagttatgggaaatagttttatgttctaaatcaaaattcagaaattattacttatgttttttcagttagcaaaggaaaattacatatcttagattctgaaacttaaattctaaaattaaaactcctaaactttcatagattttaaaatcttaagatctttttgtttttgttttttgggcaaacaaaatcttaagatctaaatcttaaaatactttccacaaaccgttccactagagaaaaatctatatatatatttttttaaactatattttgtattaaagaaaagtggaagagaaaattcaacacaatctgattattgcacaatttcttagtcaccataacgtgtgcaatgcacgtgaggcccgtctaaaaagacttttattcctctgtaaaagagacatgtagaaaacaaaaaagattttacagcttttgacttttaaattataattttcgaccaaaaaagaattatagttttttttaaaattttttgacagcaattataaatttcgtttgaagattcttttgagaaaattcgaagaagtagcatataaaactaggagaacacagacttgattcattctacaacaactcctcaaacatgacccaaaccaaatcagagtttcatcagtttaacaaaagcccaaaagaacgcagtgaaaatttggaaacatcttcggtttgattcaatataccactccggtttagcataaccaatttaccggacctgaacaattccggcactaaccagcttctgaatcttgttcattaccattgggttcttcatatgctcttgtgcagctttcggattctcttgaaagtccactagtacctacaatagacatcatcacacaagtctcacagacagcttacgagttagaacacaatgcttgccactgcttttacctgtctcatcactggatccgataatatgttctgaacttcaggatcttgcattgcctttgcttgtctctccttcaattcttctggagtcagatcaccacggctcgctttgtttatctgttccacacatctgaaaacaacaacactttcactagaccgatctttgcaaggttaaacaacaaagagagaatgccaaaatttgcaaaccttctaacaccatcaaggaactcctggttcttaggatcatgttttagcccttcttgatacgtttccatagctttatcgtattccttcatgaaaaattgaatagctccttttctactgtatcctttcgtgaaacttgggtccagctcaatgcatttttcagcatctttcaatccctctggtaatgctcctaactttgtgtaacaagcagctctgttgctatatgccctcacgtcgttcgggtttcttttgattgcttctgaataatgcttcactgcctctggatacttttgttctttaaagaatccattacctgcatcaatgaagaagtgtcaaatgcttaatcctaaaatcaaatcacgtttcaagatagtaagtgtaactgaggatcagtatatatacctttctctcgctcctcctcggctatcgtaggatcaaagtactcctgttgctccagctctttcttgactttctcagcatcgttcagtttcttcaatgtatctggattacgatgctctgtaagagctttctggaaagtctcaatcgcaggctcaaagtctttcgagcatctcgccattttcactagagcagatccttttctagtcagagctcttgctatcatcttgaagtcagaacgaagttctctgcctctttcaacagccttgtcacagtcttcaatgcactcctcgtactgataatttcatttgagaaatgaagtaaaacatcacacaagatacagtaagatccagatgaaccaactgttaattaaacaagactaatgcaagaacacatagaccaatggaattgaaccactcaggatacttgaagattaattgattccagtaataataaagataaccacttctacagaacaagtgaataaactccatcatgaagccataaaccctaaatttctacctcatctaaagctaactactttcagcacaagtgaaaacttaagttcaaaactcttaaatctccaacaagaagcagatgaaagttatcaaaacccatcaaggtcatcacaaatgtactaactagtgacaagctatactaaacagataagctacttcaagaacccaagatctcctccttaatcttaaagtacctaaaggtttaacttttaagccaagtataagacttaataccttccccatctcaagataaacagcagcacgattcgtcaaatacgaaatatcctcatcatcgagctccatggccttagtataatgttcaacagctctcccaaaatccttcttcttataagcaacatttccttcccctttctccttcaaagccttctcctttctctccttcttctgcctctcctcctccgtcaactccataggttccatctccggttcaggctctttcctctcatcagcctccttcatctcagtatcttcaccactagatccaccaaacttcacattcaacaaaacccctaaagccttcataactctcttatccttcatatacaaattaagattattagggttcctctgaatctccttcatcgtcttaacaaaatcatcctgctccaaataaaccctagtccccggatccgccgtcaacttctcccacatctccttcccttgaaacgcatcaacaaaaggattcgactttgacgaaaccctagatctcgaagcatcagctaatcccgatttaagcatctcattactcggatcaatctctaatcctttcttatacgaatcaaccgcttcatcaaacttggacaatccaataaacgcagcacctaatcggctatatcctttagaccaatcaggtttaagctctatagtcttcttcgcgtctgataaagcttcttcgtaacggtggagagaagcgtaagaagcggatctgtttgagtagaggatgtgattggttggtgaaaggttgattgcttctgtgaaatgggttattgcggtggcgtaatcgccggaagagaaagctgcgtttcctttggattttgcttcttccgccattgaattggatttggtttaggtatcgtgagaatctgcttgattgcatttttaaaaacagaggaagatgaagaagaaggcacaagagagttctcgaaatttcgaatttttttgtgtatgtcgagaatgttcttttgtagccgtggaaaaatgtttttaaatcttaaaaatacaaaaggaaaagaaacgctagagaaaggggtcgaacctctgaccttgtggttaacagccacacgctctaaccaactgagctactccagctttttgataagtgattcgttatttatgtaaatataccgtctagaaaagaataaacatccgtttatgttctgtgcttacttttttatgctatgtctttgtcttctgtcagaagattaagcgtcagaaagacatcgtggagttagcaacgagacgatcaaaattcttcaatccgaagtagtagtaaaccagaggtgagaagacgaccagtttgggagagaaaaccaaatcggaggtatgtatggtgattaaagttttggttatgataaataatatcatcataagcgaatagttttgtacgtttttggtttaggttttaatcaaatgtgtctttacttttaataagtttaggtttgatatttggtttttttgtttttttctaaacataccacatataatcatatatattaatactcaaagaacaagtagtacatggtttctccaaatacttgtaaccaaccaaagtggtaaactacaatctaaaaagcaaaatacaaatcacatgaagatgcaaatttagcaagtgcatctcctctgcacatttgttctcacctcatcttctaaattttaacatatttgatcactttcctacaatatgatttgaatttgtattcaaatttgggaaattttgaaaattaccacctttatgataccatttttcaaaaagaccagaaaaaggttgttcaaaaattctagtttcatatcatttcttaagaaaaatcttctaagcactataaaacattaaaaattttgtgaaaaatcttataaatgtttgatattatgcattatagaaactttataaacgtttttataatatgctctataaaagttaataaaacaaattctatgattgcattttgtgttacattgaaaattaacaaaaaaaaaaaacagtggtattattaaaaaaaaataaaaatcataaaagtggtatctcaaaaattcttctgaaatatatttagatagaagtaatttcataattaacattatatggaaattctaaatattgattgtttcacttcaattggggtttatagtggatgataggtttcagatacagcaatacaccatcactcactgtatttgatatattgaaatataagtattcaaaaatactgatagcccaatttcagttttttctgttttttttttttaatttcagtttttatgtgtgtaattttataagttagaacataatttcagttttgttctaacttataaaattacacacataaatctaaaccatatagtattataggatgtcaatgtggtctatcatccatgaaataaactgatacaaataattatcttgtatttatgaatcggtatttatcgtataacatagatggtaaaaaaaactaatattcacaaattaaaggaaatcatccttctctgtactgtataagtgtatataaatttttttaatcctcttttgatttttgactattttataaattcaaattatataatcttgtaagaatttttcctgcggcaatgatcccatgcagcgatcctcaactggactttttcaaaatccgaaacccgacaaggaatagtgatccgacccggttgatcaaacccatgaacccgctccgcttgctccaacaattctccaaacaatggatgattaaagtaaatcaccggcaccacaactcgccgcgtgtcatcgtctgattcgccgacatgaaccaccaaatgtcctcgaggaacaacccggttcgactttttcggatccttacccaaccggatctgattctgacccggattcttcttgcttccaccgcacaatctcttagctccacggcttaaacaccgtgctaatgaccggattccggtaaccgggtttgtgattcgggtcgggcatctgtttcttggtatccatttgaaaattttgacaaatctgtgtccaattttgaaccctctgactctcttcatgcttggttttaatcagattccgacaaaaaaaaaaaaagtctttggtgaaaacaatgagatgggtttgtttgaaatcgagtttcaagaaatgggtttgattcgaaagaaatagatttggagaaaattttggtttttgttttttggtatctctctctgtgttttatgttatagagttgaagaagaagactgtttgggtatggggaaagaggttacctcttatatagccttcaaggagctatgactcttatgtgtgcgtgtgctttttaaatgtgtccactttgatggatagttttccaaatacaactttttttttgtattttttgttatattttcgtatcatttatcatcttttcaaaatttagggaactttttttttctattcaaaacatgcgacttaaaattccaaatcttaagtgccaaaaaaaaaaaaaacctcaagatatttaaaatgaaatatattacaagagatatatttacaagacttgtgtaaacattagctatttaattaatttggtcaggggtgttaccataaattatcgcaatgaagaagctagctaagctttgatcatattcagtgggaacggactacttcaacacttaagacctcgaatgttattcgtgaaataccaaaataacaatgttttttctaatcagattattgtgcaacgcagctatgtccagccatactgtcattgtgcaagcttagttaccaaattcatcaatctaccacatcgatcgaataacatgaaatttttttataaagatatgtgtgtaccattattaaaaaaaattccaagtttcttatttaatttaacatgtcattatcattaaaatgcaaccactagttgaatgttcatattatatattgattaagacatatttatgatcgattatgtgagttagtaacatgtttcttgttgtagttaagtatctagatgattcgatttgattttttcataatacactccattataagtttagtatgtcgttccttatgaataatacatcgcatgaaatcactagttattagttcagaatttgttttgctttttctatgataactagtccagatttaataatggttttgataagacaacttggaacaaagcatctataaagaaatattgtatagatagagttcagatatatatagattaaataaatgaatttcacaaatgtttatatggttataaatgaaagtttgaataataaaaattaaataaagcagagaaattgatgaagacaaaaggcatgcaaatgtgtgggagggacatagtgtgggatttggtcggcggtcgacacggctcgtgcaatcttaacatgccctgattcactgaaagtgcttcgttcagtttaagaattattgtgttgcataattattatttatagactacttcagttattattaatattctatttttatgttggaaaatggcttaattcttatttcttaatacttctttgcacgttttttttctatgatctaattcatcataagtacatcaaaattaattagagtttgagtttttttcacttcgattataattatggttgaaatttgcaaatgtgtaaactgataataacatcctattattttacatattataaagattagtttgagtttcgatccagatttctttagttatatatagtttgtaataattattatcattattttgactcaaatgtacttatatcttatctttacaaaagaaagacgataaccaaagtcataacatatgaaacgttcgatgttacatctactactagttaaaagtgaaaaaaagcgaaactataatgcgtagagaataagagagtataatgaatggtcaaggcattaccataaaccacacacgtttcatatacaacatacacttttctagatttttttttacacttttctagatttttcttctcttttcttcatccactatttcaaaacaaaacgatactccaattgacacgatttatatttttcatagaacgaatgaaaacgtgttcaatttatttggagaggaagaaaagggaaaaagaagaaagaaatgtggagactttatagaagggaaggatagaaactaacaatttatgtacttttgtttacctaatattgaaaccatacattcgtcatctcttcctatcttcccatgttgtttaaacgtaaatttcatactctatattagaatcttgttcacacacatatgacgtcgtagaagaatccaatatacaagagcattagattttgtatgaaaattaacaattaatatcttcaactggttgcttaaacaaattttgctagactactaatgttacggtattttatattattttggtattttagtaaacagtttcaatgttacggtaatgatcagtgtaatatattatagttatttataagttggagatacaatcacagtaatgttaaacatataaagacataaaccttgaatggttacagcggcccaagcggacaaactagtttacagatcggatcattttttatttaccatttacaaactatagtccgtaataatacggacctaaaaaaaacgaagcggactaagcgcggaccatatttaaaataagttcacaacggtttgttgtccgccccaaaaatagtatggactggattgctgacggattagtccgcactaactacaacatctatttcaaagccatatatttgtagataattagatgtcaaaaatatgtatgtatatacgattacatcaattataaatgatcatatgctaattgtattctcaatttacctgccaacagagagaataaaaatctttaagaataaatatgcaatcttgtaagccatgatatcccaccagtaatctctaaccaggttaccaaatctaatacatgtgacatgacaactaatattttttaatgtctttaataattaacatgccatgcagttgtatagagttattactcaattaccatttaaaatcatcaaattcacatcacgtaattcactatgactactgtacatgtttcataatgaaataagttagacatatgcagctggtaatggtaaaatatatagcttttgtagaatacaccaagttcttttcttttccaaaagagcaaattgggtaataacgtgacgaatgcgactcgagccaaactcaagtggcaatcaatcctacgattgtagaacataagataaataagaacagctaacaaaagtcaacgtcagatttgttggtggacaagaggacaatgaaaataaataaatgtttggaatcttccaagttctagtaattttgttgttaatccacctatcacggatcatgatgttttgttgctacaatcttttttgtttaatccttttaaaataaaaaattagaataactaaccagcaattactagttaaattgattaatcgaatatttattagttagttattggtctgatattaatggtgtggtcaactctttaagtgtcaatgctaaagagatacaataatgaacaagtattatctttcactagatgagtacccgcactacgtgcggactttcaatttatatttcgtaatttaaaagtatttaaaggtaaaatttaggttaattttttaataggcaagaagacaaaattcctatttgatactaagctccataaatcaacaatttatttttgcattttgcatttagatttctaacaaaatattttttcagtaaacattatttttataattttttttcatttgtgttaaccttaaaccaaaaaaataagacaaaatgctagacgatttgagtccaagaatttgatgctagagttctcaagtacttctcaccatttttaatatcttatatagaaaaaagaacaacctacgaaaactattagctaatccactatacaattatttaattatattttaacttaaaattataaaaattagggaaaaatatctaagagtatgagaaaatcaattaaataatttaatttaagaaaaagacatacaaaataaaagaaaattattatttatacaattaattatttaaaattttataatatatacaattaaataataaatcactataaaccattaacttacactaattattaagtggacatgtggcaaattaaaagctaagtgatgatgtgtcattcatatgaagagagtttgccaattttcatatatatgattacaccacatatagataatatataaacttatgatctttatatatacaatatttataaaattacctacatatttgttattattagttaatttgttattctaaatgaaaactcatgctacgcatgggtttttgtttttaaaattgtcggaatatatgattatggtcttttgttgattttgatgttcatttttgtgtgtgtgttaatgtgtaagtaataaagtcatatctattttatagagttataattttttataattaaatttttctataattcaaaatatcaattttactataatatgaatatttatagacctattattcaaatatttcactatcataaacacatacaacaaaattatatgatatattaatatgtagttatattacttatgtattttgaaacttgcctaacttaattgtaacaaacaattctatattccatatattctctcgttatctagtacactaaccagatcatgatatgctagtaattcaagtcaacactttaattctcttcccttgcatatagccatatagaatctcgttttttttgtgtgggtatatctaatgtgtcggatgaccattacgtgaaaaatgtatatcaatgttaccaagttatcagaaaccacaaaaataaacagaaagaaggtcatatgataaatcatattcatataacgtaataataagaaaatatccaactaaaattactaattaatatgaggttaggtagcaaacatttaaactacgacacaaagtaaattttagccattataaattgataactattgataaaaatattttaaaaaataagtagaataaaatgaaagtagtatttgatatattattataattttttatttattgaatgttttaagaaaatttatttaaaagagagattatagagaatttaacacaacaaaagacttttgattcttcctcaattaattgtattatttttttatttaattaatatagaatgacacatgtcattttcttgtgtgatgatgtgtcattcatagggagagagttggcaactttcatatatatgatttattttttaacgtttaaatttattatttattgtaaattatgagaattattacaaatataattataccacggataatttctttcgatcttgttagatctacgacctacgatacttccttctccatatacgatatacgacactttgacggtttttaattttattttacatatgtggttatgtaaacgaagttttaatgatataatttggacttttcaacaaaaacattttccctaagcccaagttcaaatataaattttttgatgggtaggttcaagtaagtgttatgtatattgtggcccataatatagttttaattctattcaacaatactaggcccatttatatttgtgaatctcgtggtaagatgatgatacgagtatatataatagcagttgtttagacgttttagctctttgtaataatctaaaaatggtacatctctttcattttatttttttcatgaatctctttatgaaaaaaggtttctaaaaccatttacctttgcatttttcaaagtacaacaatattctaactaattcgatagaaccagtttgtcagagattgtaatggtaccatgttttttcttttgtcatttacaaaaaccaccagaaatttctcaattatcacttttatcagagaaaattatattttccttgtccattttcaaatttggcaagaaagaacagagggacaaagatagaaatggaaagcaaaatacagaaaggatccagcctggatttgtcagagagacaaaaagctgaaactcccaaccaaaaaaaaaagataactaattatattccccaccttgggacctcataaatccataatgcatgctttttcccattttcttctgttttcctttcaattttttttttttttttttttgtaatactaaatatatcaactacatttctctcattttatctatataattgatagtgtttactaaataaaaataatgtaatttgtgttaatgttgattaatatttgggttcaacttggttaaaattgtggaattttggtatgagataaaacaataataaccaaagcttaattagaacaaatttaaaacattttaatgaatatttgtttttcttcttctcaaataaacaaatcccgggaaaaagaataaaacaacagattgaatccaaaaagaaacaaaaaaaaaaagacaagtcagagaaatccaacaacccccaaataagaagaactgtggaaacgtaaagaagaagaagaatcatcatctctggtttgatatcaacaaaaccctagaaaatacaacaaaccctcagatttaacaatttcaatgctgaagcatcatcatcatcaccaaagccattaccaccatagaaagactcgtgaatccaatgctcttcgatgccgacgatgaaaccttctgtggcctgaaacaacaacaaacaaaagaatcacaaaccaagaacatactaaagaatgtgcgttcttgaagtttttttgttcctacttttgtagtttgctgagagcaccacagtaaagaacattgtcagggtgtccgaattcggttttgttgttttcgtctggattaaccactctaacgtaagtttcttgtccaagataccacgaatcaagattctctgttcttagattccaagctccaggattgtctaatgatatcaatatcgctgaccatgcccctggatacacctgtgaacatatataaccacccccaaaacatcaatcacattggcctttagaaggcgaaatcatcgattgtttgttcgcatttgcgtttacctgaatagtggaacgcgcgataccatcccatttgttgtatgttcctctactgttctctgtccactctccataatccatactacaagcaatcaaaacgtttcaagaaacagttatttacaatgccaaattaagtggaagagaactaactgtaaaactcacccgacgacaaagaaggcgtagccactcatgtgatagctttgcatcttagtgtcattgttctgaagaacgacttccatgaatccacgataagtaccattgataatcgaagtcgccactttagctggtccagttaaaggtctcttagggaaatcaagcttatacacatctttaactttaagcttatcagctagtctaataggtgttgaaggattcttgaacgatatgccattaagcgttgttcttctcttcccactaatcgtcacaggcggcatgttccttagaacgtagacatcggttacattgatcgaaccgtatttaaatgatccttgcgggttaggacgtgcaccacttgctgatacattccatctgcaataacaaagtatgattcaaaggtcaaaacttgatgaaactacaaggaaaaagaattcgctttttcggataaccaacctgatggatcttgcttgattcatggagaaagttttgtcgaattcgtcttgtggtccagggggtaactgacctttagcttttcctttagagttggtatacttcaagattccaactccagtgactcttctccatatggtttcgttaacaacccgagcactcgcgacaatgtagtaatcagagctcgcgttttgatccattgtaaccaagaaagaataagactgtccaacatgaatatccaagctt

SEQ ID NO: 573 - DNA, 137519 bp, Arabidopsis thaliana
aagcttatattactttgatccgtcttctcgaagatgggattttagttacacctatttactgccatgtccttatatctcggatagatttagttaccagtatgagcggaagaagaagagaattttcttggctgtgcggaaaggagtgttctttaagatatttacatgtgatggtgagaagccgatagtgcataagttagaagatatcaattgggaggagatcaatagtactacgattgatggattgacaatctttacgggtctttattcctctgaggtgagacttaatctaccatggatgaggaatagtgtttactttcctagacttcgttttaatgtcaagcgttgtgtatcatattcgcttgatgaagagaggtattatccgcggaagcagtggcaagaacaggaggatttatgtcctattgagaatctttggattaggccaccgaagaaagctgtagatttcatgtgaagataaaagtaatggccaagcttggttatggtggaagagtaagatcatctcaattatcttaggactcaactcttggttatggttgaagctttttatttgtttaactgctttgtattctcagattctgtttctttctactctttggatttttttttttttttataaatatctttggatcagaataaagttttcatttttttttcttgaactctgttggaacataacaaaacttctgtatttaattatggaacacgtttcataaacgtatgtataatctgagagccgagatgataaattggctaatacgcaggttatgataatgtatcaaattgagccaaattacccatttttaaaaatcaagatagaaacggtaggggctatatacgtacaatatgctaaactttattttttgtattctgtctttatcaaatgtttccgtgatgggtttgggtgttttggtggttttcaaatgagcaaaggaaggagcttgaactttgttgctttcacataaaatagagttagacgtagtgagaaggaatgggcgaaggcatgggcaatgttgatacacaaatcaaacaagtacgagtggaatgtttagggaaggtgaagaatcaatcacgagatcacgagcttcaactaaagtcgactcactacgagctggacggctggagaacgggctgaatgccttggcaacgaactgattacttggtgacgagctggcgacctagtgacgagctgatgacttgaacaaagaagccaaagaccaacatacgattcaagggcttggacaaccccaagtccccaagtcactttcgtcagaaaatcctcgttcatcaccggaataaatttagttttgtaaattacaaatcgataagaaacctagcaacaacaacgatcctccgatgagacattatccgaatttggttctcgagtacacaaaatgaaagagacggattattaaaaaaaaaacaaaaaaaagagaaagacaaaaaaaattaaaaacataaaattagatctactgattgttattgaattgggcttacccggcccatagaaatatttataagcccgtttgaataactgacgtcgtatgatccaaaaaaaacgaaacaatcgcttccttcttcctcaccttcaagcgccgacttcaatcttttctcttcttctttgtttttttgctcttggttgatctctgtatcgggtacgtttcttatctcgatttcagtcttcatttgtttgttttttcttttcttatgtagctatgagaaccagaaccagaacgatgcaatagatactaaaaagcctttagaaatttttaaccatttttctccatttcacctgttgttgggttctagattaaatcaaactagagtatagtttctaatttctataggcatggttttagattttttgttttttttttggtttgatcactttgagaataatttaaagttgattgttttgtagatttcaagatatgtgtaagaagatcatgaacccgagttttgctgacctaccatcaagcctcatagaggttataatgtcacatcttgccttaaaaaataacatacgagcatcagccgcttgtaagtcatggtatgaagttggtgtctctgttcgtgtagtcgaaaagcatccttggcttatttgttttcctaaacgtggcaacttgttcgagttccgcgaccctttacactggaagttgtacactttgggtctcccagagttagctgaatcaactgtttgttactcaagatttggttggttacttatgcgtaaagctacatcaaaagacgtgttctttttcaatccgttttctagggatatcataagtttgccaaagtgtgagcttgcttttgagcatattacattctattgtcctcacatcagatgattgtgtgttactagcgataaagtttgttctggctgataatctcgtcactgtcagtacttgcaatcctggagcaactgactgggtcactgatgacttccctacttttataagaccgttttaaatccaaaccaaccttgtatatcgcagagataaattctattgctttaatgctgaaggaatttttgtataactttgatccatcttaccgcacatgaaattacatttgataaactcatatgatcatatgcccgtatgtccatgagaagcaatatgtgtggcgtgagaacgtagttgtcttggtagagaagaaaggagagctttttgttatgtttacatgtagtaacgagaagccaatagtgtataaactattctctttggagtggaaggagatgagtaggacaacacttgatggcttgacattctttgtcagttttcataactctgagttgaggaataatctaccatggatgaggaacaatgtctatttctcaaggtttggtttcaatcgccaaacattgtgtttcctactcgtttgatgaaagtaggtacaatctacacaagaaattggagaaatgggtagaactatgtcctcctcaaagcctatggatcgatatgccgaagaacgtgttagattttttgatgaaagattttcataacaattgagatggtttatttattgggttaaaatagatagaagtcatgtttacttgggaacttgggagtcatcactattgtgttttcgtaaaagtcttcttcttctaatgacattggactgtttctgattctccctacattgcagggcatagacttttttcagctttgctggttaacacttctttagtttacataggtcatcatattagtttccctaagtaatcaaggtcatactacggccaataggttatatccatgtatgatctcttaagtcaccaacgttttcaactgaatacatgtcacctgaggcgaaaaatcttttgttacttctacaagagaacctatctatatcttattgtcgttacaaaatagtgttcaatctcagcaacaagacgcatgtgtagttactcaagattgatgtaattgtggctccacttagaatctcatattgaactctctggtttgtgctctactgtatgggtctaattttttgaaagccccaattttcattgcctaacctgcatatttggtggaaaataattatatataaaactggacaagtttgacataaatcacatatcaacggaaactatggaagtgttttgtttatttttataagtgatggatctgggaaacagtatcagattttttctctgaaatactaaaagctgatattaaaaataaataaaaaatagtatatgaaaagatggtaaaacatgcaaaagctaatcaaaggaccaaaaagaagacatgtgaccaccatatcccccttttacatatttctatggtagaaagataaatactaatctatgctatataataatacatatatatcctctcaaacttgaacaagcatatatggaagattataaacagtggtttctactagggaattattgttgtatacttgtatcagaattccaaagtgtattgttttctaatcactaaatggaaaaccatttggagtttattttttaatacagattgtctttttgtaaacaatatctataacaaaaaaaaatacaataaatgtagctctcctataaataacacctcactcgtgtatacacacatatgccttttaattgaaacgcaccacaaatagaacaaagaaccccacacacacaccaatggaaccaaagctaacccatctttgttattgccttctactttttcttccactactctgccaatccaccatagccaaaccttcatcatcaccaaaccctagcagcagcatcaacttcattgtctcatcatgccgcgtcacgcgttaccaaactctctgcgtcaaatgccttgccgcttttgcagacaaaatccgccgcaacgaaaaccagttagctcaaaccgctttagccgttactctagtccgggttcagtccacgacaatctatgtagggaagctgactaaagctaggagaatcaaaaggagagagtacttagccgtgaaggattgtgttgaaaatcttggagacggtttagagatgttggctcagtcgatgagggagttgaagcaagttggtcgatctggtcgtgatcgagacgagttcttgtggagactaagtaacgttgagacttgggttagtgctgccttaacggatgagacaacgtgtctggatgggttcgatggaaaggttatggacggtgtggtaaaatcagcgattagaagaagagtggttcatgtggctcgagttactagtaatgcattggctcttgtaaaccggttcgcggctaggcataagtcatagaatattcggctaataaattaaaattcggtccttaataaggttttgtcatgtattttcttttttgtcctagtgggtgatttgtttctttatgatactttgtatttatgtgtaggcttgggatgtttatgcttttgtcatggtttcgactagagataacgatgattttaacgggtttatggagaaaaagaattggccacaaaaattggatgagctcctacatttcaatatagttacggtctcggatataagcaatggatggccacaataatgtttaccatttttaaccactctaataaccaatgctgttttctaaaatcagatgagtttcttacttcacacatatacactttttctaagcatacaaattataacctctaagttggacaaatctcctactttctgcataccctttagtgtttttgttccttttcacggaaaccattagaccaagagctagtcactttactatttgaataatcttatgatgacattctttccacataagctccatttactttggtagtttgggagcaggtgtgaaaatcttatcactagtctaaagttaaacactaagtgctcttttgatttaatttaaataaaccttcggattgttagcttttgggaaagacaagtccaagaagtaacggtgaagagtgatcatggaagcaaattaggtacaattatggaaatacaaatatttttaggctgtttgccacatgaacaaaacatgcaagtatatatgaattatatcctcttaaattactatttaacatctattaacccttttgcatggaatgtttatgaaaaatctatgcaaattctattgcaagaaaaaaaaaaagtactctgtaatttggttaaccatcggtacacctccccttacgaatttgtgatttgtgtagtgaaccgattaaccgaatagtatttattaggaacatgtcataattttgaaaataatcgttaattaacaaaataaaaagttatgggaaatagttttatgttctaaatcaaaattcagaaattattacttatgttttttcagttagcaaaggaaaattacatatcttagattctgaaacttaaattctaaaattaaaactcctaaactttcatagattttaaaatcttaagatctttttgtttttgttttttgggcaaacaaaatcttaagatctaaatcttaaaatactttccacaaaccgttccactagagaaaaatctatatatatatttttttaaactatattttgtattaaagaaaagtggaagagaaaattcaacacaatctgattattgcacaatttcttagtcaccataacgtgtgcaatgcacgtgaggcccgtctaaaaagacttttattcctctgtaaaagagacatgtagaaaacaaaaaagattttacagcttttgacttttaaattataattttcgaccaaaaaagaattatagttttttttaaaattttttgacagcaattataaatttcgtttgaagattcttttgagaaaattcgaagaagtagcatataaaactaggagaacacagacttgattcattctacaacaactcctcaaacatgacccaaaccaaatcagagtttcatcagtttaacaaaagcccaaaagaacgcagtgaaaatttggaaacatcttcggtttgattcaatataccactccggtttagcataaccaatttaccggacctgaacaattccggcactaaccagcttctgaatcttgttcattaccattgggttcttcatatgctcttgtgcagctttcggattctcttgaaagtccactagtacctacaatagacatcatcacacaagtctcacagacagcttacgagttagaacacaatgcttgccactgcttttacctgtctcatcactggatccgataatatgttctgaacttcaggatcttgcattgcctttgcttgtctctccttcaattcttctggagtcagatcaccacggctcgctttgtttatctgttccacacatctgaaaacaacaacactttcactagaccgatctttgcaaggttaaacaacaaagagagaatgccaaaatttgcaaaccttctaacaccatcaaggaactcctggttcttaggatcatgttttagcccttcttgatacgtttccatagctttatcgtattccttcatgaaaaattgaatagctccttttctactgtatcctttcgtgaaacttgggtccagctcaatgcatttttcagcatctttcaatccctctggtaatgctcctaactttgtgtaacaagcagctctgttgctatatgccctcacgtcgttcgggtttcttttgattgcttctgaataatgcttcactgcctctggatacttttgttctttaaagaatccattacctgcatcaatgaagaagtgtcaaatgcttaatcctaaaatcaaatcacgtttcaagatagtaagtgtaactgaggatcagtatatatacctttctctcgctcctcctcggctatcgtaggatcaaagtactcctgttgctccagctctttcttgactttctcagcatcgttcagtttcttcaatgtatctggattacgatgctctgtaagagctttctggaaagtctcaatcgcaggctcaaagtctttcgagcatctcgccattttcactagagcagatccttttctagtcagagctcttgctatcatcttgaagtcagaacgaagttctctgcctctttcaacagccttgtcacagtcttcaatgcactcctcgtactgataatttcatttgagaaatgaagtaaaacatcacacaagatacagtaagatccagatgaaccaactgttaattaaacaagactaatgcaagaacacatagaccaatggaattgaaccactcaggatacttgaagattaattgattccagtaataataaagataaccacttctacagaacaagtgaataaactccatcatgaagccataaaccctaaatttctacctcatctaaagctaactactttcagcacaagtgaaaacttaagttcaaaactcttaaatctccaacaagaagcagatgaaagttatcaaaacccatcaaggtcatcacaaatgtactaactagtgacaagctatactaaacagataagctacttcaagaacccaagatctcctccttaatcttaaagtacctaaaggtttaacttttaagccaagtataagacttaataccttccccatctcaagataaacagcagcacgattcgtcaaatacgaaatatcctcatcatcgagctccatggccttagtataatgttcaacagctctcccaaaatccttcttcttataagcaacatttccttcccctttctccttcaaagccttctcctttctctccttcttctgcctctcctcctccgtcaactccataggttccatctccggttcaggctctttcctctcatcagcctccttcatctcagtatcttcaccactagatccaccaaacttcacattcaacaaaacccctaaagccttcataactctcttatccttcatatacaaattaagattattagggttcctctgaatctccttcatcgtcttaacaaaatcatcctgctccaaataaaccctagtccccggatccgccgtcaacttctcccacatctccttcccttgaaacgcatcaacaaaaggattcgactttgacgaaaccctagatctcgaagcatcagctaatcccgatttaagcatctcattactcggatcaatctctaatcctttcttatacgaatcaaccgcttcatcaaacttggacaatccaataaacgcagcacctaatcggctatatcctttagaccaatcaggtttaagctctatagtcttcttcgcgtctgataaagcttcttcgtaacggtggagagaagcgtaagaagcggatctgtttgagtagaggatgtgattggttggtgaaaggttgattgcttctgtgaaatgggttattgcggtggcgtaatcgccggaagagaaagctgcgtttcctttggattttgcttcttccgccattgaattggatttggtttaggtatcgtgagaatctgcttgattgcatttttaaaaacagaggaagatgaagaagaaggcacaagagagttctcgaaatttcgaatttttttgtgtatgtcgagaatgttcttttgtagccgtggaaaaatgtttttaaatcttaaaaatacaaaaggaaaagaaacgctagagaaaggggtcgaacctctgaccttgtggttaacagccacacgctctaaccaactgagctactccagctttttgataagtgattcgttatttatgtaaatataccgtctagaaaagaataaacatccgtttatgttctgtgcttacttttttatgctatgtctttgtcttctgtcagaagattaagcgtcagaaagacatcgtggagttagcaacgagacgatcaaaattcttcaatccgaagtagtagtaaaccagaggtgagaagacgaccagtttgggagagaaaaccaaatcggaggtatgtatggtgattaaagttttggttatgataaataatatcatcataagcgaatagttttgtacgtttttggtttaggttttaatcaaatgtgtctttacttttaataagtttaggtttgatatttggtttttttgtttttttctaaacataccacatataatcatatatattaatactcaaagaacaagtagtacatggtttctccaaatacttgtaaccaaccaaagtggtaaactacaatctaaaaagcaaaatacaaatcacatgaagatgcaaatttagcaagtgcatctcctctgcacatttgttctcacctcatcttctaaattttaacatatttgatcactttcctacaatatgatttgaatttgtattcaaatttgggaaattttgaaaattaccacctttatgataccatttttcaaaaagaccagaaaaaggttgttcaaaaattctagtttcatatcatttcttaagaaaaatcttctaagcactataaaacattaaaaattttgtgaaaaatcttataaatgtttgatattatgcattatagaaactttataaacgtttttataatatgctctataaaagttaataaaacaaattctatgattgcattttgtgttacattgaaaattaacaaaaaaaaaaaacagtggtattattaaaaaaaaataaaaatcataaaagtggtatctcaaaaattcttctgaaatatatttagatagaagtaatttcataattaacattatatggaaattctaaatattgattgtttcacttcaattggggtttatagtggatgataggtttcagatacagcaatacaccatcactcactgtatttgatatattgaaatataagtattcaaaaatactgatagcccaatttcagttttttctgttttttttttttaatttcagtttttatgtgtgtaattttataagttagaacataatttcagttttgttctaacttataaaattacacacataaatctaaaccatatagtattataggatgtcaatgtggtctatcatccatgaaataaactgatacaaataattatcttgtatttatgaatcggtatttatcgtataacatagatggtaaaaaaaactaatattcacaaattaaaggaaatcatccttctctgtactgtataagtgtatataaatttttttaatcctcttttgatttttgactattttataaattcaaattatataatcttgtaagaatttttcctgcggcaatgatcccatgcagcgatcctcaactggactttttcaaaatccgaaacccgacaaggaatagtgatccgacccggttgatcaaacccatgaacccgctccgcttgctccaacaattctccaaacaatggatgattaaagtaaatcaccggcaccacaactcgccgcgtgtcatcgtctgattcgccgacatgaaccaccaaatgtcctcgaggaacaacccggttcgactttttcggatccttacccaaccggatctgattctgacccggattcttcttgcttccaccgcacaatctcttagctccacggcttaaacaccgtgctaatgaccggattccggtaaccgggtttgtgattcgggtcgggcatctgtttcttggtatccatttgaaaattttgacaaatctgtgtccaattttgaaccctctgactctcttcatgcttggttttaatcagattccgacaaaaaaaaaaaaagtctttggtgaaaacaatgagatgggtttgtttgaaatcgagtttcaagaaatgggtttgattcgaaagaaatagatttggagaaaattttggtttttgttttttggtatctctctctgtgttttatgttatagagttgaagaagaagactgtttgggtatggggaaagaggttacctcttatatagccttcaaggagctatgactcttatgtgtgcgtgtgctttttaaatgtgtccactttgatggatagttttccaaatacaactttttttttgtattttttgttatattttcgtatcatttatcatcttttcaaaatttagggaactttttttttctattcaaaacatgcgacttaaaattccaaatcttaagtgccaaaaaaaaaaaaaacctcaagatatttaaaatgaaatatattacaagagatatatttacaagacttgtgtaaacattagctatttaattaatttggtcaggggtgttaccataaattatcgcaatgaagaagctagctaagctttgatcatattcagtgggaacggactacttcaacacttaagacctcgaatgttattcgtgaaataccaaaataacaatgttttttctaatcagattattgtgcaacgcagctatgtccagccatactgtcattgtgcaagcttagttaccaaattcatcaatctaccacatcgatcgaataacatgaaatttttttataaagatatgtgtgtaccattattaaaaaaaattccaagtttcttatttaatttaacatgtcattatcattaaaatgcaaccactagttgaatgttcatattatatattgattaagacatatttatgatcgattatgtgagttagtaacatgtttcttgttgtagttaagtatctagatgattcgatttgattttttcataatacactccattataagtttagtatgtcgttccttatgaataatacatcgcatgaaatcactagttattagttcagaatttgttttgctttttctatgataactagtccagatttaataatggttttgataagacaacttggaacaaagcatctataaagaaatattgtatagatagagttcagatatatatagattaaataaatgaatttcacaaatgtttatatggttataaatgaaagtttgaataataaaaattaaataaagcagagaaattgatgaagacaaaaggcatgcaaatgtgtgggagggacatagtgtgggatttggtcggcggtcgacacggctcgtgcaatcttaacatgccctgattcactgaaagtgcttcgttcagtttaagaattattgtgttgcataattattatttatagactacttcagttattattaatattctatttttatgttggaaaatggcttaattcttatttcttaatacttctttgcacgttttttttctatgatctaattcatcataagtacatcaaaattaattagagtttgagtttttttcacttcgattataattatggttgaaatttgcaaatgtgtaaactgataataacatcctattattttacatattataaagattagtttgagtttcgatccagatttctttagttatatatagtttgtaataattattatcattattttgactcaaatgtacttatatcttatctttacaaaagaaagacgataaccaaagtcataacatatgaaacgttcgatgttacatctactactagttaaaagtgaaaaaaagcgaaactataatgcgtagagaataagagagtataatgaatggtcaaggcattaccataaaccacacacgtttcatatacaacatacacttttctagatttttttttacacttttctagatttttcttctcttttcttcatccactatttcaaaacaaaacgatactccaattgacacgatttatatttttcatagaacgaatgaaaacgtgttcaatttatttggagaggaagaaaagggaaaaagaagaaagaaatgtggagactttatagaagggaaggatagaaactaacaatttatgtacttttgtttacctaatattgaaaccatacattcgtcatctcttcctatcttcccatgttgtttaaacgtaaatttcatactctatattagaatcttgttcacacacatatgacgtcgtagaagaatccaatatacaagagcattagattttgtatgaaaattaacaattaatatcttcaactggttgcttaaacaaattttgctagactactaatgttacggtattttatattattttggtattttagtaaacagtttcaatgttacggtaatgatcagtgtaatatattatagttatttataagttggagatacaatcacagtaatgttaaacatataaagacataaaccttgaatggttacagcggcccaagcggacaaactagtttacagatcggatcattttttatttaccatttacaaactatagtccgtaataatacggacctaaaaaaaacgaagcggactaagcgcggaccatatttaaaataagttcacaacggtttgttgtccgccccaaaaatagtatggactggattgctgacggattagtccgcactaactacaacatctatttcaaagccatatatttgtagataattagatgtcaaaaatatgtatgtatatacgattacatcaattataaatgatcatatgctaattgtattctcaatttacctgccaacagagagaataaaaatctttaagaataaatatgcaatcttgtaagccatgatatcccaccagtaatctctaaccaggttaccaaatctaatacatgtgacatgacaactaatattttttaatgtctttaataattaacatgccatgcagttgtatagagttattactcaattaccatttaaaatcatcaaattcacatcacgtaattcactatgactactgtacatgtttcataatgaaataagttagacatatgcagctggtaatggtaaaatatatagcttttgtagaatacaccaagttcttttcttttccaaaagagcaaattgggtaataacgtgacgaatgcgactcgagccaaactcaagtggcaatcaatcctacgattgtagaacataagataaataagaacagctaacaaaagtcaacgtcagatttgttggtggacaagaggacaatgaaaataaataaatgtttggaatcttccaagttctagtaattttgttgttaatccacctatcacggatcatgatgttttgttgctacaatcttttttgtttaatccttttaaaataaaaaattagaataactaaccagcaattactagttaaattgattaatcgaatatttattagttagttattggtctgatattaatggtgtggtcaactctttaagtgtcaatgctaaagagatacaataatgaacaagtattatctttcactagatgagtacccgcactacgtgcggactttcaatttatatttcgtaatttaaaagtatttaaaggtaaaatttaggttaattttttaataggcaagaagacaaaattcctatttgatactaagctccataaatcaacaatttatttttgcattttgcatttagatttctaacaaaatattttttcagtaaacattatttttataattttttttcatttgtgttaaccttaaaccaaaaaaataagacaaaatgctagacgatttgagtccaagaatttgatgctagagttctcaagtacttctcaccatttttaatatcttatatagaaaaaagaacaacctacgaaaactattagctaatccactatacaattatttaattatattttaacttaaaattataaaaattagggaaaaatatctaagagtatgagaaaatcaattaaataatttaatttaagaaaaagacatacaaaataaaagaaaattattatttatacaattaattatttaaaattttataatatatacaattaaataataaatcactataaaccattaacttacactaattattaagtggacatgtggcaaattaaaagctaagtgatgatgtgtcattcatatgaagagagtttgccaattttcatatatatgattacaccacatatagataatatataaacttatgatctttatatatacaatatttataaaattacctacatatttgttattattagttaatttgttattctaaatgaaaactcatgctacgcatgggtttttgtttttaaaattgtcggaatatatgattatggtcttttgttgattttgatgttcatttttgtgtgtgtgttaatgtgtaagtaataaagtcatatctattttatagagttataattttttataattaaatttttctataattcaaaatatcaattttactataatatgaatatttatagacctattattcaaatatttcactatcataaacacatacaacaaaattatatgatatattaatatgtagttatattacttatgtattttgaaacttgcctaacttaattgtaacaaacaattctatattccatatattctctcgttatctagtacactaaccagatcatgatatgctagtaattcaagtcaacactttaattctcttcccttgcatatagccatatagaatctcgttttttttgtgtgggtatatctaatgtgtcggatgaccattacgtgaaaaatgtatatcaatgttaccaagttatcagaaaccacaaaaataaacagaaagaaggtcatatgataaatcatattcatataacgtaataataagaaaatatccaactaaaattactaattaatatgaggttaggtagcaaacatttaaactacgacacaaagtaaattttagccattataaattgataactattgataaaaatattttaaaaaataagtagaataaaatgaaagtagtatttgatatattattataattttttatttattgaatgttttaagaaaatttatttaaaagagagattatagagaatttaacacaacaaaagacttttgattcttcctcaattaattgtattatttttttatttaattaatatagaatgacacatgtcattttcttgtgtgatgatgtgtcattcatagggagagagttggcaactttcatatatatgatttattttttaacgtttaaatttattatttattgtaaattatgagaattattacaaatataattataccacggataatttctttcgatcttgttagatctacgacctacgatacttccttctccatatacgatatacgacactttgacggtttttaattttattttacatatgtggttatgtaaacgaagttttaatgatataatttggacttttcaacaaaaacattttccctaagcccaagttcaaatataaattttttgatgggtaggttcaagtaagtgttatgtatattgtggcccataatatagttttaattctattcaacaatactaggcccatttatatttgtgaatctcgtggtaagatgatgatacgagtatatataatagcagttgtttagacgttttagctctttgtaataatctaaaaatggtacatctctttcattttatttttttcatgaatctctttatgaaaaaaggtttctaaaaccatttacctttgcatttttcaaagtacaacaatattctaactaattcgatagaaccagtttgtcagagattgtaatggtaccatgttttttcttttgtcatttacaaaaaccaccagaaatttctcaattatcacttttatcagagaaaattatattttccttgtccattttcaaatttggcaagaaagaacagagggacaaagatagaaatggaaagcaaaatacagaaaggatccagcctggatttgtcagagagacaaaaagctgaaactcccaaccaaaaaaaaaagataactaattatattccccaccttgggacctcataaatccataatgcatgctttttcccattttcttctgttttcctttcaattttttttttttttttttttgtaatactaaatatatcaactacatttctctcattttatctatataattgatagtgtttactaaataaaaataatgtaatttgtgttaatgttgattaatatttgggttcaacttggttaaaattgtggaattttggtatgagataaaacaataataaccaaagcttaattagaacaaatttaaaacattttaatgaatatttgtttttcttcttctcaaataaacaaatcccgggaaaaagaataaaacaacagattgaatccaaaaagaaacaaaaaaaaaaagacaagtcagagaaatccaacaacccccaaataagaagaactgtggaaacgtaaagaagaagaagaatcatcatctctggtttgatatcaacaaaaccctagaaaatacaacaaaccctcagatttaacaatttcaatgctgaagcatcatcatcatcaccaaagccattaccaccatagaaagactcgtgaatccaatgctcttcgatgccgacgatgaaaccttctgtggcctgaaacaacaacaaacaaaagaatcacaaaccaagaacatactaaagaatgtgcgttcttgaagtttttttgttcctacttttgtagtttgctgagagcaccacagtaaagaacattgtcagggtgtccgaattcggttttgttgttttcgtctggattaaccactctaacgtaagtttcttgtccaagataccacgaatcaagattctctgttcttagattccaagctccaggattgtctaatgatatcaatatcgctgaccatgcccctggatacacctgtgaacatatataaccacccccaaaacatcaatcacattggcctttagaaggcgaaatcatcgattgtttgttcgcatttgcgtttacctgaatagtggaacgcgcgataccatcccatttgttgtatgttcctctactgttctctgtccactctccataatccatactacaagcaatcaaaacgtttcaagaaacagttatttacaatgccaaattaagtggaagagaactaactgtaaaactcacccgacgacaaagaaggcgtagccactcatgtgatagctttgcatcttagtgtcattgttctgaagaacgacttccatgaatccacgataagtaccattgataatcgaagtcgccactttagctggtccagttaaaggtctcttagggaaatcaagcttatacacatctttaactttaagcttatcagctagtctaataggtgttgaaggattcttgaacgatatgccattaagcgttgttcttctcttcccactaatcgtcacaggcggcatgttccttagaacgtagacatcggttacattgatcgaaccgtatttaaatgatccttgcgggttaggacgtgcaccacttgctgatacattccatctgcaataacaaagtatgattcaaaggtcaaaacttgatgaaactacaaggaaaaagaattcgctttttcggataaccaacctgatggatcttgcttgattcatggagaaagttttgtcgaattcgtcttgtggtccagggggtaactgacctttagcttttcctttagagttggtatacttcaagattccaactccagtgactcttctccatatggtttcgttaacaacccgagcactcgcgacaatgtagtaatcagagctcgcgttttgatccattgtaaccaagaaagaataagactgtccaacatgaatatccaagcttgtatagttttgttgaactgtgtatgatccttctgattccgcaagaactaagttgtgaccttgaatcctaaagttcaaactcgtcgagattcccacattcgacactcgaagtctataagtttttcctgttaccatcagaagagaatatagtccattaaaaacctgtaaacaaaccaaaacaaagactcttggattataaagactcaccaggatggactgtgattgtttcgaaatcgatcccatcagcaacaagcgtgtcattgtatcggtaaggtccttttccattaatgagaactccatcaggcattccaagatctttaccatcatccaaagccttcctcaaagcctacattttcacaaaatgttagaaagaaacctctcaaaatgtcaattgcttgaagagaaagcgaagatggctaaaaactactaaccgtgtggttccttatgtaccaatcaccaatggtaacggtaatatcaccgtctggagtagagaaagggactggaataatagctctaggattgacaacaaaggagccaaaaccaccagaagctctctggaaatgtagagatggaaagtagaagaaactaccaatttggtctttaacttgaaactcataagtccaattccactttggtgggattggacaattggttcctaaaactccatcttgccatgacacacgtctctgttggattccattcctataatatcaaaacatattcattagagctttcttctttcttatttcttcttcttcacaacaatgtgaagtctcataaatacacaaactttttgtgtttcttcttaccaatgaagaagaagtccctcgtctaacttgtttctgacattaacaaccagattttcattggttgtaacattgattgtaggaccaggaaactttccatttatagcaatgacctgattaacagaattaacatagaaaattagctttgtttagaaatcgttagaaccataattgtgtgtttagatctatacttcactttttcaacagttggatctggagttaaaaagactgaaactttttctactctaaagacttcaaaaatcattcattcatgtggtaaaaagggataaaactttcaacaaatctagaacaaaaactccttttcacaatgtctatgacaactaaaagaatcgaaattttctagaaattaaacttcgaagtatgccctgaagcagaaaaaaaagattgaaactttagatgaatctgaaatttgagaccaccaacaaacaaagatagaaactttatctttaccattaatagtaacctaaaagttagatctttagctcactgaaaacaacagtaaaatctctagaaattaagggttttacaaaatgtggataatctataagaaaaacccaaactttgattcaatatctcaaatcccaaatagtaaatccaaagaaacagtaaatagaaatctaaagatctagaagaagaagaagaagaagaaacctgttgagggacaccaagaggagaagcagtaatgtaagagacttcgaagttatagaaagaatatggatctgcagcgaagcagaaacttatgttcacgaagaacacaagaagaaggatcttgaacaaatccattttcttttttttctctcgcaaaatcttttgctttgcttttttgttgagaagcaatgttgggttttgattggttgtttttaaacagatttgttgtgaatttacattatcaagattcgggaaaaaggaagtgagaagtgggagaaactagaagctatagaagaaagagaagagagccagagagtgatatagacataagagaacggctacaaaattcttaggttgctccttaattatttattattattactttttgactattattttaccagaaataaagccgcacaatacgcctataaatttgcctaaatatgagaaaaaagaataaataaattttgtgtcaaaaaaaaaaaaagataataaataaatttaagggtataattacatataactttattaggtttaaaattgatgttgcgattagtgtgggctaatccgtcagctgtccagtatatagtatttttaaagcggacaacaaacggctgcagacttaattgacagtcttcaattaggctgcagtgattttcttttatttttttggattctcattattacggacaatagttcataaataataaataaaaagcaatccggttcgtagacggttttgttcgtttggactgctataaccattcaaagctttagtctttgcatgaaatcactaagattatgatcaatgtaaatgtagtctcacattcttctacttgaagctatttacttaattttaaaaaagtagttagttaattaatcaaaagaaatagtaaagcgcatataacctaaatagtatgatttaaatttgctaagacaatcatttatcactttagtatcatatattcgaataacattcttcatacttttctttttaatatattactaattaaaccactggatttatagataccttatccttcattagagagttttaatcttctttttatcgtcggtgaccattaatttattatatttaagcaaaataaatactaagttgacacttgaaaaagaaaagaaaaacaaagccaacggatataatgataatagtactgcatgacagccagaaaagaatggctcccatatggttgacaattttttatatactttttattttccaccgaaatattttctcttatatgctttatttatcaaaatgagctgtaaaatttcctttcataaaccatataatttttcttataaaatattctaacgcgtattttctgattgatgatcaaacatttacgttgattgtggtgaaattattgttatgaaataatgatgcattaaaaaagaagaagattttgatttagtaatttgtcggttagggaagtgcattatgtacgcaataatcacatgctgctcgcgtgctagcttaggtttaaataagtgaattaagtactagtagtaactttatagttacattattgtgttaatatttgattcttacgacaagttttaaattaagatttgatatctgaccgtttgaccaaaggcatctgataaagagataagatttattgcgcaacgcaacggtgggctactctagaaatgccacgtggtttatgccagccaaaacgaaagagattcttcttattttgacgtttgttttttcttacaaaatacaaaattgtacgttttgttctgcttcttttacatataaaactttgttcttaaaatatgatgttgttgacagatgaaaattataatatttcaggctctgttcaaaagaaaatataaaagacttgataatcaatgacgagatcatgaattgagctttacgaaacatttgtataggattcaatattttccataataaaaaaattcagtcagtaaatatactttaaaaaaatatgttctgaaagagatattgaataggatatataggaaattaggaaaaataatcatttaacatagagtaattcactaagcagttgtaataataaacgtaccaactattcgaacatgtgtaaagtaattaccaacagctaacttttgctaacattgtgtgtggagtagttgaattaatcatcccaacgaatttagttatttttaatataaataaatcctctgtcctctcaattatgtaattaaattttagcaacggctagttcattttgttgtttgtgcagattctttcaccgatccaagaattattttggacgtatcttcagttttacgataagcatacatttctaagtttactgatcaaaaagttatgtaaatttgctcaagtaaaaaacagtaaattaaaccatgaacattgaaatagagaacacatttttaacctaaagagaacattgaaatatttcactccatttattgttgtctaaatcttttctatcggcaaagtgtgatatagattatgcatacacgtataatggaccaagttgacaagtggggtggacacacgtggtccagtatgattcatggttttatctttaatcatgcatgtatcagaatgaattgctgaaaatgatccaaaataaagacatgtctttaacacaaacccaatatctttccttattcgtttaggtccagtccattgcagcagctttgttctggtttggagaattgggccgggtcagggtccactaagtgaaatagtggttgcaacaaataacttctctgatggaaacaagttaggagaaggtggctttggttccgtgtacaaggtataaagcaaatataacaattgacctcgtaaataagatcagaagttgactgatactagaaaacttttgttttacttttactcaatctatgatttttaaggtcttattcaatctaggagtttatccatgttggtcaaatatagtaaatgatctttttttttttggtcaacaatataggaatgatctagtcctcacttttaatacggtattgtcataatgactaattccacaatttctcaaagtttcaccttaaattatactaaaaatatttctgattgattttgaccggaggaaaagctaaaaaatgggatggatgttgccatcaaaagactatcaccaaactcaagagacaaggtctattgtaggcttttaggattatgctttgagggaggggatatgctccttgtttatgaattcatgtcgaacaagagcttcgatttttttttgcttgttttttttttttttttttttgtcaaacttttgcttggtaagttataagatataagaaattgtttaatgagtctctgtgactttctaacatttttttctttagatatatatatttttttgtggccgtagattctgttaagtgtaaggaatcgaacttgacaaaaacgtacggctacagtacataagacggcacgagggctgcaatatcgttttttttttttccttttttttagtaaaaggtaacttagttattataattttgacaaaaaaaagtattcagcgaaaggtatcttagtaaataaaatcagccaaagataaaactgtaatgaaagaagtaataatgattttgatgtcaattcaacacaatgatgttatccgctacatctatctccacatcatgatctgttgcggcgcttagcctagtgtttatttccttactgataggtttcagaggcctaaagttcttcctcggcattcgaatcagcggttgaatatctaaatatgtctataatgacttcttattaacactctgatcgtatggttgaatatctaaatatgtctataataactctactttgcttgttgtcaacagcagcttcagaaatttcttctgaagtgatgggatcattcttaggcagtctatcaagcatttctttgtctgcatcaacaaagctcgttccctttgtttcagcttatacttgttcagcacgtatcttttctgcgtactcatactttatcgcatcttccatcttcttaacccgtttttccacatgatcacgaattcttttatgagcagactcagtatcagaagggaaatggatattcaggtctttgcaggcaacctcttggaaaagtattattagaataggaatgcatatattcctttctgtattttaggaatcttctcattaagcctctaacggctactttgtatattgctatgtatttaaaccctttgtgaatatgtcaaggaactcatcaattgagattatacctattctaatatggtatcagagactcttctctaaactctagcagtcatcttttcctcatcttttcagtcttcttcttcgtgttctctctctctcttttgctcttcgcttcacttttctctctgtatctctagctcttctctccaatttttttttctttgtctctcttgatctgcacttaattcatggcgacagttcctccaccaaccgctactactcctgctgcgagtctcactcagatccgtgctcacatccccatcactctcaacatggagaagatgaactacgattcatggcgcatcctcttcgaaactcattgccttagtttctctctcaccgggcatatcgatggcacctcccttcccatcggaccaaccgacgcaacatggaagcaacttgacaatacggttaagatgtggatctacggtaccatttcagaatcgctcctcaactctgtcttaaaatcgcagtgctctgcacgcgaactttggctcatgctcgagaatttattcctcgacaacaaagaagcccgtgcaatacaactgaaaaatgaactccgaaatctctggattggcgatcaatccgttcatgactattgtcaaaaactgaagtcactctctgatacgctcgccaatgtggattcccctgtctcagatcgcgccttagtgatgcaccttctcaatggacttagctccaaatttgataacatcattaatgttattaaacatcgttccccaccttgctcttttggcgatgccagatcgatgctcattgaagaagaatcgaggcttaaaaccaagctgcaatctcttcctaacaatgatgacaacgcttcttcaccacatgttcttcttgcctcttctcaacaacaagactatcgctcagtcctcacaaaccaacaattccagtacggtcgtggcggaggacgaaacaatcgaaacaatcgcggaggaggtcgaggaaacagaggtcgtggtggtggcggcaaccctaactacaacggcggtaattggagctctggaaatcaaacatcaacttggcccaaccaacctcaatggccaagttatccacaatggcccaatatgccaatttggcccactacaccacctcctccacaattctatgggcaaccaagatttcacattggctctcaaccaccaacgctgccacaacgcgcacaagggattctcggtcacgcacctccatcaaacgggtctgccttcctcacctcggcccaaccaatcacctctccagcaaacacagacataattcccactacgctcgcaaatgcattcaacacgatgactttctcggatcctaatgatgttggatggtacatggactccgcagctacagctcacctcatggctcagccaggtacactctcttccatcacctcatcctctaattcttctcttcctctcgtcactgtcggtaacggttccacaattcctgtcacttcttatggtcaaacaacaattccatctagttctcgtccccttcacctcaataatgttcttatttgtcctcaaattctaaaaaatctaatttttgttcgtcaatttaccactaataatctctgctctgttgaatttgatccgtttggttttcttgttaaggatcttcgtacccgagcacctctaatctgatgtgatagccaaggccctttgtactcttcgtcttcaacgatggccacccatctcccatagccatgcttggaaacagcaagaatcagcatcctatcatgttcttccttagaaaatgcttcacttctcaaattgtactttctgataaagtagtcagagaaaacaggtttggtcggattgttgtccaaaaattgacacttctcctttactagcatcataaaagtcatgctcactagtagctcgtcacttcttatcccttctttgggaactccatctttaaaagttttaggattatcgttagggttttcggcaatgtgtttcaaaagtaatattccatacttatttatctcgtcataggtcttcatgtataagggattaacaaactccttccaatcaaagtttccagttccatacctcttaaacgtacgtaaaaagatattcctttcagtcccgctaaatcccagcaccatgagaagagggttgcaatatctccatgagattcaaatccaataggatgttgtacatttatgtccatcaaataagcaaaacaaaaaatatgtttaagcaaaattatttttttttggagcaaattgacttatacgataatttttcttaaatctatcacaaataaattaagtatttgaaatggcacaatttgacatagatggagacgaatttcccattgatttggtttattctacaattagaagaaataaaatgagaaaaaaaaaaatattgtcgaaactaaaagaaagtaaaaaacgaaaaaaaagaaaaaaaacagagctttcattgtcttacaaatgttttaaaatatttttaaaaaaatttcaaagttaaaaaattgttatgaataaagatggatgcccattataaggcccatcatctaagcccatcatctagatgtttctagggttttaccctttccttgtactcctatataaagaactctttatctcaatggaagaacacactcatttcctctatctctttctctgtttataacacgttatcagcacgctctaaaaggtagatatagagattcttacatttttttaagaactatgtttacttatcgactcatggttcatagtatttattttctattattgaaacaaaacaatatgagccgatcgatgattatagtatagatcggtaaaagcatgttttcaatgattcaataaagaagagaatcatgcttatcatttgtttctataattactatcgcatgattcaatgattctacaaagaaaatcgttaaagaagagaatcatgcttgttaattgttaatttttgtgatttactattacaataatgaatatataaattaccaattttataattatataactaattttgtaactattcatagcccggtggtgggtgatgcaaacatgtattaatgttttagcattccagttttgaatagttgcatctatattcaatatcattttataaatattatattgtctaaaatccatttatgattgatatgatatcccttatttaactcttttgattaaaacgttatacatatcttatcacttttagatattgacttttccatattaaatatttgatttccatatatttgattgtgttattattatttttactaaaaacgttgcaagataatttttctttttataagattccatatatctaaatctttgtgttattattatctaaatctttttataagatttccatatatttgattatgttattattatttttactaaaaacgttgcaagataatttttcttttcataagattcttttctctaaatctttgtggtatctaaaaaaaaaaaaaaaaaaaaaaaaaaaaaaaaaattgttcatggttttgccctaattttgcacgaaatcattttacccaaaatcttgcacgaattcatattagcctaaataaaagttttgtcaagatatatgtaaaatccagattttgcacaaaatagttttattctgattggttttacaatattgcattaaaattgtattagtatatcatacttgattattttatgaaataaattgattgataaataacttaatttaaaggtataatcacttataaaaattttcatgaatgactagtttaatgtatcttaagaagatatcatatttttgatggtcaaagttttttcaagaacttaaattatcaccagaagttgagaaaataaatatggtaaaaaaaaaaaaaagtaagaaaactttctaacgatgaaataatctagtatatcaaatagtataaaatcttattaaaagactctagaagagcatatacattgctttctatgggaatacatcgatgcggtataattctccaaatcttaaagttaatatgatgagagataaaatacattatgattctagagtggaattaaaaacgagatggatgaacttgaagtttcatcatttcgaggaggagaagtaatgaatctcacatggataataagtgacatatccagaagattatgttcaatctttgactactaaagatctaaaagttgtataaagcaattcttatacgaatgtggtattagataaaataagttataattaggtattactgaaacttcaagacttgaagtctctttgtgaatataactcacattgttaagagaatatctatgatgcagagatggtaaaacagacgcttaaacttttacgcaagtattgttgtcctgtagacacaatattttgaaagaaattttggaactattataaacttaaatcgagtgtttttcaaaggctaagaaaacatatgagttatcgatgataagtaatactcatatactgaagtgaatataagatcttacatagttagtcaaatttaatatcgtttatactagaatataaaaatttaattattatctcgttattgttttattaacatatgattgattattaaaataaatggaagtaattttgattataagatctcattaagggagtaactgataagcaatgaaaagtaaattaaaagttttgaaagaactagaagtttcaaaagaattaaaagtttcaagagtatatttggcttaaccggattggtcatcctggtttaatgatgatgtgaaagtattgagaattatgtagacattaggtgaaaaaccagaagattctccctaatgatttatcaaatgttacttgctcagaaagcaatatgataatgtgatttttaccagtgtaagtaatttggactttatctattcgtaagtatatacaaggagatgattatgggttgatcacccactatatgacatttagatacctaatggttataaaagatgcatcgattcaatggacgcattgactcgattgttgcatcgacaagaaggtcatatttatccttgttataaacccgcaacatagagtttgcgagattactttcttgattaaagtacaagagtatttcagtgtttatttataataaccattattagatatccgttgggataagtgtttaacattttgaaattcatgttcatacacaaaatggtttagtaacatcgatacgcatcaagccaatgaataattaatacttttccccattattattggttttgggtcagaaaccaaatagttttcatctaaaagctttgaatgtgaaaagtgctccatcacagcacgcagagatgaaccctcaaaggaggataagaatacatgttggatatgaatgataaccaagccatcctagaagtatttatataccgctcgttttgaagactatcatattatatagtcagctattccaacataagggggagaatgtatacagctggtgaaaaagataaatagaaatgaattatcaatgatcctcggagtaaagaatgtatattaagagtccaaaagctaattcaattacagaatttagcgttgtaattgccagacgcatttgctgacccaaataaagtgatgaagtcacttataccagttgtaaatttaaatgctccagaatataatgaatgtcctgtaaggagcaatttcaaactgctattgagtcttaagatcgcatgaagcgtaatagaccttggttccaaatataaatatcctcgtaaaagtgaaggagcacaaaattaaaaatgaccaaattgaggaaataaatattttgatgatctcttgaagagagtgaataatctctaaaagagacataaacatgacaaatgaaacattcaagtacttgacaatgaagagatctagctagctatgtcatgtcaaaatataatggaatcaaaagcaaatcgacgtcgtaatatatttgcatgctatgagcagttgatattatagacaaaagaaggatcatgaaagaaagtctattgaaaagtgtatacaaagtaatgattagccaaaaatggaaaagaagaaatagacatataattataatctctagtagagatatttggactagtagtctatgcacatgatgtgtaaaaccagtggaaaataaatgagtctttatgtgaaagaatagtgaaattaatgagattttcacaaagataagaaatgtattatgaagaaatatattctcttgtggtggatgtaatatttttttaagtatctaaagtctggcaataagagacggaacactggatatgacatttatatgaaattcttgaaagatataatctctgaaggattaattatatgagaattatgttctctagaactctactcgatcgaataaaaagaaatatgtaacatgacatataatcatataaatgtatatttacgttgagtttgtcaaaatgtattgatcaaactaatatttgttttgaaaatcattaaaactcctacagagttatcataagtaatacgatgacaataatctatgataaaatatcactagataatgatatttataagtctatatgaaaaccatataattttgatcattaagattatggttattaattccaacgagatattgtatttgattgaaaatcatctcctgaagaagatgtttccgagggggagattgaatgatatgcgtggatgtaccctttttccttatcatagtttttatcccacatgatttttctatgacaaggtttttaacgagacattaaagaacacgcaaataatacacttgatgaatattaagaaattatatcaatcatccaaataaatattatacactaatgatatttagagaaataaataagatgatcaagatgaatcatctacaagattcatgagcagaacaatggcgttgtactttatccagaaatttgttcaagagaagatttggcagacttattctcaaatactgtttattctctgccacatcttctaatcatgcagagattttactaattcatgaagctagccgcgagtgtgtatggctaagatccatagttcaccatatacaagaagactgtggtatgtatgcagggaaaaagactccaacaattatgtacgaagacaatgcagcatgcatcgtacaactcaaagacggatacatcaaaggcgatagaacaaagcacatcctaccaaaattcttctacacacacgatctacaaaagagcggcgatgtacgagttctacagatccgttcgaatgataatctggctgacttattcaccaaggcgctacctactgctactttcaagaagttagtctatcgtatcggattacgccgtctcaaagatctcgacgaatatactcataaaggggagtaattgtatgttgcactctttttcccttaaccatggtttttcccattgggttttcctggtaaggtttttaatgagacagcatttcaaatactttacgagttatggtactataatggtcatcagggggagtgttatgaataaagatggatgcccattataaggccaatcatctaagcccatcatctagatgtttttagggttttaccctttccttgtactcctatataaagaactctttatctcaatggaagaacacactcatttcctctatctctttctctgtttataacaaaaatgatttactaatgtttttaaggactttaaaagagttttaaaataattttgaaaggatttacaaaagtttttaaaatccttgtaaatcctttaaaaactctttaacaactcttgtaaattattttaaaacctttttacaatggtttttaaagaggtttacatatgtatttaaagactttataaggattttaaggagttctaaaatgatttacaagtgtttttaacaactttacaaagcttttaaaatgctttaaaaattttacaagaattttttaaaagtttttataaagaattacaagaatttttaaagagttctaaaaaaatttacatggttttttaaatgcaaatcttggcggaaaatactttttggtgtggaaaattgttttgggtaaaaataaaattttggcggaatatttcggtttctacttatatgttttcattggataatggataatttgatcattttgtctaacaaaattgataattgtaaaaatatctagtgttgcaaatgggcagtaaaaaaagagtaattttacaaattcccttctatttttctggattttaagataaatcagttctaataaaaattaaattttgacaaaacacaaataattggagcttatatcaatttccatattgctttctttatactgttctagattaaacatctttaataacagttgagctccaaggaaaaagtcttttggcaaaactatgcaatacgttaacattccttttacatgtaactttaataacttaacttccaccagataaatggaaaatcataaattaagctgtgactaaaactgggtagagatgaaaaaagattaaagaaacaaaaaaaagtgtaaataagcatttaatcataaaattccactatattattcaaaaaccagtagaattcttctccaactttgcccatttcaccaaagtctttagaaacttcttcacctgcaaaaccacaatttaatacaaataaaacatacacaaaacatacttcaaaaaattgttaatggtttaatgttattattacctcggatggatctctaagggagtaaaacgcattgctttctttcggtatagacgatactaggatgccgaaacctcggttcccatctctcagtacctgtaagattcatcgtgttgtttcgattaggcaaatcacaatcaagaagtaaccaatcactaaatgtaagtaacttgaaacattagttatatatataccttgaacgcatcttcatcggttgtgtcatcaccaatgtagataggaagcaaatcgtctttattgcttaatcctaaacaagatttgatcaaattacgactaatcatcggtctagaacaagaaactacgaaatgaaattataacaatgtatatatataccgagagattctaatagaaactcgaccgctcttcctttgttccagtctatcacaggacgaacctctaaaacctttaacacaaaaaatgataatcaagaaattaagaccgatgattaaacgtaagctaagtatctcttaagctaatcacaaaccttcctcccatgagttagacgcaaacgagggtattgtttcaagtggtcatgaacacgctgagcaataataggccaatcctaaagaaacataaacatttttgtatcaaaatttatcaaagtacaaagcaaaattcaataggtctttttgtttttgttaccttttcgtcaacgttacggtaatgtacagatgcacagaacttgtggttctctacttttgcacctttgatatctttcattttctcaacaagggttctaaaaacctcgtcgataaccggtatgaattctctcgcgggctgaaacagattcacttccttaccctaataaagatacaaaagtgttaatagatcatcatttagcaaaaaaacacggttatagatcatgatttttaacctgttggtcagtggatttgaaacaattcggaccatcagaagaagtcattatgtccattccatgactacccgcgtaataaagttctgttagtcctaccaactgataaacctgccatataacaaaaaaaaactctatgagtactcaactttacaatcacttgattacaacggtttaggactttaccttgtcacggcttctaccgctaattattgcggttgggaagtaactcgcgacatctttaaccgcagaacgcatctgaaagatcaaaagaaaaaacaatctttttagcatcatactataagccacacaaaaaacagaacagagtaaggtaatagacaaaaggtttgcgtttattactgcatcagacatgatggcacgatcaggatcatcaactattggagaaagagtaccatcataatctagaaatacagcaatctttttcttctttgcttgagctgcaatatgcgcaaacgagctaatcgccgaaggatatttcacctgtttttcacaattccaaacaatatatttgttgaaattaagaaacacatattaggatcaaatttagcgtttattacaattaccatccaagcacgttgagcaaaatcatcttcaggagcaacttcaacattaaaatctttgacaagcttcttacgcggtggagaagatgaaatcattgcatctaaccaaccattggatctaacatcatcgagtttcgcaggtttcttccattgactcatcataaatctactagacacgccgagtcttgattggttaactgatggtgaaggatctttaagaacagaggatttgtggtttgagtttaaatccattaatcaaaactctaaacaatgcttcaataaactctaaaaccaatgcttcaatgcaagaacttctgttttttgctttctttatcttcaataacactctatccaactcgtttatctatgaaaaaccatctcttcattgttttcttgtcactgcttgttggtgaaagctccatcaaacaaaactgattaccagtaaaaaaaaaaaacacaattcagttaagaaaaaaatataagattatattttacttttaggaatattttgtttcttgactaagtaccttatcatcatatcaaattgttcatcgtaaactttcagattcaattagaaattcacctgcacacaacaaatcaacaaagtcacttataatgtaaatttaaaaaaaattaaatgctttatttggaaattaataaataaattaacttctataagatttccaaaactttcatgctttttaaacacaaaagtagtggaaaaataaataatgttttctgttctttaacgagtcgacacaaatgaaatttcatttttctaagcgaaagtaagttttatatgttgacaaattctcctgtttaaatttgtcgtaaccttcaatatgttactttcagttttaccctatgtgttgataaaggaaaaaaagaaagacaagtgatcgtgacaagtaccggaaatttcaacatcttttaaccaaaattttatatggtaggtcaaatatttaaaaagagcaccgacaaacttctaaaacatcactagaaaatttgacaaatcacacgtatatcttaacaataaagtacaaaacttaaataaacatgccaaatcagtcttcaatttttgtaacactaatatgtgaaaaaacttacgaattaagttaaacaaaaactcgtctatacagttatatttttattagaatgaaacaaaaaaaaactggaattttaggtgtaaggacaaaattgcgtgcgttttaatttccaaatgacgataattttcaaaactgtgaaaatgtttgtttttgcagcagaatataatattgtaacgtacgaggaaacaaaacggaactaaaaatacagagaacgagaaaatattcaatgttaaattagaagaagaaaaaactgaactagatccaaaaattctcagaaatgaattatttataaagtttaagcaaaaacgttgaaattcattaattcaaacctgattcaaaagagctccagaaggaaggaaaaaaaatcttcggaaagatgaagttttttgtttcctttgatagaagaaattgaatctcagagatcgcagaagaaaccaaatccaaaaatgagatttgagggtttttttttgattaaaattgaaaaccctaataaaaagagagagtcgagaatgtaggaggaagagaagaaaggggagaagaaaattgcggagggtttttcgtatttatagactctctttttcttttagagactttgagataaattagagacagagacgtggtttagaagaaccatccatgttgggtttatttaccaaaatttaccatcattttaaaatgatagaccaatcaataacacgttatgagtttgtcatttagtcatacgcgattttcagagatttcgaaaaacgatttttggttcgattacaaattatggcggtttgtttatttcacttttagtaaggtcggtcaaatatttttattataaagatctttttgttgtatacaagaaatattttataagagatgaaattaattaagttattcgttatgccagaatatataaattcacaaacgttttgcattatgtgacaaagatacgtttgcaattatttgtcttgctttaaactctagaacaaacatagatatttgtattttcttaattatttctttcaagtgagttattggtatggcgtggaatcttgatgtaacctatgtttgaacataaactgtataaaacctgtgtgcctttgaagttaattcacgtaatcaaattactactatttctttctcaatttggaccacgtaagttctcgagaatccatttattaaatacaccacatttatttttccgaactttgttatggcaaaagctttttttgtttttttttacataagatagtttttaagtattatagtatttgtaagcagtcaataattaaattttaagttatggtatatatatttttgaaatgaaaaagatttttttttttccttaattagatgtgagaagtgttaatggtattacaacggtaggacgttggttgttaaataagctggttcgttaacatacacgtggcaatgagtcaaaagagactaaaagctcgtagacgacacgtgttgaagtgtaatgttgacgcgtccacgtgttatttgggccttagatgggcccttcttgctaaaaaaggcaacaaaagatctgtcttctcttttttgtctttctctttcgcattatcttcactttacaaccttcgcgatatagttcattatcatctaatttaatatctttttcactattatcatttttttttttataatatagtaatttaattggaaattcgaactgaatctaataaattgaaattttgagggtagtcactggtcagtggtcacaatgtcacatggtaaagaattgtgtatagtgagcttttgggccgcgggggtcttgtgtgtgtagagaaaaggtcacttcacgtggatcatggaagggtttaaagtgtaaatatcggttaaatcacaagtttttctagttgggaattgacattaaagttaacggtcataaacggtgttagttaaaaaaagtgttagaaaatcatgtttgcttcacaaaaattatcgaaacccacaagtttttgatctagattttgctttcttgtaaaaagcggtatttcttataaaccgttaaaatttgtcacgtgcatcattgaatctgtactttatgatgagtcacgaagacataagtctcagatctgactaagaatcttttttcgagtttccctgaaatgtatccattgaaactgtctactcatttttttttcgtgtccactatacaaatttttctctatcgtgtgctttcaaacattcgttaatatgtatttttgcttatatagagacaatatacatattttttttgtataaaatgatattagtactattcctaactaaagaataaacaataatgtcaagaattgcatcattatgtagtattttactatgtaataatgcaacaattgtttgaaccatgcatgatttgacacttgttataattccattcaaagaagcaaaattaaacaatctccggaagttgaaaatgtgtggtgttaattaaactaaatatacaatgaatctatgttttttattgtgttttgtatgattttaaatcgtacggataataaagtaatgtataacgaattatataccacaagaaagacggtgcctaccaaactcattagtgattatattattggtgggttttagattaattaatatttaatagtcttattaaaaaacatttgtttctattgaatacgagtatacgacacacgaggcaagaaaactatgtatctaaaatgtaatgttaattttctgtaacacgattttaatataaactttgacatcgcttttttcgttgtgatatggtatagatttattaatgtttgtaattgtgatacattaaaagaaagtcaaatcataactattcatatttcatagtaatacaaacacatttggttgatgaaaggcattagtacaggtggcctattaaaactcaatcgccggttaagagtagacattttaaccgatccaaacaaatatcgaaccgtattttaaaatagaagacatgtaaaatataagacagaatcaaaccaattctttaacaaaatcaactgaaccaaacataaaccagaccgaactaaaatggctttgatttgggtttaataatagtcccatccaccacttaaacgaactaaccaaacaaaaaacaaaaccaaacgaaaactgaacagaaaggattcaggatttcaaattaatttttactaggatcgtattaaccaaaccgattaaacaaacatcttaaccatttatctacagtacttaccattattttattgtatcaaattcaacttctatataatatgtaaaatataatacacagctaaattgaactcgaacttgtcaaagctaaactccaaaccgatcgaaacggaacgaacttagataacttcggctagagttcattgagttatactaaaactgaaaactaacagaacaaaatttgccaccaatatttaaaatcaaggcttaaaagagagccatatattttggtttagttggttgaagcatcaaaatatttttatctaggaattttttttgagttgtaatctagtgaaatttaagagcaatgatgtaagtttttacccattcattttttttaatagcgacgaaacttctataaataattttcatctaatcaataaaatataatgattagtgttatttctgtcaaaatatcactagtggttgaaagctacgtggttgcgggttacatgcagtgaaatttgttgtaaacaaaacttcgacaccaatgacattgttctaatacatcaacatgattctttgccgtctacttcgacacctacttctattctatattagctagacatcttactttatattgttaacctgggtagaaatttaaaaaatgatttgtttaaaacaactaaattaatacatttggtgtgacgtgcatccgaattgcatgtctaatatcatatggaattagtgtcaataacaaataaaacaatgaagtttactgaaatgataacgtgatttgtttaaacagtcataatgtataacgtgatataggtagtacatgtatgtagactgggtcatgttatgtgattcttctcggctcgataatcaaggaggaatcttataacatgatccagtctacatacatgatctaaccgttgtttcttttgcttacagtcttctccatgagtccatgttgatttcaaaactttcgtttttgatgctcacaatattttcacaaaaaaacacgagggttaggttattctcagcccatgggcctgatattgttgtttttggtcacatcagtcatactttagacagtccaaatgttttcttcacatgatatgtattttgtttctctctttttaaaagtcaatctcaccgccaccggtatgaattattttagaaattgaaatgctaaacttttattatatgcgtaagtccaaacatgtatatgtgtatatatatgcacatctattagaataattaaatatccatattaaatttaatttatgcaaaaattaaaataagtaataatttatgcattttactatttaacgtgtatgtatattttacacatacatatgcatattaataaattatttatttaataccatatttatttcgaattatatgacatgttttagtacatttctcattgaaccatggaatattctatactttgtcccattggtttgttaaacaaaaaattatttattttcaataaaccgtggaaattccggatttttgacccaatatctttttttttttattctgaagtcaaccgttgataatatataataccagacataaatcatttcaacccaaagatagagttgaactagtgaccttgagtgttcgctctcaaatccactagatcaccatctacatggtaataagaaggggattaatatttgtctatttaggaaaaagaaacttcgatattaatttgatgatcaatttagtttgatgacttcttctcttgtcctagaattgttcatttgagtatttatcgtagttggttgcagattcagattttatcatgcaaaaaactataacaaagggtgtctttagaatcatatataacgagatcgttactaggtacataaattctaagatatgtgttacaatttcattcaaaccataacatatgagggatgacatgttggcttttcttaacatcataataatgataaataaataaaagcgtcaaatttgagaaacctaacccatttctgaccgtgtaagtcaatagacaatttcttatgaataaaatgagaaattatattttggatgtataatggtttggtgatcaatttgctttgctgtgatttgattaggttctgccagataaaacaaaagagtatgtatgctttgagatttgattcaaaatctgtcgtcgggtcagtccattaatcgatggtaaaaggaccaaaccgtcaggctatttgagttcattacaaattactaaatgagatacaagtctattcattattttacctattcactaacgcttttcaacgaattggtccagcttcaacgcatgagactgttctaaatcgctataattcaaaagctttttttgctcgaattggcaagcatgaaaggtgatgggtggcagaattttttttgtaacaaatgcttttttatatgttttttttaaaaacaaaatatatttctaaaacctttaaaaccagtaaagccttacgtgtcataaaatctttaaaatacccatgtccccaagaattcacaactctcatgtatctttgtcgcatgtgatgatatgacttgtgacacaatatatgatcaagacatttatttatgaattttttattaaaaaaaatcagaatttatataataatgatttgatagacaatattagagaaaaacaaaattatgaccaatacatgtagtatatattgcaaaaaaaaaaacacaaaatgaaataaaataaaaagaatgagagcattttcaacctatcttcattttcatctccaaaatagagtttggagttagatttgctccgaccatttccattttcaattacaaagtggaaatcactcttttttttctccatatttggagacaatttcattttagagatctccatttttaactctagagtaagattggagcaaaatcctattttgaagaaaaactagagatataggttggagatggtctgaagagtgatcaaacaagaattgtataatggagaattttgccaatcacaattcaaaaggtggttgcctttaggattttatattccaaagactgtctcaaacattaaataagctaataagagatatcactttccatttcacttttctctttttttttctttttttagttgaagtatattatttttgcaatattcaatttgttaaaaaagataaaggtttcaaaagaaatatatcacaatagatttgccactctataatatctcacgttccattgtggatttaatatatacattatatggaatttattttagtttcaaagttagtaaaaaattacttttaaagaaattacattggggaaccaaaagaaaaagtgaactttatactatatacatatgcaatgtggaatataaaattttatatgggcttacctttgaatcatggcaaattattataattgcgcaaactaattttcgagattttgttctgattttccgtttgacaatatgaaaaatgaattttaaaaccaaaataatcaagaattttatagccacaatgtaaatggttcagactgttgttaaaattcctaacaaatattttgttagacaaaaacaattcttaacatatacattatcttacaaagaaactgatttattttactatagaatgttatgttttaatttgttttgaataaagagtgcatgctaagaaaactaaaatgttgctcaaaactaaatataaaccggtcagctacatttatctccatctacaagttggatattttgaatatttcccattcaaacaaaacatattcactagagaaatctctaccacaagtttattttatactcttaacctagacactatatatcatgattttttttgccggcattggatatgcattaataaattttaaaaggatattgtgccagaaaaataaaataaaataaattaaacggagagtcaacttcctcataatgtagaagatatgatgatgaattagaccatttgtcttttaatgcacatagaaggggtgacaatctgtttacatttttttctaggttttagaactttttacccctttgatatgttttttcttcttcttttgttaaagacagttaagacttaaaagcagttgcttgaacctaacaggtgaaacatatgttttttttttctttcacttacatcattattagagatggcagacgggtaagcccgcgaccaaacagatcgcccgcgatgtgcccgcttttcttctgatccgtgacggaccagcccgtggatattccactgtttcggttatatttttgacatcactgcacacatggtgagatattgtgtgcgaaagactcttagacgaatgaaagaattcaacttttcccatgaacttattcgagctactcacatgtgtgtgacatatagtttttgatagttacaaattgttaggtcgttagacttggtaattctacttggttagttatgttttcctttcaaaataattcagagttcctattcttcatctctacaaaaattcagctgtcgagagtgaagaatcaactttaattcaacgactgtttcggtaagatattcgtttttgaatcaacatattgttagaatcaacctagagaagaatcaacatacagtaatttttattttcttaaaaaatattttttagttgaggtagtggtatggggtaaatattttgagaattaaacaaataaaaagaagtattaaatagttttttaaaacacaaaaataggtttaagaaatttggaaaaaaaataaaatatatcacaaaattgttctctttataagtaactcgtaacgatgccttctctttcattctctgcattaactaactccactctttaacaggaagagaccagaggaattccaaatttctattagattcacttaactttcaaatatttcctttttgggttcttcgagtttgttgaaaatgtctgagaacgaagtcaaggatcctcgtatcgatggtatcaaaactaagatccgtgtcgttccagattttcccaagaaaggtagatttctttctttctttttctttatgttcttacttaaaaataaaaaataaaaacaaaaacaaagattggtctctccctctgtttttggttgctgagaaaattgtaacattgttgtcaccacggttaaatttttcttacacgggttgggaacttatggatacaatgcaagtgctattttcttgatgaaacatattttcatattaagcatagtaatgtgagaattgcaggtataatgttccaagacataacaacactgctgctagatcctaaagcctttaaagacaccattgatctgtttgttgagaggtatcgagacatgaacatctcggtggttgcaggtactcctatttttctagatattaaaataaacaaagcgaaaacaaaagttattcatcatcttttaatttcattttaataataaattatatatttaaacctcatgtgggcagacagatatatttaactatgttgatgcatttaatttaataagatatgaagaaaatttggcgaagttgattaatattgtttggaatcatgattttataaatttacactattgtcatagtggtatgaatgttgccacaagtgtatcaaattccaggttttactttttctaaatttgaattaaaccttcaccaaaacgagattaaaactttaacaagaaagatcaaaacgactgaaggcgaatattttgaataataatgatttttcttcttggaatttacgagactaaaattcagttcgacagtaccaaatgaaaatcaatttcaacttgattgttgcatttcataaactgaaacataaaccaaagagaaatctgattagacattcctaagtggtggaatcttggttggataaatgggtggttgattacttgatttatagatgccacctttttaaaagggtcggcccctaaataaagttttgtttataccttatatatctatttttcttctcatcattgttattcagcggctctctttatttctatgttgggtgatgttacgtagttattttccttttactattttattcaacgacttttacacgtttaggttatttagacctaagctctagtccaagtcgaatgactggacttggaacttggaagcatcttaataccatataaataagttggttcatcacattattaattagtgtttatttattcattattatttattagtgtttattttgttttctatgtagtaagattcctaatataaacgatataaatagttgacgtaaaagataaagaataataggtttaagggacattgccaataaaaacagtattatgatttattgtttagcaacataaaggatattagatttaagggacattggaactaaaccactaacatttgtagtcatatatgtttctatagtttctaatatacgcatggccgtttcatactatttgaagactgtgtatttttgttgttttaatcaaacacatatttgatatattttaaccatggactaacagtaatttttttttatgaaaaacaatgctatattcggaccatattttcatgtgtaaagaattttgatgtcattgtaactgtcgatgtttataacgatcgatcatataagaaattttaccgcatacacacaaaaaggtagtttcaagggactgagatattaagaaatttcattttattttatttttgataaaagaattgcatatatttcaagtataaatccatgtaaacttggtcctttgtatcatcgtaagttggcatgtgctcttgaacccgtctcttgcgtatgttacaaggacaaaaaaagagagcctcgtttgtatttcttttttcttttgttaaagtcaatactttccacttaaagtcgagcctttacaaaaatgttttcaaggaatcttttaacagtcggggaattagagttctcatgtctttttcatattgatttaattgctaatatatatatatatatacacgactgatttttttgttttccttacgttttgcttgtttataggtatagaggctcgcggtttcatattcggttcacccatcgcattagccatcggagcaaaatttgttcctcttcgtaaaccaaagaaattgccgggttaaacaccattccaaacttttatatttaacatatgctttgttattttattattcttatatgtcaagcgatattttgagtaacaatagtgttacctatcgtttaacaaatcaagtatggggtttaattatcaaaaaaagtatggggtttaactatacgatttttaatcaggccaaataatatttgaagagtatgagttggagtacggaagtgaccggttggaaatgcatgttgaagctgtagattccggtgatagagcattggtcgtagatgatctgattgctaccggcgggactctttgtgctgccatgaatttgctcagtaaatttttctcatttttcaacaatatatctttagtaccaaaattattattatctttcaaatggctgcccattgattcaaatcatttgccacttcaataaatccgaaaaatataccatggtaggtaatgcttaatttgtttttttacaagttagatatatttggtcagaaaactaaatataaatatggatattcttatacaaaacaaaacaatgatattcttaagaattgtcctatataaaaagtcttttctgttatttttctcagccaatatggatacagtgggttgatagaattagaaggtgataagctaacacgggaattagaaagtgataaacaatgatatttttaggaattttttacaccaaaaaacaaaatatgtttaagaattgtcctataaagtctttttcttttatggttctcagccaatatggatatagtggattgatagaattagaaggtgataaacaatgattattcgatttgaggaacaaaacttttatgttgtgagaagtaaaaataggaactgaaaccattacaatatatcctaaggcgaaactagagtaacaaaggaattaaatgcatagaaaaatggtgggtgtacggtttttcggtttggttttggtttgattttttcggttttacgtttttggttttattaaaactataaccatataaaaaccatatgtatttcggtttggttacgctttggtttttacagttttttattatataaacattgaaaccatataaaaaccatatgtatttcaattcggtttggtttcggtctggatttttgcggctattctatatttttacaaaaagaaaaatttcgatgatgatgcataaaaacaaataaacgtaaaacaaaagtaatatcaaccaattaattaaatataatagatatcgtgttataattatgtttttggtttctaaattactaaaaagagtaattgaaaagattgaagtttctatgtttggaatttcatctaatcaaatttgcctaaggtgttcctactcttagacctaaccattcaataaaacttaaaaaaaaattcactaaccttgatgaatattttttttactgtgttagagcgagttggagcagaagtaattgaatgtgcatgtgtcatcgagttacctgaactaaaggtaagttaacgttgatgaaaattttgttttgaaggtacttttatatatacatagtaacaaatttcataatttagtacttggagactttttttgttgttgtagtttttcaaagtgcaatttgaaaatctcatgatgaattacaattttcagggaagggagagattagaagggaagccattgtatgtgctcgttgagtatcgatgatgtctttattttttttaaattagtgggcgacaaagcaaattccttctgtataatgtggcgggtttaaatttggatcaattggtcggttaaatatgttctcaaacccatggaatatgggattaaatttggattttgcaaaatttcgtgtttcatctatgtattagaatctcccatgcgaatttaatgggctttgttcgtaactaaattacatcctttacaaggatgagggaaaattacatcttgttgaaactgaagatgccattgatgcggtattaagtgaacttcaaccgataataatagaagagttgaataaaacgtttaaaggaaaatcgactgaattggagataaaatggtctttatttgtaatgcatctgaagaagatctctaaatggtagctctagtcaatttttatggaagggatttttgaacaacgactcaatgagacaatcatctagcttatttccagatacatacatataaactcaagcttatgaaaaattaagaccgattcgtggagaaataaatatcctagatgatgggggttaggtttaagctcctccttcatggagagtgtttttcaaagctcagccttgatggcatcaagagccaaaatttatgtcgattgttcgacttcattggctgaagaacatttgaaaactatcttcaatccgatcaaatccgaaacttctttgatggagtccactcgcgtattaattgggatatttatctttacctatgtttattcatcttttatccactttgttgtaagtgagaattatgtatcaagctctttggcaaagagtctcttgatgacttcttttgtaattttggtttaagattaatctaagaaagttagacggaataaaaaaaagataatgtggagtagtagaccagaccattattaatatgattgataatgaactacttaaatgctatagtttaaaatatgtttacgttacaaattcatgcttagaagtttattattattattatttttcatgcttaggagttaaaagaaaaactaagcattttatttggcaaacgaaatcatgttaatatatagcaaagattaaagatcaaaattatgaatacatcatgttaatgtgctgaaacatgtgtactaatacgtccatatttcatgtaggccagtcatcttgaatgggttcgtgacaaacaaatcataaatatattttagtctatcttatacaaacaatcattaatttggtttttttgtgtgttttttttgcttatatcgtacatgttctaaatattataaatgaatggttatgattagcaagttagaggataactagtattatgtccgtgctatcgtagaagttgttttaattgactactaaacatttttttgacgtattagttgttttatattttagaaaacatttaagaaagaaaaagaaaaaatgacacagtgaatttgaatagatgggatgagattaaatacacgtgtaaacaaatctcactctcagtttcatctcttgtatttaattataatcacgaattgtgtcattgtgatcggaaacatggtgatttcatcctaataaccggatttagtggcctcataaaatgtttgagaagcttaaagatggagatcttgtgcatactcttttattgtgctattgttttcacttataactttcaaagctttttaagtctaacttattactgcaaaaaaaaaaaaaatacagaaacccagagttagttagatataaaaaaggagagaaaaatatctttttgtaacagagaaaagaaagattctaaaattttagaaacaaaaatgaaatagctgattttctgacttccacacttctaaagtctcgtacatttaaatttattagacatatgactttgtgtttagagtagattgtcgtgggaatggtaacgtggtgtatttaaggcaaaaggtgtggcatatttcttatgcttttcttttctcttgtactttcacaaactcaattactcaaacggtctcaaccacttaatcaaatatgtgatcaacgattagtgaaaaccaaaagaaaatttaaagacagttaccttggattaataatgatctaacaatttagtattcacgatttgctctgtcgaaatgttctttgctgaaaatattttccacaaaaccctgacattgaagcccacggtattcgatctgccgaacttctataaaacatcaatattacaaatagtgaaattcacaaataaaaaagaaatgatatagaaattgagacctagaacagtatatgcaaaacgaaaagatatacaaatcttaaaatagtacaaatttgatacctcaaaatatatgtaccgcctttgatttaaaaaccagaatcactctggttctcgtgtttcatcatcacgtgctgcaattcactatgttctcttgttcagtatcactctgttcttgttctcttcttcatcagtttcatcttctttgcaaactaatttgcaattgtagtcatggagatcgtggggaaagcggcgaggaagagagaataattttagggttgtaaatattaatttgtgcacttgctaaataaaatgaaaaaaaggaagtgttcagagtaaatcgtggaaggagtaagttaagtttttcttttttattcaatttttttttcttgatacaataatagagttgttacgcgaaagtaaaacaccaaaaaatgggacttatgccacgtatcacaagaagaatgatgcagtttttattaaagtgactgttgaattagtataattagatgcgttgacacatataggaagttgaatgggttcaaaataaaaaacgaaacttgaaatataagttaccaataaaacttaacaagcgttacttacttgtggtttacttctgtctctaattcatatctgtttggttgtccctctcatctcatatagtttgatgaaaatcacctactaatatatatacacacattattatatgtagattactcgcaaatatattacaaatggagttttttttatgaatgttttatagaattttgggatcatggacggattttccccaattgatagatttaaaaattacacctacgaaggtttgataactagaaataatcttatataatgtgggataagcttcattaaaagttcttattggttggttttagatttcctatataattccatatgaatgccattaaacagtagaaattaatatacaaaagggatataaattaaataaatataatcaaactgttgcttgaaagcaaatgctgctgcaattaaaattttgtctagaacagttgacataataccacatgtactagattttaacccgcggtacaccgcggatacaattcattttttaaaattaatatatataaaaatttgtaaattattttatagtttaccattgttactaagtaacgtcctgccaaacccgtcctgctaaacccgtccacaaaaaaaaactatttattttattaatgttgaacttatttataatatgtttatgaatcattgtcaaaatattttagtcattgcgggacgttgaacccacacagtttttgccaattggttaatatatgttcattcttaaaatttcgaatcacataatatgacgaaatgttttttgagatttttttaaactctatatattatataatgatgttaattatttttgatagattaaactttttataaattcaaatattaataatgttttatgaagtttaaatatacaaataataatatttaaaaaattaatattttttgccttttaggtaatgatataatatctctaaaagcaaaaatttagaagatttaaatctttaaataaatattttcatgcctaaataattaatgtcagtagcatgacattgtaaataagttcaaatacatgatttgtttatttaaacaaaaaacgtttagtaagaacaatatttatttaaacaaaaaactttgttttaaaatattgttaataaaaaacgtttatgctaattttaagggattgatgtgaagtttgtttggattaaatttgattgataatgcgattgacaatttaaattaaaaatttaaagtaaaatttattattttggaaaaaagatttaatgctaatggtattgggttgtaaataagtccaactctatgatttctttgctaaaatggctgcaaaaatgtatatatagattgtctgtttttatgttattcttatataaacgaaatatttaagtcataatgtaaagaactattattaggatttccacttggtattgtaattatacatcatcataatttaagttagacttccaccaaatctgcattttcatgattatctttttctgatcactctttttaagtcaaactaaatcggcctcatcaagacaacaacaactaattaaagttaatctacataacaaacttctgttagaaatgttgagttgcattgtatggtactcaaatatacgtttatatgactcagaacgatggtgactgattagacaaagcgaataaaacaaataaaaagtaggattaagtgattttttttttttttcaagtattattgtttagttgttagttgttacgaagattaaaatgatattttctcataaatggtcagcactttaaaaaaagaaaaatgctcagctctttcatatcttttaattttatttactaaattgaagaaaatgatgataattttattggtatactaaaactcattatgcatgtattggtgcacaaaattttaaaatgcgagaatttgtcatttcaaattaaaacctatgaacttgtgcatattatgcaaaaaagacttctcaccatatcacattccacagttacactctctctacatattctgagttctgacataaccattcggttaaaatcataatgtaccgtattttaataaattttcgtcattatgtatcattgttctaaaaactcatcttcattcctccacataactctactaagaccaaaatgacaaatattcttatgtaaattcaaaattttcattaactttttttatttttaataattaattttcattaacttaaccaatcgtatataggttgtccaaaaaaaaaaatctcattaatatatgcacacacataaatgtatatttttatatatttgcatgtaatctgcatgtgagttgtctcttttgcagtcaacgaattaattttaaaatgtgctgcatttgttatatatatcaaacaatttttcacgaaaatatttcccataaaaatagtaattagtgacgttgaatcaaatttgtttcttatttaaataaagtatacacttgtaaacattttatataatgaaacaaaattaaaactctaaaacatcatatataatgaaacagatggaatatattcatatacttgcattgaataagtgcactttatttttagactgggaactctttaccatagcaaaaactttatcgtttcagtggttacaaatcacatacataaataaaattaatggttgtaaaaacggtatcactaattatctcttatctaatttgctacctatcaatgattttattcaatatcgaatcctgccaaattgtctaaaccttaaacataagtatatagattggaccctaaaaacaaccaaaaatatattttgaacgaaaagttaaatataaatctgaaaaatacgaagcagatacaacaaaccaaaaaatggaaccaaaatatataaatcaaaattagtataaattttataataattattattttttacaatctgaaaaagattaagaaacaaggcaacaccgcgcgagcatcaaagacaatcaactcaccagctcgacccgctaccgaatccgacccgaattcacctttcttcgcaacccgacccgcaatcactctacaaatcaacatcgctctcctccctcctccgccgccagtgctcgcgtgcgcttctccgctaccggaaaacgtacaaaccgccgctcctttccctccgggaaaaccccacgcgccgccgtttatccctcccggaatcggacccaacggaaaaaacctcatcatctcattcccatcagcggagcaccgcgcgttttcatcacacgcgctgccgtcaactctatcagaatcaactttcgaacacgatcgcgatttcacagcttctctatattcctcaaaccgggtcacagcttttgacccgttttcaactttaaaaatcatttcaacccgacccggaaactcatcggagctccaactagattggaatataatctccacgacgtttcttgacggatgaccatcaggaagatcggtcaatacgggcaatacagattccgaggaagctcgagctgatacacttcgtcgggtcgggtgatgagaattggagtctaattcgggtcgacgagaagagcataaacgtcttaaactcgggtccggttttgggtttttcttaacggttccgggttgtgtattgacaacgtctctaacgttttttctgcagctgtaacttggcaataagagtttacctttgttggagtgatgatgatagacatcgtcgaatgcttttgatttgcaatgtaaggatttgacccacccgatcggcatatttcgggttgtgttttgatttggaaccggatccgggttgtgtctttagaaatttgaagtttgtgatatgtttagagatttgtgggggctttgaagtttttggtgtatgtatgtaatgtacccatgaagtatgaacattgtcccgccgtcttagaatggacgttttatcggttggtgtttctttatggtagtaaatgacgatattaccccttttattttgggtcctgaccaatgtcaacgtgaattttccagcttcttgtctgtaaaaacaaaagaaactaattatgtatcataaccacgtacaatgcttttaccttgttaatcatgattgaattaacacatgtctcattttagttaacttcttgtaatgttgaagttagttataacatatctttttccttgccgatgaatttcttgatctagtttttcttgtgtcagcgagaatatcgtttgtggtctattgattatgaccattgttctatccaatgcatagttggatgatgaattcaggacaaataatgttattacttgcgccaaattgctttttagcttttgttttcaagctcttatacatattttgtggatatattttatttatccctttttagcattgtaaaatatttttgtatgttttgtcttaaactttatgatccttgtattcttggtttttttgaaccttgtgacttgaatgattgaaatgaaatatttgttccataataattataaaagaatatcaaattttaatagtatgtgtttttaaatagtagctttctttgtatgatgttggaatgtcggattcaccaaaacgaactacagtttattttttgaattattatatgaactaattgcatacaatttgttggtgaaacaaactaaataaattttaatataaaaatatatagaactatgagaaggaagaaaaaggtaatgcgtcgctattaatttttttttatgctttaataagacaaaaatgtcacatttgaagctgcaatatcatgaagcgacaactttaatttaattttgagaaaagatatgtattttcgtggtatttttatatatagtggcttcatgttattgcatctaaaatatgtatagtgtatgtattggataatttatatataatatataaatatatggcttaagaaaatatattctgggaaacatatatagtgtataaatatatggattaaaaaaatatactccttcaagaaaatatatttatttagtgtataattatatagcttaaatatagagtttgattagtattatttagagaaaatagtagaaaagagtgagagtaaacaagtagaaatagaatatacagtatcaagagaaaatagcaaaatagagtataatttttttactcttatggaaagtagaagaaaatctactctatttttttaacataaatggaagaaaatagaaaataaaaatgattttatttatcatgaatgctacaaattaaacaaaattgagaatagaaaaatttcaacatttttatttcactctaaaaccttgattagagatctttacaattgcgtatttcaagaacaaaaaaaatgtttgcatattttaggtaggatgatatctcataaaccgcacttatttatctttttttttctgaaaaaaacaactcttatttatcgaacaacaaattatccattggtacaaatcgaattatgcattgaaaaaagtaaaaaattgattttttcatttcatttaatttgtgagtaatatagaaaagagtttgattaccactaactagtatgtagatgtcagaaacctcaattagaaatttgtggatgtttcgatgtctctatgccttgttaatcgaacaagatcgaatttgaagaataatgtattaagttatgtataatgtcgttacaatctgaccctcctttacaatttcatttctctccttttatattaatattgtgagattcgtaatcacaaataatgtttttctcgtgtcgccgatcacgtctcgatttaatgttgttcgtttcgaatccttattccgccatcatcgctcttcactttactctgtgattcgtccgttacgaagcgcaaatactaatccccttctagatctttcttgggcagcgataggcattcctaaacccatgggtctttaagcaaatagacctgatatctgttctcggcccataacatgtatccgtctatattgtgggttgggtggataacaagatctgacatttacatagtgtatgagtgatttaaagcaatatgagaagttaaaactagcacttaactttgtgctaaattctttagtttaacttgttaaaaaatttcttaataaaataaattgccgaatttacttaacaatttatttctctccctaaaataaaagtatagcctataatttttttaaatttttttaatgtttttaactatctaattcgcaaaaaaagaaccctataatatcaacatataaaaactaaaaaggattagaaatatcattgaaaccaactttgttaatcaaactagaataagggccaccacattaaggacttaggtaaaagtggtgtaaaatgtaaattgttcattttacaaaaaaaaaaaaagtggtctaaattgctttttgtgatgtgaagttgtgaactaatatgaatttggtctaagtctattgcccaaattatttatccttttagtcctagaatttgttccaaatttgatagtatatagcatcatcatcaaattgatcaattaaaatacgtgacctatagaccatagaaacaaattatttagtaatttttttatggtatatagcaaatggaaattgtttttatggttttcaaaatttttttttctggtcaattttttttttatggttttcaaaaaatggaaattatttagtaatttttttatggttttcaaaaaatgaaaattatttagtaatcaaaatggaaattatttagtaattttttatggttttcaaatttttttttttctttcttcccgacctctctcccctctccttgttcgccctagccgtcaaggccatcttcctcctcgttttggccggtgattggtggcttccatagcaccgtcgccggtcctgttcttagtagtttcagtttgttgtctcttagttattctttgttctgattttagtttctcaaaccctagtttcgtcgtctcctcttcaaatctctcttttttgtggtggttccgatgtgatgactatcatggaggatgggtggcggatcggtgctctttgtagtcggatctattccccggtggagccgtctcgtttcttcgatctagttatggaggtttgtgtttccgatctggttctaatgtctcaactatcggtcttgttcttgttagtttgagaattggacttgatttgttgtatgttccggctggttctgatgtggatctattgagttctgttcttggattttgttggctttgcggtggtgctgtctcgtttggggcgtgtatttagtcggcttttcgtttccatgagttagttctgtttatccctttagtattgcagcaacggcctctttgtatgcggattcttcttccgtttttgagttcgagtgacttctagggtttgtgttttgctgtgtttttcgactggttatggtttgaagcctcaggttcagcttttgggtaggcttgtttgactcctagctctgcctatctctctgtcctcctcttggttttcggtgtcgtggcttggtggaaggttctgttttgtgggttcttcaatcggatgctagcctcctataatggcatctactagctctctgttggaacctcttttggtttcccggctgagttctggacgttgtggtgggtcgatctcttgtccttctctttgcgtggcgtaaccaatctttagtctgtaggtggctttggctgggtctacgaaggtccgtgtgtaaggatgagtggtcctttttagcgtttcccctctcggatctcaaggtcttccttgatccttcgccttctcatgttcattggcgctaaagcggttctgatggttaggttctgtgttctgatcttcttgtttcgtcgtcttcgtttttgttgtggagatggttgtgtgagctcgtattaaatctcttttcaagactcctgtcagttgcctctcctcagcgccaaactgttctatggaagtgttagtcggcggcttgttgggaagagttttcagtgttgtagctttggaggctttagctattaattctgtagctgttatctttgtatcttttcttctaaggcttgttttgtttgttcaccttttttggcctcatgtctctgggggtttctatgtacccgccgactttgtctccgaaaggattttttccttttcggctatatataactcaaacgcatccaatcaatgaaatccgtctaaaaaaaatagcaaatggaaattgttcctaaatctttcacaattttccaagtattttttcttttgaataattttagttattatcctgataatattttttatgtaataattattcgaaacgtgtcacatatatatacaccaagcacaccatttttgattatcatccatcatctcactcactgatatttatacattcaaatatttatttattttcaagttttacgcaaatctctttcactcttaaacctcataaccttagagatcatcagtcatcaatcatcttcttcgttgttatcacttctttagtagctctcaacgagatttctccaaaatcagcgatgcctttaacgagatcaaagagtcttccggcgacggagaacggtggatccgatcgggagacactccaatcaggaagatcagtggctgggattctctataaatggactaattacggaaaaggatggagatctagatggttcctcctccgcgacggaatcttatcgtattccaagatccgaagaccggagaatgtcaatctcttatctccttccgatgatctgaggttaatcggagatatttccaccgatcgtctcttgagaatgaagagttgtagtggccgtagtcgtcggaaacatcacaaaaacattggcattgttcatctcaaggtatttcttagttcgaatttcaatgttttttgaattagcaatagttaggttttgaattagtactattgttgtttggcttatcatcttctatattctggtttctgaaaagtttttgagtagctacttatctgtagtgggccatatcaacaggtattggcagtactatgagtctcaaagttcattgtcgaaaaaccaaatagccaaaatacaaaaaccttttttttggctggtgctactacaatctggtattgcaggaccagatcagggtctcaatttgttgaacacattttacatcttgttagaatttggtttattttgtagtaaagccaagaagtgttagaaatttgtcacctttggtcacatgtaaaaactctttatcttttgatttttttgtttgtttcttgattttgtttcccaggcatgggcctgagttcttttgatttgtgtttgattttttttctttgccatcttatccttggctaattccatggatcattgaccagtagatttagttatatcctttttagtggagtttctacatgattggtgaatggtaggtgtagctagtcggtaggaaataatcaagtgtggataaataatggagtgtagctgtgttggagctgaaggcctcctcttggagaaattctagccatatatttttttgttaacttgtaagagttatatttgcttattctaaatactccaaagcttatccagacataagctttgagtctgtgtttatttctttctctgagtaattgcattcttctgtgtttgctttttaattttttcgttagaacatggaacttgtaattattaattgttcacagtttgtttttgaacatgagagcctctaatctgatcttaacttatagacttttattagttggaaaaatgtttactcgtttgagggcttaagcctgtaattagatgaatatcatttcattcttttgttttccagcaggtttcatcttaccgagaaagcaagtctgatcatagaaagttttatatctttactgcaaccaagactctgcatctgaggactgattctagaagtgatagagcagcatggttacaagctttagcatctaccaggggcatagttcctctccagtcaattaatggggatttctccttcgtatcaccaaaggatttatccatatctaccgagagactaaagaaacggttgtttgaagagggaatgaacgagagtcttgtaaaagagtgcgagcagatcgtggattcagagttctgtgaagttcaagaacagattaaacttcttcacgaagagcggaaaaagttgcttgatgctttgaggcagctagaggtaaagctgaatttttggtcttcttttatgatcgttttggtttggttgagctgtttagtgtggtctcggtcattgtttcctttcatataatgacttagtattccacgggctttacagtgcagttgcattggtaacagcgagtctatgcacaaaggcatgctagtttatttgtcatgtaatcacgaacgggacggttattttaatatatgttttacattcttttatctccattcatgtggatattttgttaattgagttgataatttctgaacttcatatatccatgcctaggcataacacaaaaattatgtatcatgcattaaaaacttgaatgtcaagttatgattattatgaatcttgcgaaagatccctccccgctttttataattctgttatttgttggctattctacactgagagtttctttatgtacagatggccaaccttgaagctgaagcctcagggatccatgacgatgtctaccaattaagaaatcacaagtattccagcttaggacgtggaaaatatagtggtacacaaaatttctatcgcgtaattgttcttttattcactgcatctctttctctttctctgttttagttttgccattaaatattgatgaagccagctggcgaggatctcgttactgcatagtagaacaataatttctgatacgatattcaattatttgtttcctaaattttcctccttatgcttcttttacatagcttcagtggagttgcatttagcttcctgtgttgttttgcttgacaatatttaatttctagaatgcagtacaagtgcttcatctgatgataagcaagagtttgaggatatctctgaggaagacgaggcttccttccatgacacaaaggagtcatttggtgaacctgatgttggttctgtgctcacgcattttaagagacgaacaaagcttcctgatccagcagagaaagagagaggtgtcagtctctggtctatgatcaaagacaatgttggaaaggatctcacacgagtttgtcttcctgtttatttcaatgaaccaatatcttccctccaaaagtgttttgaagacttggagtactcttatctcttggaccaagcatatgaatacggaaaatccgtaagtgatttcaaaaaacttactgttgtatgtaattcgcttccttctggaaatgcaaacgttttctctactcttaacttttatttaattccaattactaaagtaatttaactacatagtttgagcttctatgctcttgcatgatatgatatgtggtctatacttatctttttatcttaaattgacctctcagtttgttatattaacagagtttttcatcatcaggggaagagtctccttagagccctcaatgtcgctgcttttgcagtctctggttatgcttccaccgaaggacgacactgtaaacctttcaaccctttgctcggagaaacatatgaagctgactttcctgaaaagggaattcgtttcttctctgagaaggtaatatcatatataccttttttactgaagtcttgatgagatgaacataaatgtcagttttctaagactgataaatggtcaataaacaaaatcggtgattcatgcagaagctctatgattcaggagcagctctgtagtactctaaagtctaaacatgttaatatgcatgtagttgacactcagcttcactcgtatccggatttaaaaaaaatgaaacatatggagaaaaaaaattatgagaatcttttcttaagaagtttggcatataattcgttagggtattgtactctcataataggttagccaccatccaacagttatcgcctgccattgcgaaggtaaagggtggaagttctggggcgacacaaacctccggtcgaagttttgggggagatcgatccaacttgaacccgttggaatcttgactctcgagtttgatgatggagaaattttccagtggagcaaagtatgtataatacaaactacaaaactcctgtccttttccgcattttatttcttgtccctgagactgatcactctatgcttatctttgtttttaggtaacaacaactatatacaatatcctacttggtaaactgtactgcgatcaccatgggataatgaaaatccgtggaaatcgccaatattcttgtatgttaaagttcaaggagcaatcgattcttgatagaaatccccaccaggtgattacacagagatatgcactgttaagtgttttcgatctacgtggcatttctgaaataacttcatggtcaaatatatataggttaatggttttgtagaagatgtaactggaaaaaaggctgcgacggtatttggtaaatggaatgatagcctttattatgttgctggtgatggaatcaacaaggcaagcgcctcattactgtggaaagcgacaaaggcaccacctaatgtcaccagatacaactttacatcattcgcgatgacgctaaatgaattgatacctggtttggaggtatattagtatttttttaattttggatttgtttgtaaacatgaattttgggtttctgctgtacttgaaatcttgttttagcaactgtgtgatcttttcgtaattttgttcccttggtttaaggaaaagctgcctccaacagattctaggctccgaccagatcaacgacacttggagaacggtgaatatgagaaggcaaatgaagagaaacaaagattagagagaagacaaagaatggtacactgagtatctcaacactaattctctggtccatgaattcattaacttttttttaaaatgttttaacaactgtaaatggcttatgattctgcagtcacggcaaattcaggaaagtgggtggagaccgagatggttcgagcctcaaggagagagtgaaagctataagtatacgggcggttattgggaagcacgagatgttaaaagttgggatgattgccctaacatatttggagagttcaccgaagaggttgcagattgtgcttaagccgaggtattataatatatcaaaagttgtgatattcgtcaagtggttgatacccgcaagtaactatagaatcttgatcacccgatcgatccgtgaatcagctcaagataatggttacaactgggatctaagattattatggttcatggctaaggaggaacgtgagccttctgccccctagggattgattctcgatagtgaacagagctttcttttggtttgaattttctgtttatttaaactccggagatcagaagatgatagatatattctttttcagttcttttgtagtaatgtttctgctatagcttcaaaagatggtccgataaagagaatttaaagagcctcactgtaaaggtcactgagagaaatgcaactcggttccaacatttggacaaatattatttgtgatctatttgtattaattcaatacaaaggaagcgattgaaatttgagtttatgcatttgttggtcattttacaaaaactacatatgcaaaatggtaactctaaccagaaaaactcgaaagcaactctgttttagacttatagtcagcatgtttgttttaaagatttaacttcttaaatgtaataagaatctagaatgtattgacacattcaaatcatgactctactacctaaattatacgtgttttgattttatgttttacttaggtacgagttttataaagttttcaaaaatacttagaaaaaaaaaatggtttctatgtatttttaatagttatcgatgatgagttgtaaacttcaagaaaaataactgaacactattgatttagagtaaaaaatcatatttaaactgaatttgggtaaaatgtttaggttgttatttaaatttggatgtactatgtgctatatagaagccccgttatcaaaatatgtttttaacagtctggcgtatctttaaacttcgtacatgacaaatatagaagaaaaacaaatacaatagaagtagtgacaaagtgttgtaagatatttgtttccaaagatctctttctttttggttatatttttcttaattcatctaggtttcaccctaattcactcacaataatgtgtattaaggaattcaatatgcaaatgtttaatatgtataactatcaaatcctatacctttacttgtaccccttggtctatatatatcgtggtctcaaagaaagtaacattgatacaataatatttctacacaaatctcatattattattttttgctcaactcaaagacgtgtttgttgtcggccaagaatagatatttggtttatatgaaacaagtaatgggctatctcaagcttagtagcgtggtccatatctcgttgatgttaatggatcgttgtttttgtattcatccattaatatggatcgtcttatgttagatgttgacgatcgaaatttctaaataaaggatttatatgtttggagtcttcgtagaaattgatgctctgcggtccaaatagaggcataaatctttatcctactgaaatattagtggtttcaaataaagtcaatccgatgacgactgattaatcccaaccgcaaattttcgtttttcgaaagaattcgtaaatcctcctcgtcatgttttagaaacttttttttattgcgtcgtttgtcaaaaataagagatatatgcatgtttttggcaaactgcaaacatttaagttacatgatgtacgtaggtgataaagctactttatttagtagaaggaaaaggaaaaagggaacactatttatatgatcattaccaaattatgagagacatttaatttggttaagatgaaaatgaggaaggagggttgctccgatggcaaccctaaagttacttcattgattgtcattacacacatgacacattttacatatgaatttttacactttctttttttttttttgatcaaaaaattctttacacttgttaagaaaccctaattacatagacttgtgtgggattaatactcatgatattggattttttgtgtgtgcttcagtagtagatatacagaaatttttcacagtacttaagtcagttaatatagatgtaaataaataaaaaattgtatcttagcgtttagtgtttgtggggttaggttttaaattttgtggtttaaaatttaattgatagagtttagagtttagtttttatggcttagttgtatatatagtacatacatacatattaaattatatactttgaaatagaggaaaattttgcaatccttcttaccagttggccaaaacatgcatgtaattatctagaatgacaaaataagcaattttttagaccaaaaaaaaaaaaaaaaaaaaaaagaagcaatatttccttaaaaacaaaaatttgcaaaaacaaatgtgaaacttggaacaatttttgttccatgataaatcttatcataactttttttttcttcaaatcttatcattactttaccaaaaacaaaccttactattgtaaaacaatcatcatgtaaataatcatcatcgtaacaaagaagagtgtccatagctctatggcttgctactttccattgtgattcagttataaagcaacattcattgtaaaaaacatttttaggtttgaataaattttacattcaattcaagaaaaaatatttaaataaatcgttagtacacgttcgcactaattctcatgattggagatttttaactcttcacttaaccgatatgtatagttctaaacagccaagattaaaataagtaaaacgaacgatttcacaaacaaacaattgaatcggcaaaatcccaaaaaaaaataaaacttacgcatctaaattattaacataacccaaactgccaaacacaaaatacattgtgatttgtgaacgtattcatattttagacagctatattagagtgagaaaaatcatttttcttccggaaaaagctggtttactctttcttaaagtcaataagaacatttgtcctcaaagaaatatcatatttttcaacgatgataggaccaaaaatagttaaatccgacaacaaaacaagattatttcgaacttcttcaaaagaaacaacgaaaaataaacttgttaaagagggcatgcaatttgattgggcagctatttaatacttttcgtatttagcatgtcacgcgattaaacgtcaatgtcattataattgttgatattttaattagttatctatacagcaagatattattaagcaagttcttcgagatacttttaaaaagcatattcatttgtagttttctacatatttgacataaataaataaaatgaaaactttatgaacaatatccacatttagatatttttaaaatctgtcatttttttaaatatgtttaaattatatctatttgtattttgcatttgaaaataaccatcatgatgattttgttttaaactatttcttaattttagtagaagtgttagatggtagataattaataattctcaaaagattaaaaattttaagaagtaaattattatgctcataatttggtaatgttttcctcttaacattttttttaatgaaatgtataatttattcaaccaaaaaatggtgtttacaatatatgtccttgaatgaatgatttcctcttaacgtctctaagtaatattaatcatttcattacctatagattctagattatattagtagtgtcaaccatctttgatctctctactcatctttgcgactatatttgtatttatctttgcaagactccaaattccccagtccctacatacatccatttgcttctgtcattgagcttaatgtaacccacattcacagcatcacgactcgcaagtcatacaatccgaacggaaactttcaattcgtatgaaagttataaaaccggttattaaaacaaaacccattctttaaagttctgatcatccaaattctaggtgttatatgttcatacaaagcttgatatgcgaatttataacttggctcggatgagaaacgaaattctatgaaaatattgaaaaagaaaaaaatatttaggctacaaagggatgacatatagttgaatgattgaaaatttttgagttgaacaaaacaaagctgaacatcgttcaactcattcttctgcgaaatagtagaagaaagggttgaaaagttttcctttataatttgttcattttttcatattttttttgttgaatgagttgaattaattttccaacatattcatttcaaatggtaaaaattgagatgaataatcattcaacatctcggctagaagatatagtaattcattatctaatttaaaacactagtaaatctacaggatcttgaactcgagatgataagtttcaaaacaggggaagaagaagcagagttacaggcttgtatatcaaatttttataataccaaaacctctccgaataaaagactacatcaataccgaattaaccagtttccaatatcgcggttatgctacaaaccgacttaaaccgagttatgaattaattattttttcatcagtaccactccttcaaggatcaagtacacttaataataaatcagtgggacatgaacactagtgaagcatcaaaacgttacttcaataattgatttcggttcaaagcttcattgatttcagtttaagcttttcatttatgattgatttcggttcaaagtttcattgatttcagtttaaacttttcattacacaaactttcggtgataggccaatgaaagaacataaacatcattgcaccttaattgacatgatcactcaaactctctaggacaaacatgaagaaactttaaatttcaactaaacctcaatcttggagaatggtctactcataattttcgtgttttaaatacattattaagattattggaaattgtcgtttaaaggatgggttaaagaaaactcttaaactaatctcgagacatgtaatcgttaggataatctcacaaaggtcaagagttttttttttactataaatcaattctcgaagaaaacaatagcattctacagcaatctgaagattgtaataagaatctaaatgcaagaatttgaaaatgagacgttgcttacgaaatttctttcattaaaatttcgttgaaatagaaatagaaatagattgctacagaagcatacaaagcttggaaggcgggggacaacgtttacaaacaaaatgaaaaactataaaaatctcacacatttattttttctctttaacaaattaagattgatacataaactataccttacatgcatttattcaaactataataaatttcgaagacgatattgtgcactggcatcgcatcgtatgcataatggatattgctcaagcacattggaaaccagatggaagctttctgttacaaacgttgagaagaacgctgagagatatcggaacgttaaggttgataccaagaacgttagccctcagagcagtgcatagacaaatcgcagcgtcgacgtcaaccaaaccttggatgagcgagcaacattgttgagaggatggctgtcccaactggatgttgagtagactgcttaagacatttgcacatacaccgagcttgagagcatcaataggacagctgtttccggatgaaccaggggtgcgtggaggtgtgaccggcctaggattaggacttgggactgaaggacggggtggaggaggacattggaccggcttgggcttaggacttgggactggctttggtttaggacttggcttgcagttgcaatttgttgcaacggttaaggtgaaaaagaggatgttgagcgcaaagaaaagagcaagagaggctgagttctttgaagccatttgttttttttttcaaagttatattcggtgttgtaagggttattgaataaatagatatgaagagaagatgttggtatttataggattttagaaggatgggaagaggaccaacttgatttagtttaaaatttatttatagatatttgtaattatttgtatatatatatatatatatatataaattctgaccatttttcctatatgcatgtagctaggtacgtagaaccttgaaattatttggattttgttttttgtaaaccattttaaaattaagaaaatactttatatatacgtgcattcatataagtattaatgtcaagttgtcaatgctgttattatcaacaccatcatgagttcgtggatgcacaagatattcagatttatcttggttcgtagctcttttacttgacggcttctatacgtcaggtcgagtaatataataaattcctagtgtagttataatcaagctgagcccggccatggagacacacccaaagtatttagaaacttactcgaaaatttgtgatatgtatataatatatgattaatatatatgtaatgtttatgaatttaattaagattctttaatgcataaattatgaagacattaaaatcctcctacatgattcggtttttaggggtgtgtatcaagaacccacaaatttgttctctatgcaaaaggttaaaacagagcggtcgagcaattaactaggacaatatcatggaaaccgcaactcatcaattttgattgtttttttttgttatttttttttaacatggtttactaaatagttaggttagtttcatgatttaattatttaaatcaaaccatggtttgagaacaaatatgtttaattatatataaagaactacgaaattttaacattttaacattttgattcttggtagtgtccccacatacatccatttgcttctgtcgttgagctggtttactgtttctcaaaatcaataaaaactattcgtcccaaaagaacatttcatctttgattcttgattgaatccccaccaagtggttttcacctagatacatccatttatgagtcttgtatacaccgaaacaactatatatgtcttgcatgccttaaataacttcatggtcatatgcatatgtatataacttcatatatgatctactgggaaaaaaggccgagacggttttggtatgctgctcaatgaggcgattgcgtgtattgaggccacacaataatcaataatgtgtattaagcaattcattatgtaaacgtttaatatgtaactatcaaaatcctatatatctattgtacggtttgaacccttcgtgtatgtatattggtctcagtaagtaacattaatacaataatttaaattcatatttttatttttggctgagctcaaagacgtgtttgttgtcggctaagactagatattttatatttctactcaacattattcatccataagaatcgtcttatgttagatgttgacgattataatttctaaatatgtttcgagtttacgtaggaattgacgctgtgactctgtgaggtccaaatataagcaaaaatattagtggttccaaataaagtcaacccgatgacgactgattaatcctaatcgctcattttcgtttttttgtaagaattcgttgaatcctcctcatcataaagaacaaaaaaaaacattttttcacgacgtttgtcaaaaagaagagatgtgtttgcatgttttgtcaaactacaagcaaattgcgatatagtaccttagaagttataactatatgatagtgcatgtatacatgaacttgtcactgtcaagtcctatcgatatctaatagatgtacgtaaagaaactttgtgtgtttcaagttttagcttttggagttagggtttaggatttgtagcttcaaatttaatgtttaggatttgcagtatagtttttacttttagggttaagtttgatgtagtgtacattgaagatcaacaataactacgtttatgatagagaaataaaaacagaactatctgtagtaattttcgtttttatatacaaaaacatcaatttggtttaagaaaaaaataattattttcttgaaacaaatcttcagtgaatctaaaggtaccttaaaagtttcatatatcttattatataaagtatggtttttaaaattactaactcataagattatgccatgtgtcaagtctatcgatcagatgttgacacgtgtaagaaaataattaacttttttcttcttaaagaaatagaaatactaaaaaagaaatcaattaacttttttcttcttaaagaaatagaaaactaaaaaataaatcattattaacatatactaatttatatgtctatatgactatatctaaaaaatattacattttgtttttcttaaccaaaagaaaaattaaccaaaaatatttatatatgttattggtcaaatttttaatatgtatggtattaaaaaaaaatttattattattatttatggtttgttaattgttaataatttttaatattaactaagatatagatttgatctcatatatatattattttgacatgaaatcattatcaagtaagatgaagtgtgtagaattaaaatcgagttttttatgaaatagatagttaaattgtatacaaaattgaatatgtaagataaaaatttgtttttttcttctaaatactaaattataataaagaaaaagtgtgtaggttactatttagacttcaaatatcatcaataagattgaatgggtataataaaataaaatgcataagactactattttactattcaaaattatatatcaagaacaatgtatagattattattttactattcaaaatttaaatattatcgataaaaaattacagttacatcttacacccgcctatttagacgggccttatctagtattatataagagctagatatatagcatataatgatattttgttttagtagttgtatttaagaaaataactactatacatagataacgtttttaaaagttatttctcaatgttgttagatttattttatggtatacgattagtaattacgaaactttaaatttttcgaattagtaagttattatgctcatattttggtacgtttttctcttaacatttccgagtaataaaactaattgtcattcaatttacagtactagattatattagtactgtaaaccatcttgttccgttctatgattcattctttgcgactatatttgtaaaatatcttttgcaagactccaaattttccagtgtccccacatacatccatttgcgtctgtcattgagcttaatgtatgtaactcacattcacatcatcacgggtcataaaaccccgaacatgaacttctattggtatgaatgttaaaactgatgataacaaaacaaaacaaaaaacattttctttaaatttccatcaagtaattctagatgatattgacagatatatttaacgttcataaaaagttgttgaaaatttactaatcagtaatcacctcatgtgttgatcgagttcagttaattcactatcaagaatatacaacatgcgtagctttactctacaagttcttgaactcgtgatgatggagtttcaaaacagaggaagaagaagcagagttacaagctcttatatccaattcttataatagtaaacccttcatccgaataagaggctctctcttaaccctcgataccgcattaaccagtctcccgttttctggttatgttttaatctaaaccgagttaaccggagttctaaacgaatcacttcttcaacagtaccgctcattcatggataaaatagattaggcaaagacttgatttccggttcaaagttttagctaaaaatgggttcatggccatccatattatttttcaagatctctcggtcttgggctaatgatttaatgaaaccacataaacatgatcactcaaaccgtatttcacccggaaaaaaaaaggaagaacaaatcaacttatgtttggttgataatggtccactcataatttaatgttttaaatacagttttagattacggaagatcatggtttaaagggaaaattcaaactaagctcgagatatgtaatcgttaggttaatatcacgtacaatgatcaatagttttttcttaagcagaaatcaactatttcgtaaacaaaaaaaaacgtattctacagaatgaatatgtcaatttaaagatttaaattataatttgtaacgcaagaatttgaaaatgagtacaaaatctcttttattaaacgggttgaaaatagtaatagattgctacaaaagcatacaagaccggaatacaggaacgttgacggaaaaaaaaaactaagaaagtctcactctcacacattggttatttcactttaacaaattcaaaatttaaaacataaactctatagcttacatgcatttattcatactgtaacaatttcgaagaagatatttgtgcacgggcatcacatcgtatgcatagctgatatccttcaagcacattggaagccagacggaacctttctgttacaaacgttgagaagaacactgagagatatcgggacgttaaggttgataccaagaacgttagccctaagcgcagtgcaaagacaaatggcagcgtcgaggtcaaccaaaccttggatgagcgagcaacatggttgagctgatggctgacccaattgaatgttgagtagactgcttaaaacgttcgcacatacaccgagtctgagagcatcgataggacagtttccagatgagccaggggttctcggaggcgtgaccggcctagggttaggacttgggaccgaaggacttggtactgaaggacttgggaccggcttgggtttgggacttgggaccggcttgggtttaggacttgggacaggcttgtgcttaggacttgggttgcaaccacaatctgttgcagcggttaaggtgaagaatatgatgttaagggcgaagaaaagagcaatagaggctgagttctttgaagccatttttttctttcaaaagtttgttttaaggatttattcagtgtctttgagagagtgagagatgaagatatatgaagagagggtgtgggtacttatagggttttagaaggatgtgaagaggaccaacttgttctattatatttgattattcacatatatttgcaattctacaaaatatctgtttatttatttatttgcccttatctacatatacaaattctgacctttctactttcctttatgtagattcgtagaaccttgaattaatttagacattaatcgtttttgtaaaacatttctatttaagaaataaatatgatttgtgcgttcatattactattattttcaaattgtcaatgctgttaatctgttattatcaccaccatcatgatggttcatgacctcattgcacataccttcagattctctttggatcgtagccattttacttgagagcttctatacgttagtctagtggtcttagtacattcgagaggaagttgtgctctacactcttttccgagaggatgtgttttatcacaaactggtcccagaagaggaagacatgctaacaaaattctcgaacttcctcggaaaaaaatgttcaatgtgaatgttttcaaaattttggatcctcttatgcataaataagaggacatcaaagccctggatgaatcaggtttgtctatatgcatggttgtgtcatttgtgacgtaaagcaaacagtatgaatacaaattagatctcatatggattatatatgactaatcccaacttgcaagagaatttagacaagaacatctcaatttttttttccaatgttggttagaacaatttgtattgatttatttcttgcatttgagatttgaaattacaaagttcgatgaagaagaggtttgcggttggctaaaacaacccgtgagatgacatccacgagagaatagagtgatccggcgatttacttaataattctaagaaggtttacacgatagttagtttagtttcctaatttgataaactgctgttatttaaaatcaatccaatgttattttctgttccatttagatgtagaactaactttgagaaaatatgttcacatataaaaaaacaaaggaatctaaattatgggtattataaccaaaattaaacatgaatgaaactaagatgtgaacatatgaatattttagagtagcagaatcatttgattttccggaaaaggctggatataatgtttataaaagtcaataataaattttgtcctgaaagaaaatatctttttttttttagcaatgttaggacaaaaatatataaaactcaattaaaataacatttggaacttcttaaaaagaaaccaataacaagaaaaaaataaaacagtgatatatatataaggttttactgtgcatatatctattttataccttcacagtaactattattcaacatgctttaacgccaattcatttcataactataaatatttgcatgatcaactatgaaactgcttattaaaacaaaatgctacgccaaaaattaggccataaatgttttatagttttttatgggtttttagtttttggtttgtagtttttggtttctgatttttgtagtttttgatttttgatatagattttagtttttgcaaaatattgaatagtaatttgtttagtttttaggtttttgacataattattatttttcaaacgtttttagttttgaataatttgataaatggtaaaagtaacatttaaaataataaacaaaattgaaaaaaaaatgtcacgtaaatgttttttaaaacctacaaaatttggtttttggattttttgaagaaataagcaaaatcttctaaaatctggtttccctattttctaaaaatctactttttttaaaatcatgaattgataaatatttagtttttgcaaaatcaaaatctaaaaactatcctaaaaactgcatccattcaaggccttaatttgcaattaccactcttttgaattgcgctctccaactagaagacgtctccaagtaaaacgatttactgttacaaaccaaattgggttttccgaaccaaaccagaatttgagggtttgagttattttctctaatttttctaaccaatattactgattaaaccagattttacaaaattgtacaaacttttcttaaaattttttcaaaccaaaccgaacctaaattcttatggatcttagataaataaccgtatgaaattaaccgataaccgaaccaaattttgattccgttttattaaataaccttacctcctaaccgaattactcaaaaaccgactatccaaattgaaccagaaccgttcggtccaaagtcgtaggcctataagtagtaaatgtagcatactatcttcttcggaaatttcaatatctccaatcaagtttaaattttgattatcaaaggctgaacaaagaattaatcattggtatgttcaactacactacagttttggagaaatatcaaatcatacaatcttgatttcattgattggaaggtatagtaactagtacaacaaaaagctgcagctggctatagaactgtcataaatatcgtagtttgactagattttagttttggattctactcagaacctcattttgtcaatttggcttaaatatacacgaaatattctcatccaaaattataaaggaaaatatttgtatacagaaaattacatgaaatatttgaatactagacgctttttttttctttttttgacaacaaataaaatggactatgaaacgtctttcatttaaacaataaaagttacaacaaaaacatatatgcgcggaaaaagataacgcctcacacttaaacaaaagattgaaacattgaacccttaacttgcatacatgcatgcaattattcaaactgtgattattttaaagagtaaactgtgtgcgtcgtatgtgtaattgatatccctcaagcacattggaaattagacggaagccttctgttgcaaacgttgagaagaacactgagagatataggaacgttaaggttgatgccaagaacgttagccctaagagcagtgcataggcaaaccgcagcgtcaaggtcaaccaaaccttgaatgagtgagcagcatggttgaggtgatggctgtcccaactgcacgttaagtagaccgcttagcacattcgcacatacaccgagtctgagagcatcgataggacagtttccggatgaaccaggggttctcggaggaatgactggcgtagggttaggacttggtacggaaggacttgggaccgaaggagttggtacggaaggacttgggaccgaaggagttggaacatatggacttgggaccgaaggagttgggaccttaggacttgggaccttaggatttgggagcggcctaggcttaggactcgggttgcatctacaattagtaccagcggttaaggtgaaaaaaaggatgttgagggcaaagaaaagagcaagagaggctgagttctttgaagccattgttatggagaatgtttgagtgagagatgaagaaaatgaagagagggtgtgggtatttataggattttagaaggatgtgatcatatgaagaggaccaacttgttttacttacagaacaattcattaatgaagtcatggcctcattgcacatttcaattattatttttagggctgtcaacaaaaattaattgtttaccaatagtttaataaaattacgctttttatcaaattaaatgtttatttctttaatcaaattaaatttttattttataattaaaattacattacaatattacgtaaataaaaataaaataaaaagtaaatacatttttgtttaaacatcaatatattgtttcgacatcatatggcaaagtgagaaatgagatcctttaaactagttttaaagatacagttatttttagtgtatatataaaaaacatatatatataagatttgttttgatataaaatgaaaacatataaatttatttctagtataaaatataaacataaaatttgaaggatcacattataaacaaaaaatattccactactccaaactgaaggataaattgggttaccctaaattgttccttactccatatttgttcaccacaatattaaaaatatgtcctttataaatgagtaatagttaaaaaaatataccattgaaatttctctccaaaccggtcgtaataaacaacccaaaaattacaaatcctggttgaattttgatgctatgttatgtatacacagggttcactcgatcgatagtttagtttcctactttgataaagtgatacttaaaacaaaactgattatactgttctatcaaaatgtaattctaactttgagaaaatatgtcatgagcataatccaattaaaaacatgtacgatgtgaacatactcaaaatatagagtaacgcaaaatcatttgatttcccggaaaatgcagatttaatgtttcttaaagtcaatagtaatatttttgtcccgaaagaaaaatctcatctttttagcaatgctaggacaaaaagaaaagcaaaaaaagatagagctaatatttgcaccgaaagaaaatataatcgtttcagcaatgcgaagacaaaaagaaaaacaaaagtcaattaagagaatatataacatttggattcttcaaacgaaatgaagaacaagaaaaactaacacggtgatatggacacatttaatagtttaatatatagttttaaagaaaatcatacaaaaagttatatttattatttcaagtggttatctttccaccacggtcgtacgtgggaatagtattaagagtattatatgaatgtatttatttgggagtggactccaagatttatactgaatgtaaattttgagtttaaatttagagttgaggtcagaactcaactcaaagacgtgtttgttttttttggctaatttaaagacatgtttgttgtagtcggctaagttgagatagttattttaaatgaattgaacacttaaaacattataatagtattccatatttcgcgctgatgttaaaggatcgtcatgtttgtttattcgccactaatatgggtcgtcttgtgtagacgttacgttgacttgaagatcacaatttttaattgtttgatagatttacgaaaacgtacatatttatcggcttttatctttggaagtatttttcatacggattacaattaatggtcctgattaaaagtcagccctactatcactagactaatccaatcacacatttttattgtctgaatttgtaaagaactcaatttcagaaaattcgaaaatcattgacaaacagaaacgaaaatgaaaatgtggaaataatttttgatccacgaagaatttgattcttttttgtcaattattataaaaattagaacggaatccaaaccggacaaagaaagttttcataaagagttctcatgaagaaacttattataaacaagaaattaaaacccttctactttattatcacaatcactaactgaataactgttagtacatttgatcaacctaagtctttatgccaaacttgtgattagacccaaaaatcatttttaacactacagtaacacagcttacgccatgtaattcataatattttaaaactacctaaccaaggtatttttttaaaaaaagtatgtaacgagacatgcatgaagcagatatatcaactaaaaggttgagaaaatgcaactaaaaatagaccaaaacgaacaaataaatataaattattgacataattgccaaagataaaaattaggatgtgaacgtactcatatattttagtatattattagcgtaacgaaaataaaccattgatcttcacacgaaaacaggggctcttacttaaatgtcaataaaaaaatttgtcctcaaagaaatatcacattttcaatgatcctaggaccacaaaatagtttaagctgacaataaaaaaacaacacattatttcaaacttcttcacaagaaacaaagagcaagaaaaattaacaacgtgaagtggacacatactgtatatgcatatggaagaggatttgtaaatgagcaacggaatttgattgggcagctatttattacttttattgaggttttacccgactgaacatcagtttcaatttgattctagatatttcaaattgttttatttccaacaaggttgtaagtagtagtaaggtcttcgaaatatttttaaataagtcttttctagtttgctacatatttgacaaacatagttttttaaataaataaacaaatgagaattttgcatatatatatatatatataatatgtagcaaactacaaaagaattaatatgatttaatttctatttttcaagttagctactatagattttaaccttatttatcagtatttgtttggtttttttagaagtcaagtggttttaacaccaaatttgttttcctctcacttagtgatgataatcgaacccaccaaatagtttttggtgacactgaggatttaacctggcaaataaactctagttaatctatcaagttgattagatttattttattgcagataattattattaatatattggagccataggactcggcttctctgcttccagaactgttattctagcttctaagcatgctctagtttggctgagagagatcctataagttctggtattcgttttttatattcagttattaaaaccttagattatcgcaatattggttactttttatttcttttagtcattctttgcgactttatttgtatatagatatatctttgcaagagtactccaaattccccagtccccactgcatgtgaccacatacgtaaatttaattctgtatcatagtaactaacatttacgttatcacaatacaatccgaacataacccttcgtacattcgtatcaccgtgtgcatgttaaaatataaattttccacaatctagaattcgattttcatattcagttattcaaaaccttagattgtgtcaatagtgttttgttttatttcttttactatttctctgcgactatatttgtacatagatatatctttgcaagagtgatcaaaattcccaccacatacgtaaacttaattatgtatcatagagcttaatgtaactaacatttacacattatcacgattcatatacaatccgaacataaccctccattcgtttcatcgcatgcatgtcaaaatagaaataacccacatgcaagaatctgaaaataagacgttgcttacaaaacttctttcggtaaataggttgaaaatagagaaatatattgcttcacaggtatacaaatggcgaagacgggaaacgtttacaaaatgaaactataaaactctcacatgtttattctatcacttaaacaaattcaaactgaaacattaaaacctaccattcatgcatttattcaaacagtaatgattttaaagagaacactgcgcgcatgaagagtatggatagccgctgataccgcttaagcacattggaaatcagacggaagccttctgttgcaaacgttgagaagaacactgagagatataggaacgttaaggttgatgccaagaacgttagccctaagggcagtgcagagacaaatcgcagcgtcaaggtcaaccaaaccttggatgagcgagcagcatggttgagctgatggctgtcccaactgcacgttaagtagaccacttaggacattcgcacacacaccgagtctgagagcatcgataggacagtttccggatgaaccaggggttctcggaggagtgacaggcgtagggttaggacttggtaccgaaggagttggaactgaaggagttgggactgaaggagttgggaccgaaggacttggaatcgaaggacttgggtacttaggactcgggacctttggacttgggaccgtcctaggcttaggacttaggttgcatcgacaatcagtagcagtggttaaggtgaaaaaaaggatgttgagggcaaagaaaagagcaagagaggttgagttctttgaagccattggtattttctttagtgttttaaggattattgattgagtttgaagagagagatgaaaagaaatgaagagaagatgtgcttatttatagggttttagaatgacgtgaagaggatccaaattgtttgactttaattattatttgaatatttataattctacaaaatatctgattttttatttgctcatattcaaaatctgactttcttttcccattctgtagatacgtagaacctcaaagtaatttggaacatagtaatgcatgtaaattaagaaaatatttgattcgtgcaattttttttttgtcaatgctgttattattacctccatcatcagttcatgacctcattgtacatttttatagattctctttcgctcatcccgtatagctattttagttatttaagaggagataaaatctcaccatacaaaatggtatatataataaatgaatatttcgcctttatgtatcctgttatgcataatctataaaaaatgtacatgaatcaaagtatataatctataaaaatgtagttgaatctacataaaatttatttttatttctttggtctaaaactacggattgggcagaaaacattcttgatgggacaattcaatccagcaaggaattaggtgagactcttctgcccatttgttaaaattctttagttactattctttggatctgagatgtacaagaggagaaaattaggttatccaatgaacccaagacccactctattgaccatataaaaaaattcaaaataatatgatcatcttaaaacaaaaattaagaaagtagatacatcgaaatcaaattactacaaaaagaatccatattttgcggaaatttatcgcaaatggaaaacttccgactcacttcctacaaaattaaattcgttagctgtaaattatccgtcaagaaaaaattatgaaagtagatagatcgaaatcaaatatctacaaaaggtattatgtattttcgacaactgtatatgtcaaaaatttatcgtaaataaagtaaactctgactaatttctaacaaaattaaattaattagagtttactgatccaaaactaactatgtcagaaatttgtcgtaaattattgatgaaattatcatcgaaaactcgtatgtcgtaagaatattagtcagaaacttccaacgacattcatatagttaaacctgcattgataaaaactggacatatctttcaaaccgaagatgaattactataaatatttacatcattttttttttaatctaatattaaattatattcaaaagaaaaataacgtttttacaattagtgcaacgggagtttgaagtcctacacaatactaaacttaaaattgataatcatgatgatgagattatgatcgactttgaagccaagcttgaaaacaagtctcataccacctatcctttgaccttttgattgttgtgaattgattgcggacttgtgaatcaatccatttgattaattggcttggagagtttgatggtttgccatgccaccttccatttctttccctccaaatggtatagagcgttacttgaacgacgtatttgaggaggaagatgtctactcgactatgatgatgagcttcgacgtaggatagaatcgcgaccaatcagtagaaaaatgtgttttgaacacgccttttgcaagcacagcccaaacctccgatgcataagtgcaggagaagaacaggtgccgcatcattttgtttcttgcttaatatatatctttgggttggtttctagagttcttcattagtttgacaaattttatgtttccgatttctaaatccatctagacaaaattactattgtaattttactttaatgattttaaataagaaacaaagatttatttgaaaaatatatgacaaattattattgacgaattctcaatactacacacacacatgggataattagataatttagttttaagaattaaaaaaaatcgtgtaaaagtatttctaaaaaaataattatggccttgatttatcttacgtaggaattttacttaacaacacttgttaaacatgtttacgtgaacacatgcattaggggtatacctattagttttgcaattcttttttatttggagttttagatatttcatcattcaagtactttgacaaaaaaaaaaaaaagtcatcattcaagtacagttacatctttttttcctttttaatcaaaaattacagttacgtcttataaaaagaattccagggttaaacttacactagttggatatagattgttgctctttagaaaaaaaaaagaagaaatacaaatacgattctttgagaataaaagtggaaacaagaagcttattattactttaaatatcagattgaacaaattgataaaaatggatacagtacgagaagtataagaaacacttaactgaaaataggagaattcaaagaatcttaatcaaggaaaaacatcaaaagataacttaaacattataatcaatcgaagggtggatagatatatcaagcacatacgaaaccagaaggaaccttcttgccacaaacattgagaagaaggctgagagagacgggaacattaagattaatgcctaaaactttagcctttagggcggtgcagagacaagcggcagcctcaagatcaactaaaccattgaggagcgaacaacaaggcttcactggtggtgttcccaactgaattttgagaagatccttgagaacattggcgcaaacgccgagcttgagagtgtctttagggcagcttccggtggacttgggcttaggtttgggtttaggggtggaactgcagccaccgccacatgcggtggttaaagtgaaaaaaagaatgttgaatgtgaggaaaatgacaagagaggctgaaatttttgaagccatttctcaaaaaatcaaatttctattttaggtaagaagttttaagatagaagtattgccaaaagagagtggtgaagataaatgaagagagggtgtacgtatatatattagggcttcaaggggttggacagttaattaaagctgtcattactgtataattttgaagaattattagacaaatttatattttagtaagtggatctttgtattattaagtggttaagatatactttatttttttttattgcattatgaaacaaatgttaaatcatggatagatgaccctgttgggcagtcatcgtttttttctttttcaaaacttttattagtttagtagttagaaagtttttcgttagtcatctatacaaaaagaagaaacaatacatgtttttttttcctggctaaatataatagatggtttttaactttaaccaatccatcttttatttatgggccatatatatatatatatgaaaactgaaaataacgttttgatgtgaaatataccaaatatacttatttagtgcagagttaacatgagataatatgtatttctctttagttaataaatgatactagttatttagtacggagttaacatgagctaatatgtatttctctttatttaatcaatgatactagttttattgtaaagtagatgcatttacaaataaaagtattgctcaaatatttcaataatgacttttaatacagtatatgcattttcaactgtgaacactttgaaaaataatggattttacattccgttcgactttatgttttcttaagttgattcatattatattggttttgacgttcgactttatgttttcttaagttgattcatattattttgggtttgatctattttaaatccaaaaaattacattttcttatttgatttcttaaaatatttaacttgttcgagcgtctattaattttttatgtgagttgatttaatattaatttagaataatttgttctaaaacagtcgacaatgcttttcgtaggtaaaatttgtataacagctgaattatttagaatattcgcttaaattcataatcatcggctgtattttcttatttcaatctatcttttgttttttttttattttatgaaccttaattattaattttccgttaaattaattgtaatgtaatttgtagactcatatttaaattagtccatgtaatatatacattattttggtcaaaaacaaaaacacgtaggtacacgattaggtcgacgtgttagtttattcgactgaaaacaactatatacttatcttattcgaaaaattatagaacaaaataaactataatcgacgcacatgtattcaataattactcatacttcccatgtgttgtgtagcccagaatgtaaataataggcatgtgtttggagattagtaatttggaagtttattggctttaattacccttcacattttatttttgggaaattaaaaacaactataattcatcaaataacaacaatattattcttttttttttgtcatcaacaatattatgcttatcttatgacaaatatagctttgggttcttggacactaacttcaggtttcaatcaacatggagtaaaccattaatcatattctaattaactgttcgcattttattaacccttggtagtttctcgacgcgctaagtttacaaaatatggatttcttctattggcgaactccgtctccgctaaaaaataaaaaaggatactacagttttcaacgaattacatagtttctatggaaaagtttttaaaaataaaataaataaccaaattttaccaaagaattatactggaaccctcagattttttaaatcatgttattagcgatcatttagtttgggtggcagctcaaatcagcccaactaaggatgtcaaggaattattgttctttaagatgtcaaggtgatggttcgtggaaattataatgcctcggccgtaatcgtctgcggccccacgttttattttggcaagtagattcgaccccgtccgagactattttgggaggctcgaaagaattgtttattgtccttacttatcgccactaaatatttgttgtgttttttcttcattaacacggtacccaaaattaatttcaggcaggtcgaaccatcatgaaatatatatagttcaaacacgtttcactctaccaaatcaattttaagtctctttgtatgcatcaccaaattgttttttagaaaagagttgtgttaaaacctcctcactagctcacagatcacattattgtgtatcaagacggttactccaacagtgaattagtgtacgtgtctccacactcgtccggttcggctctaatactagttgttacgctttccatgccctctctcaccatgtggattccattcttgtccaacagatggtatgtatatttgggagacattgaaagacatgtttaatgttcctccttactcatatggtatttattatttaacattgttttcatttggtcacatatcctaaatatcgcaatagttccattacgcttaactataaaattttatcgaaacgattaacggaaaatatgcgtatatttttgtgacatagataatcaatcaattattttaaacttctttgaatgtatcttaatatttttaaattcgagggattacattaatcttcttaccccaaatctggttttggatggatggagaactataaaactttgaacagtttgagaaatcatagtttgcatttcaaataaatggactgattaagttatatacttgtcccttgtcattttcgttttgagatttgatataagtatttaaggaacatgtttgaattatttattttttgtcaattaattttgaattgaaattctgggtacagtatagagtctaattgaaaattcatgattcttgatacggtattagagtcttaacaagccaaatagataaaattggttcgaacagatgattaagttcggtattagatgaatgagccaaagaaccatcttctcgaaatgatatgttaaaaatccactagtagataaagattaatattagtaatttcaactattaccgatttgtttttatttagatcttcaggtatttctcattgtctatttttatgtatcaaatacaattcttatattttttccatcatttgagtattgttaattattataaaataattccagggctacacttttctagtatgtatatttcaatcgatagatcaggtagacaaagattcttgctctttcaaccgttaaaataatataagtaaaattaatgttagaagaaaagtcgaaagaagaagcagattataatcactttaacaatcttatttctgagcaatttaatttaaaatgtaaacagtacaagaagtagaaacaacactgaaaatgggaaaattcaaagaatattaatcaaagaaaaacatggaaagaaaatttaaaacattataaccaatcgaagagtggatagatatatcaagcacatacgaagccggaaggaaccttcttgccacaaacattgagaagaaggctgagagagacgggaacattaagattaatgcctaaaactttagcctttagggcggtgcagagacaagcggcagcctcaagatcaactaaaccattgaggagcgaacaacaaggcttcactggtggtgttcccaactgaattttgagaagatccttgagaacattggcgcaaacgccgagcttgagagtgtctttagggcagcttccggtggacttgggcttaggtttgggtttaggggtggaactgcagccaccgccacatgcggtggttaaagtgaaaaaaagaatgttgaatgtgaggaaaatgacaagagaggctgaaatttttgaagccatttctcaaaaaatcaaatttctattttaggtaagaagttttaagatagaagtattgccaaaagagagtggtgaagataaatgaagagagggtgtacgtatatatattagggcttcaaggggttggacagttaattaaagctgtcattactgtataattttgaagaattattagaccaatttatattttagtaagtggatccttgtattattaagtggttaagatatactttatttttttttattgcattatgaaccaaatgttaaatcatggatagatgaccctgttgggcagtcatcgtttttttctttttcaaaacttttattagtttagtagttagaaagtttttcgttagtcatctatacaaaaagaagaaccaatacatgtttttttttcctggctaaatataatagatggtttttaactttaaccaatccatcttttatttatgggccatatatatatatatatgaaaactgaaaataacgttttgatgtgaaatataccaaatatacttatttagtgcagagttaacatgagataatatgtatttctctttagttaataaatgatactagttatttagtacggagttaacatgagctaatatgtatttctctttatttaatcaatgatactagttttattgtaaagtagatgcatttacaaataaaagtattgctcaaatatttcaataatgacttttaatacagtatatgcattttcaactgtgaacactttgaaaaataatggattttacattccgttcgactttatgttttcttaagttgattcatattatattggttttgacgttcgactttatgttttcttaagttgattcatattattttgggtttgatctattttaaatccaaaaaattacattttcttatttgatttcttaaaatatttaacttgttcgagcgtctattaattttttatgtgagttgatttaatattaatttagaataatttgttctaaaacagtcgacaatgcttttcgtaggtaaaatttgtataacagctgaattatttagaatattcgcttaaattcataatcatcggctgtattttcttatttcaatctatcttttgtttttttttttattttatgaaccctaattattaattttccgttaaattaattgtaatgtaatttgtagactcatatttaaattagtccatgtaatatatacattattttggtcaaaaacaaaaacacgtaggtacacgattaggtcgacgtgttagtttattcgactgaaaacaactatatacttatcttattcgaaaaattatagaacaaaataaactataatcgacgcacatgtattcaataattactcatacttcccatgtgttgtgtagcccagaatgtgaataataggcattagtaatttggaagtttattggctttaattacccttcacatgttattttggggaaataaaaaacaactataattcatcaaataacaacaatattattctttttttttgtcatcaacaatattattcttatcttatgacaaatatagctttgggttcttggacactaacttcaggtttcaatcaacatggagtaaaccattaatcatattctaattaagtgttcgcattttattaacccttggtagtttttcgacgagctaagtttacaaaatagggatttcttttattggcgaactccgtctccgctaagaaagaaagagggatattacagttttcaacgaattaacataacattttaaaaatcgaggtattacattaatcttctgatgccaaatctggttttggatggatggagaactctaaaactttgaacaatttgagaaatcatagtttgcatttccatatcataaaatgcatagtttgcatttcaaataaatggactggtttaagttatgtaccattgttcgtcccttgtcatttttgttttgaaatttggtagaagcattttaaggaacatgtatgaattattttttttgtcaattaattttgaattgaaaattcatgattctggatacagtatagagtctaattgaaaattcatgattctggatacggtattagagtctaacaaaccaaatagataaaattggtccgaacagatgattaagttcggtattagatgaatgtgccaaagagccatcttctcaaaatcatacgttaaaaatcacactagtagataaagattaatattagtaatttaatctattaccgattagttcttatttggatcttcaggtatctcacattgtctatttttatgtatcaaaaaaaattcttatattttttccatcatttgagtattgttaaatattataaaataattccagggttatttcaatggatagatcaggtagaaagcgattcttgctctttcaaccgttagaataatataagtaatattaatttcggagaaaaagtcgaaagaagaagtaaattatgattattttaacattcttatgtctgagcaatttaatttaaaatgtaaacaatacaagaagtaagtaacactagtcattgctatataattttgaggaattattaatggaatttattttttagtaacaatagtcaatgggatctttgtattattaagtggttaagatatactcatatttaaataaaattgttcaatcatggtgttatagaagaattttaattaataacacccgattatgctgtcttagttgtatttcttttttaatcccttggtaattaaaacgtttttcgttttatgtatgggaaatttggaaatataacatataaaaaattataaattaggtaactagccaaaaaaacaattatatgctattgtgcgtataaagtatatcaatataattttatccttttaaaaatcattactaccaccttttccggccaccatctccgtccaccatcacgtccggccaccaccaccgtccaccaccacgtccggccaccaccactttcgatcaccaccacttccgatcaccaccacctccggccactacttccgaccaccactacctccggccaccaccacttccggccataaccacttccggcgaccacaaactccgatcactaccctcagccaccatcactccgatcacaaccacctccggccaccaccatctccggcaaccaccacctccggccaccaccacgtccggccaccaccgcctccgtccataaccacctctggccactacaaccggccaccatcaccccaggccacaaccatatccggccaccacaccatctctagtcaccctcaaaaaagccaatttggtcaatatactactctttatggttagttattatattttttgaaaatatagtgttagtttattaattattttaaaaagtgtttggtttgcaattcaccctttatgtatcatttttacataataatttcaaaagattaaaaaaaaaagaacttgtagtaacaagatacatgtttctttttccaacaaaaaaaaaaaagatatatgtttcttttgttggctaactaggatatgatccgcggtataccgcggattaaatatttcatttatttttctttattataaaatataatttgtcgtttctttttgtttgtggtgattattaattatcgataaggttgtgtatgctttttattgagtcataattatgatattagtaaatctaatatgtgttattttatcttctaggatttgacttgtgatagactataccacgagatcatattttactttttattcataatatatttttaaaaagattatataatttaaatttttggtgttttcaaatttaacatgtggaacatatgtaatttagtaattttgtattaaaattacacattaaaatgtatcaaagaagaataacatttaggagtgtcaaaaaagattaacacttatactataatgttgattttatgtattttttgtagctaaaaaattaaaattgaaattatatttgttatgttattattgtttgttttgttaagtattgtacaggtgtaatttgattgttaattttaggagtacacccaagatatccaaatttgtctcatctaaactcatagcaccatataaactcgtctcatccaaactctttctaccatgtaaactcgtctcctctaaacccttcctgccacataaatccgtccagtaataactaaaaatcaaattgttcttttttttttaataatatttttatttaatatacttccagtcaatttacaatttcaatctaataagaaaaattgtatactatattgaaattttaacaattgtatactatattgaaattttaacaatttcaatctaataagaatcaatatcggatcgttttgaagattttatatcgaattctttgaacaaaagataatgcaatctcttattttaaccgatgtaagacattgaaccaacatattttcatcaattggataatatttatatgtgttttaaaatatagaatcacaatatatgcgggaatgttatgaatattagatggatgcccattataaggcccatcttctagatcttctagatccttctagaatagaatattctgtaattatcctgtagaaaccctaaccttgtactcctatataaaggacctttcattcattgaaataatacacacaaatcttcctcttcttcttcttcttttctaacagggaaatgtttttgtgggatttgttaaaatcttttttttaatgcccctttgcaacaatttcatctcattttcaaaaatacacctcttatatgctaaatgactaaattattcttctattattgagtgaacataatgagaaaattaaaactattttggcaccaaaaattttcaacttttaaaaattttctgccagaatttattttttctcgccgcacctaatgtttttttctaatagtacaaaaatccgtcaaaacagtctctgccaaaatttcaattcaaaaatctttctcaatcttttaaaaaatcttataaaattcttgtaaattcttataaaatctgtgtaaaatcgttaaaaacacttgtcaatttttttaaagccttttaaaactcttgttaactcttttaaaacaattgtaaatatttttagaactctttaaaatcatttgtaaatatattaaaacttttataaagtctttaaaaatatttaaaaatccttttaaaactcgttaaaaactgttgtaaatcttttaaaccttaagagctcttgtaaagtcttataaatagtttttaaataaatttacaagagtttttaaatggtttaaaatctgtaaggcttatttaacgtttatatgatttaacataaaatgaatagcggttggaaagatttatgcattgttttataaaatctgtaatcacagttaaacgtgattatcaaaagaagaattaaattagatcgatgcacatgtgttcaataatcacctcataattcccatgtgtatccccgtatgtgattgaggcttttagctggcgattatgttcaaagatttgtaatttggaatttagtaaccacaaagtctgactatcacaattttcttggctttttatccttcacgttttattcatctataagactttgaacaaaagaaaaaaaaaaaaactttgaacagattgctttcaaaaatcaataaatatgaaccacttattttcacatccattattcatggagaaagggctacagaatttaacccaaacaaacaaataacactaattatataaacataatgtttagtaatattttgtgttggtttgaaatgtaattgatagccaagatgaattatagtagttcattaagttttgtagtttgggcgaaaatatggatcgactacaagaaaagagaaaaaggttcaacagcaacgttcttagttccatgaccggaatccattgttaacgttattagtcgacacaattagtaaattgatctcaaacaaacaaaaattaaaaagaaaaaagacattaatagtaggaaaaaaacattaatagtaaaaattaagtgcttgaacagtaaactttttgttcgctaattatttgtcaatttgtgataggttggaataataaatgttttcaattactgattcttttcaaacattatttattttgtaattttataaactaaagttaagtttttaatttatgtgactatgataattatatattagatgtgagtatattcttttgaaaattatattagaaaagtttaggtagtgagttcagacaagtacttgaagtttttttttgtgtgcaaacaattataagtatatatatagttttgatttgttcccttaacagtatttccctataaacgattatgtctagtgtgtataaaaaagtacaatactgtatgtatgtatatatatcgcatcatcataaaagtcttaattttacttgttatttgcttatacatgaatttaggtttgaaatttggatgttagacaaaaccaattcaagaacatagatagaaaatatgaatatattgtagctatgttgggcaacggaatccatcaggaagggtacctccacaggcgttaagagccaagttaaggtgaataggagtgtcgatggtgatgccaagaaggctgagcttgagcgcggtgcaaaggcaaacagcaacatcgagatcaattagaccaaagagaatagagcaacaaggcctcatagctggtgccccgagcttcaagttgatgaggttgagaacattcgagcatgtcgaaagtttgagaacgtctcttgggcaagtattgtctgcgcaactcagggtaatgaggttgaggaagagaatattggtcacaaggaataaagcaagtgtagttgaggtctttggagccatactcatcccgatcttttgttttcgatctttctatatgttatatgtgtatgtttgttactttgagttatgtagcatatatagatatgatgggagatttattgtatttatagtgtttgataaggtttagtatattagggtaatattaaatttaggtattttggataaagtacgtaaagttaattaaaatatttatctccttgttaatttttaatcttatagttagaattctatatgagggtccctaatctagataataaaaatagtgcctaaaatattattcggtcgaaaattccctagaatgcagagagataagaaaaatcaaatctaattaggtgttcttgttcagttggtgacaagtgtcgacttgaaaatgacaatgtttgtgttctttgtttcatagacctactactatcaacaaatgagatagtagtatatacctttgaaacccctaaactattaattaaggataatattaataagaagtggaagaattctagcagttgtttttaaagaaatacatatgaaactttaggcgagatatgaggttcatattagttcatatatcgttagtgacccaacatttggtattattctcttacgctaataagagtagacagacaatgaaaagcgtttgttatgctcagttccgatatgagtacttgataaggttttagagccacaaactcgcccttttttgtttaaatttggattattacacactacacagagactttagtacaatttgagtaagaagagccaagacaagacaaagagtgatttcatgttttatcaaactgaattctgaaaaggagtgatgaaagtcgaggaaaatgccgaattggttcgctaaacatacctaaatgtaggagccattttaaaccacatatgcaaataaacataattttgaactaccatacactgccaaaaaaaaaaaaaaaaaacttctatatataatcatgtcaaaaaataagtttctgtggtaaaaataaaataaaaatcatactcacctcacttaactaaattagtaagaataagcttgtctccatagataacccataatgttttctcttctaggattaatggatctcgactcgaatcatcgttaacgcggtaactcaattttggggttttaaacagaatttgatactgattatcagatttatctaattttgaagatcttaaagagtttctgttgaaaatcgaagaacacaattagtttgatgtgtttgttgtttgatcctctctagttcatttcattctatttccacttcatttctattgtcttctaatataaccaagccacaatatggtaaaagaaagatacaagagtaaaactggcaatattacaaacacagaacttatagaccatatacttatagtgctttgatcatacacttaactcatgatcttcctcattgccactcacttcttctaacatttccatgaaacatttcttattatttcctctcactgttgttgttgttgtcatcgagttgaaccgactgtcatgaatcgttgcttcttcaaatcttgtccatagctctttcttcagagtactctcacctgcttttgttctgtttctcgtcattatgctctctggttctttaaacaatggagtactctcaaccaccattgacatgcttccctctaagaaaacagtagagaaagtaacaaaactcatcgatatggagtattcataagactcaatgaaatgaccaaaacatcaactttttttatacctgtagtgtgttttgcttctggtataatgtttggaacatcaaaagatccaccagtttcatcaattggtttcttctcattcacaggctccattaaaacacatgttttaggaggagaaaaccaccaaaccggcgaggattcaagatccgtttttctagttatcggagcatgttgtattcccaagagctcaggatacttcgagcagagattgtctgttttttcaataccagatgatcccaattcagagcaggtagacttacaagccccttgctttcccagttgagaagattcaggaaccggtttaaacattgtacacgatttcggaggcgacagcttcaagcaaggtgtcattagaagctcagacagaatctttctcctgagaactggtgaagaacatggcttatactcaaccaaattttcagagaaatccatggcatggactaaagatttaccaagtcctgcagttttcaacgactcacctcctaaaacatcatcacttgtttctttagaagcttcaagcggttcatttgcaacagtgtctggaaaaatccttttagctgtaagcttagatgcattctggtgttttaggaattcagattttcctaagggtagtggtgtcaaaagaaagagttgtctacccttgtctgcgttatgatcaccacgccaatgcacaagaggagaaggagagactaagggctcaaattgagtaggctcaggactctcaacatcaaacaaatcttcttcttcgtttgtgctcatcaaagactgttcttcctgatcctctggaagcaactgaaaatcagacatcgcttcttgcaatcgaggaaaccatggctgcatacgtaaaaacaggtttaaaaatctaaagcaaaattgtcaaacactataaggaaatgaaacaaagcacacaataggtgtaaaaggaatgaaacctttagtgaggaaagcatatcagacaacacagttctgaaagattcaacttctattaacccgtgcttgctcacggtcttacgctttgtggcttcaacaacaagctcatcaatctgacattccaaaatatgattccttaaagttaaaacacacaagctctcagataaagtttcaaaaaggaaacatctctaggtaagagaagcaagtacctggagaagaacagatctaatatcagaatgcacaaggaagagttgatccaattcacaatcattgtattcttcttcttcttctgcatgtaacacttgattaactgcaagataatcactcactcactcagagaacaaaaccatctccaaagatgtttgatttttgccaaatttccaaattgaacaagaagagtgtagatagagatatacctgtatctcttctggttatataaggttccatttcactatctagctttcactatgaattttgtaataatctggatctggagagtcgcaaacaaacagacaaacaaaaaacattacaaatcggtatctagatatcgcgtgcttcttcaattgagaaacaaaattatccagatttcgaagaaccaaaatctggtattcaaaaagggatttcgaaattgaaattgaaaacgatgatagagagattgaagagaaaggacctgcttaaacggagaattaggtcaagtatatgttgagttaacaggtatggttaccggtcggcggcgagagtagacgatttcaattgcaccgtcgttagggtttttgtagaagaagacgaagagcgggattttgtatttttcgaatttggggtttcaagtttggagaagatgaaagacagagagaaactacgcgaaattaaatgtttttttttttgtcttactataaaaataatttatataagtgattgggctaaagtttaaagtggcccgccctgtaattaatattatcaatgaagcccaatattatggttgttattacaagcttgatctgttacgtaattatggttcaactatgatttaatctacggtacatttttaaagattatttctataattatgtattaatattatggttatataatatatatatatatatatatataaatgaatgaaattgtgttattttaatagtatttacattttataattacattttcatattatgattagataaaaagaacaagacgttttttcagtagtagtataatattgctctaatattgctgcaatcttcgaatgagtatgtatgtcgccacaatattccgagttggaagtactgttgtggggtgggttttgatcgttgaataaaagacgtatgttacattctttacagactgctctggattggtgaaaatgttgtatacaccgatcaaatggccatgttttgaaacatacttagaagatagtgaagaataagcgtgagttaatttacttttttattttcagtttttcgtaatgccaatattaatatgtataaattggcacgaaatgcatgtatatatcctacactatatttatatatatatatatatatgtaaataatatttctccaacttgactttttgagccttttaatattaatgaagttgttggtaaacaaaaaatagctacattttttaatgatatggtactaatcacacccataatattttaggtctcgtttttctgatgtgggattttcaatgaaaatgatgatatttctagctattcataatttttctatgaaaacctaagcacaaaggtcgtttggtactatcggttatgtgataatgtgaatcaaatatttgcaaatcccataagtatcgggtcaactttcaaaaaataaaattacacagatgattaaacttggtttcagttgatgattgtttctgatcattgacgattttatgccactattatatgtattgtggtgaactggtgatcgatgatattgtggtcatgatcatcgacttgttacttattttttgttagttaacccaacgatttcagatggaaacatatattaacacggtgacataaaaatgattttgttcatcaaggattaactttaccttgatcaacaagacgatgaatcattacttggtttaaagtttaaactaattgaaccatatcaacatctttcattttcacttcttttagaaatactatgtttattaaagagaaattaattataaaattaaatagtaaaacagaaagttagttaagttagacgaatttggattttcacttttgatctcaaatttgtgtcaaactctttttgggacatttctaacgttggaattatacgactgagatatacctctatttaattaaaaatatatatatatccaaactagtctattgtccatcttgtaacccctgatatacagaattatttaataagtccatttgcgattacaaaaacaattatcacatgaaaatgaaatcataactttgtctttgtgtgagagttaagtatattaaattatgtttttaaaataatggttttatataagtcttccccgtgacaaacgggtttgttgaaggggcataagaaatgttcacatggccaacgtgaaagaataaagaacaattgttcctttttcgatatccttagttatgtacatattgggtaaccgaatgttaacacaaatctctatatactatatagacttaacatttggattctgtgccaagaaaacctttatatttgtcaatttttgaaattttaatcatcgtgaaggcccgtacatatatattgatagaattcataaatttgggagtaatgtctaacaaacttataccaccaaattgttagagtaaatattttgattttcgacatgcagttaccaactaagttgttaattagaacaatatatttttagaaattgccacctaatttgaaccatttaagtgttctcaaataatcaaatcatatctataaaaaaattagtcaactaaacccctattaagaaaaatcaacaattaaaaccttctcatttttctcctaatgaatatcctataaatacccactaaacacttatatttctctccaccaatctcaaagcaaattatatacactactacttcttgatcttttgtactatacaaacatatggctccaagaacctctcttgcactcttcgtttctctcaacctcctcttcttcacttgcacctctgcaaccacagggacttgtcctatacagatcagtacttgtgccaatgtgctcaatctagtggacctaacattgggaaacccacctgtaaagccatgttgctcgctcatccaaggcttggctgaccttgaggctgcggcctgcctctgcactgcgctcaaagctagcattcttggaattgtcaatattaaccttcctatcaatctcagcgtactcctcaatgtttgtagtaggaatgctccaaagggtttccagtgcgcgtaagttgaatacctatgacatacctataaaacaaacgaatcatactgatacttgaacatgttttcttatctacttgttgttgttctaaggtttttttttttcttggattgttaaaaatgaacgtacgttctgatgcaataatggaaatggagttgtgtgtataattggcaagtttatatctactccttcgcttcgttgttccttcgtctcttctttgtaattgtgtatttcaaatttgcttaataaaaatatgggtgaaagacctgtgttctcccacaaatagatggtctttccgcgaatgtgaaacaaatgttttttatcattgttggtcaactaagtaggtcgttcgacccctacgaatccgtaaattgaggagcatgccgcataaagtttcatatagtaccacaactacacaaatttcagacctcgttccgagttcacacaaaataaaaattaaagttttgtatcccctaaatcgaaagttcgagacttcagtcccttaaattcaaaatttgtgatttaatattggtttaagtcataaacctgataaatctttggctttcttcttaattcgctgaggcaaagtcgatgaagacactggatttccctttttcttcttctcagaatccttgttcatcatcttcatcttcaattaaagatttgacagtagaagccagttcgtggagcccgagagcatgatgttgttacacaagagtatatgccatatattcttggaggtataaccatatccgacattgtcaagtttattcccagtaccgtcccaagaacttccaaaacccacatgaaccaatgttgattgagagtctttttaaatctcttggacatttggccagcaactcctaatttggacagttggtgcttcgtcgtttggccagccacggttttgaaacctacttagaagaagtagagaagaataagcatggatttttcatcagtttctttatctctagtttcccacaatgacactgttaatggagataaattagtacggaatactcgcgtataatagccacactatattttgtatgtatgtaaataatatttctccaacttgatttcttgaaccttttaaaattaatcaagttgttgacaaaatagctaatttttttaaatatatggtactaattatcacacccataatattttaggtctcgtttttttgatgcggaatttttaatgcaaatgatgactcttctcgcaattagtagttttttgtgtgggtaatatccaataaaaccctaagcatcataagttgtttggtactataggttatgtgaataaattatctttacaaatcccataagtatcgggtcaactttcaaaaagtaaattatctagcaaattcaacttcgtttccacttgatgattgtttttgatcattgacgatttatatcattattatatgtatgtagatgtagtctgatcgatatgatattgtggtgatcatcgtcgcttgttacttattctccgttaaccaaacgatttcagatttatggaaacatatatttatacggtgccatgaaaatgattaatgttcattaaggattaactttgcctttatcaacaagacggatgaacaccacaatatcattacttggtttaaagtttaaacattgaaccatatatcgtagttgttcaaaaaaaactatgtttagaaatactatgtttatcaaagtttagaaatactatgtttatcaaagaaaaactaattataaaataaaagaaaaactaataaaaaacaattaactgattctatagtaaagaatgatttggcatgatgattatcatactattacaagcctgtcgaacgaataactactaaattctagatctatcctcctatagcttctgcccgggaaccatattttggcatatgcgaccttattttataatacgaacatcgtaaaaaaaaaaaacaagaatacacgatttgcctcacacacaaaaaagaatcccactaatacacgaagtttatatgttattgattcagcaaaaggataaaaggtagtatgatcttgcacatacatctcccattcaatataaatcagaaaaacatattgtactaaagagaaatatcgatgatgattttgtcgttattacaccttagtatagatttagaatatatttggatctaaacctcacaatatatatattattcatattggatatggctatcctttcatagttgcaattggccgcatagtattcataatttgtcttttctttaggatgtaaaatttgtattcatccacaaatcattttcagaacaaatgcattcttgttttgaagtttaaaaagagaaacagagcttaatagtaatacagaaagttttttaagttagacaaattcactctatcaatttgacttttgatctcaaatttgtgttaaatttttttgggacaactctaacgttgaaatcatacggctgaaatatcactcccatttaaaaataatattccaaactagtctatctgtccatcttgtaacccctgatatacggaattatttgataagtccaaccatttgagattacaaaaacaattatcacatgaaaatgatatcataactttgtcttcgtgtgagactgtgtagattaacttatgttttagaaataattgttatataagtctgccccgtgacaaacggattaatgaaggataataagatatgttcacatggccaacgtgaaagcataaaaaacaattatttatttttagatatattttaattttaatttgatttaaatattgtacctggttttcaaataaccacatctaaggcgttagctagtaatttatgtcattgaaaaaagccagaaagaaacaaaagaacattcttcatgtaattggcttctgtgaaaaatgaatttaaaaaaatacttctaacaagttgataaataggtctggacataaaaatcggaacccgagtactctaatcggcgtcaacctaacattttgaactgaatcccaacccaaaaaattagatttatcctactaaatcctatattccttatttcttttacttataatccctaacttgaactccatctaaatctgaatctgaacatactctcaaaataagtacatactaataactttagacttgaatatccaaattttttacttaaatacccgcaatataagtacatacacaaatttttatccaaaacctagatatttacctaaattgttttgggtatttgcataatattttgagtatttgtgtacccaaaaagaatcgggtatttaatagttctaaaaatttatacatgattttatccaaactcgaaaaaaccaaaaccgaaatcgaaccatttttatatttaccctattagattttattttatttttcctatttcgaacacggatggttcctaccagattctgccttaagtttcttaatgttcagacctattgataagtatgagttttatcaatgagcatcaagtaaaagtgagagtcttgattctgctttaaaacatgaaagtttttattgtataatatggatatcgaagaggctaattcagatatataaaattacataatacctgatttattagagtccatataatttacataagactttccacgactaatttatatagttaaaatactatatttgattatatttttagtaatcgtgaagactcgttcatatattgatatacagtataacctctataaattaatactctataaattaataacctctataaattaataaattattccggtcccgagttaggaccagtgtaaaaaatgacataaatcgataaattaataagataatattttttttgaaaattctatgtaaatctatggtcctatcaatatcataaattaataattgtataaatgtatcaactatatatatatatatattatgtaaaaaaattctttataatatatttattatacttttttgcttaaattcatatttgttctttgtttgattatagttttcatattttactgtatcaaaacttttagtgttgttttctaaacattattattatgttttacttgtaactggttctagaaatatatattctataatgaaggaaatcttatagaaatttttaaaatgttaccaaattaggaaaatctctctataaattgataaatattaatttatcgataaattaatacctctctaaattaataaaatttcgcagtcccaacattactaatttatagaggttttactgtaattcgtaaattttgagagtagtttttaaccaacttacaccaccaatttattagagtacatattttgattttcgatatgcaatcttgttaccaactaagttgttaattaggaccatatactcttagaaattgccagctaatttgaacaatgaccatttaagtgttttcaaataatcaaatcatatccatataaaaataattagtcaactaatcccctattaagaaaaatcaacaattaaaacattctcatttcctcctaatgaataccctataaatacccactaaaaacttacatttctcccaccaatctcaaagcaaattaaatacactactacttcttgagcttttaaactacacaaacaaatggctccaagaaccccccttgcactcttcgtttctctcaacctcctcttcttcacttacacctctgcaaccacagggacttgtcctaaaaattccatagagatcggtacttgtgtcactgtgctcaatctagtggacctaacattgggaaacccacctgtaaagccatgttgctcgctcatccaaggcttggctgaccttgaggccgcggtctgcctttgcactgcagtcaaggctagcattcttggaattgtcaatattaaccttcctatcaatctcagcgtactcctcaatgtttgtagtaggaatgctccaaagagtttccagtgcgcgtaagttgaatacctatgacatacctatgaaacaaacgaatcataccgatgcttgaacatgttttcttacctacttgttgttgttctaagatgtttgttttttctttctttcttggattgttaataatgaacgtacgacgttctgatgcaaaataatggaaaatggggttgtgtgtacaatcgacaagtttgtatatactcctttactttgttgttcctttgttttgttgttcctcttctttgtaactgtgtatttcaaatttgcttaataaaaatataaattgatgttgtagcttatatatcctctatatatgtgtctaactcaaaaatggtaaccaaacttaacaatgattaaaaagtaaaattatttttttaatataaaactttaaatatgacagattaaacatttttttcttacttttgttaaagttagcaattgtttttaaagatatcttttatcttataaatcacaagtcacctgaccaattacaatttgccagatagattttttaaaaattaacaaaaaacaaataaaatgaaataatgataacaaggaaaaaattaaacatgaactttatcgacaacaatttctggaaactgctcacccatgatgcacgatccttcttcttcgcccacgatctcaaccttttatactcccacaaacatcagacaatttctcactcgatcgaatacaaaatataattctcctcttccttggtttcaaaaccctaatttcttttacagtgaatattttggcacttattttttctctacagtttcaatggttcagagtttcgataggaataattggttttaggggtgagaggaacatgaagtgttgaagacaaaattacgagaggtaattgggctatatttctatatcaacataatattttcttttcttttcagatttttgatatatatcaatacattgaaaagtaaactcctcaactccactaggtgctctttaccgctagaagaaaaaaaatgattcttcgacaatcacaatcaaattcgccaatgaagttgttctccaaggtaactttttcatagtctttttaaaaacaaatatttcattttttctataatggtgggaatagactgaaacatgaagaagcattatgctacacgattgtttttttgctcatcgtggtgtttttcaaattaatatgtgttgttgtaattcatttactatgatttcactttgacatgctgttttgattagcgtatttagtagatgtttgatggtttagtcatgtttgatgtgtatgttatatatcacttatgtcatttaaattcaaaaggtatatatcatacattaaggaataaagatcagcaaactaatgtgtaaaataattggccttaaggtgtatatgtgttaactaacatgctgatttttttacttcctaatgttttatgtggatttgtaaaactgtttgcagatggagatcatgaatgaattacttgatgttgaaaaaccaaagtactcatagagcagactaagagttaaagaaatacaggaaaagcaagatataaagaagtaaaacatgagatctttaaattaatctttgtactcaacaaactaagatcaatgtataattatttttatattaatctaacttaagttttagtaagtttgtggttaatcagtgacaaatgtgttaatctttgtttttatgcattaagttatctataaatgcgagttttttttttttgtcaaaaacatgcaagttttatgttaagtaaatcgttagcaaaaatgtactactagttctgtcataactcataactcataattcgttcaagaattatgaatggttgattgaaaaaataattttaccatggattaactctctcaaaggcccaagtccattaaaggattaaaaggaacctaacagcccatacccgacttttttcttttttgggctgttgctcttacaaaggattttttttgtaaagtaaattaatttagattttggaaatttaaaaaaaaaaagagagaaataattgtttctgtcaaaccatatttttcttttctcaaaaagacaagaaatacatctcctaattacaaaaaaagtatgtttttttaccgttaaaaaactttaaaaggtgtatcaatttaattttaaattgaccaaagacaaacgaaaatttaataaaattgtttggataaataaaaaacattatctgaaaaacctaaccgacatctctcctccaaccactgtgtaaaaagcactcaaatcacactttatcttctccgtcacattttcccgagaaacaaaaaaaaaatctcaaatctggcaaaaaatggcgacgattccaatggatatcgtcaacgacatattcctccgattaccagcaaaaactctagttcgttgccgtgctctctctaagccatgttatcatctaatcaacgatccagatttcatcgaatctcatcttcatcgcgttcttcaaaccggtgatcatctcatgattcttctcagaggagctcttcgtctctactctgtagatctcgattcacttgattccgtctccgacgttgagcatccgatgaaacgtggtggtccgaccgaagtttttggttcttccaacggtttaatcgggttatcgaattctccaactgatttagcggtttttaatccttcgactcgacagattcatcgattacctccttcgtctatcgatctccccgatggttcgagtactcgtggttacgtgttttacggattaggttatgattctgttagtgatgattataaagttgtgaggatggttcagtttaagatagattcagaagatgaacttggttgtagttttccttatgaggttaaagtgtttagtttgaagaagaattcatggaagagaatcgaatcagtggcgtcgtcgattcagcttttgttttacttttattatcatctcttgtatcgtcgtggttatggtgttcttgctggtaatagtcttcattgggttttacctagaagacctggtttgattgcgtttaatctcattgttagatttgatcttgccttggaagagtttgagattgttcggtttcctgaagcggttgcgaatggtaatgttgatattcagatggatataggtgttttagatggttgtctttgcttgatgtgtaactatgatcagagttatgttgatgtttggatgatgaaagaatacaatgtgagggattcttggactaaggtttttacggttcagaaaccgaaaagtgtgaagtcgttttcgtatatgagacctttggtttattctaaggataagaaaaaggttcttttggagcttaataatacaaagctagtctggtttgatttagagagtaagaagatgagtactcttaggattaaggattgccctagctcgtatagtgcggaactcgttgtgagtagccttgtcttggggtgtaaaggagatcttaataacattaagtatcgaaaagaacaacaagctaaagaagctagagaagctaaaattatgcagaacactaaaaggaggtgtgatttttttgttcttctctaagtccaatttactttaatatcattttcattcgtttttgtatcgatatgttcagtatctcgtttgtttttattctcagggatgatttcctgtccaaaggattcaagctggtcttataagccaaaaacaagagacaggagctaaagctgcacaaggtaagtgaaaaagttgaccgttcttaatgggtctagtttgctgctgcattcttattgcatttcattcttttctgtctctgctctgttttgtcgcggacgttcatatccggtgtctgttttgtggcggacgagcaattttcatattcgggttgggacaagagtgaaagtcacagtatgtcataggtattgagtgcttagaagttagaacattccctagaaaatgttatggagtcatcatcaggataattactttagcatatgaccatattcaagtgtggttttttcacatcaatctatctgcaaaacaatcattgggtatgattttttcagggaggagaaacgagaaggggaacaaacaataacttcaaccaaaaagctctaatataccaaaggagaataatatacaacttacctacgtatatgtgcttatagaagagaggacaaatgtttttggtttgtaaataactctttttaagtttgatatatataacttactagtactaacgctttgtatacttgcttttttaagtttctgcataatatgagatgttaaataaattaaaatttgtcatatttaacaagagctggttctattacagtaaaacctatataaattaatattaaattaataatttgtataaattaataaattcttccgtctccgagttgggagtaattgatacaaatcactaaatcaatatgataataatttttttaaaaatcttatataaatatatggtctcatcaataatataaattaataattgtataaatttactaatatatattataaatatcatatgtaaaatatgactcttgtaatatttttcttcagtttttattaattttttgtagtgttcaattataatatttaacaaaatgaatttttttttttattgtaattggtttcagaaatactattgattataaaaaaaaattacattttatatcgattttgtgtaaaaatttacgaaatttgtacaattttattaaattttcgataaattaatatctttttaaattaataaatttttttggttctaatattattaatatatagaggttttactgtaatactttgctatcttttcatttatttattaatattattaaatcatcgacatgagctaacgtttttctacaataacttttgagatcactaagtagaaagttgaatctttcatcgacaattttataagtagtcaataagaaactttctacagcttgcttattaccctcgtcgaaatattgtgtttcgtgagcaatcctattattggtcaaactaaactattttgctcaaaattcttcatatggataactacaaaaatccaagttttccatttagattttactaatcggcgctatcgtaagtgtagtcgtcattgcctatttctcgagtttttaatagtctaaatcgtgataccatttcgactaaccaaacaaaacttagtaaaaaatttggtgtgtaacgaatccaaaatatcaagtttacgttttgtcacgattcctttaccaccaagttgccaatgtttggttacatttaccaaagatctaaatagtaaccaagaagtctcactgaatttatagagatttttggctgaatctacttaattgacctagtgctctgctctacttctacaaagacagatgggcctgatatgatcgctggtggactcaggtgtgacgagcccaactccggaaaggagtataaaatagaacgattcgtattattgatgctatcattaagaccaaaataaaaaaaaaaggtgaaaaattagcaagtgataaactataaaacacaacgttttctaaatggtaagaatataaactttttatagaaattaagaaatttaataaaaaatttataggaaataagaaatctacataagaacacagacaactttttggcttttttgtaatgtttttctaggtaataaatttcataatcttccaaaaataattaatcaaaagatttgactaggcgattaacccaaagcttcaaaagaaaaagtaaaaaaaatccttaatttgtttctttatcggattcaacaatttgaaaccataaatgacatattctaattaattcagagatatttttacactaattttatagaaattcattaatctaatcacaaattaataaaataaagaggtgtgaaacgtttaacaatggcatagagagcgagagagagagagaggaaaactgtgttaaacccagacgaaaccttcgatcttcttctcctctctcaatctcttcaccttccttcctccttcttcctcacctctatactccgttacggttaattttccggccatcgaatgttggataaggttttcgcgaaagccgatagagaaagatagagacagagagagagagattctcgtcgctaaatgactctaagccgttcatcagccgacgattcaaccaataacgctaaccgatcttactccgccgtggctggaaccgataacaaacgaaaacgagacgaggactcttctgattacgtcggcgttgctgaaagtctcgagatgttgaagaaacaagaaatcgacgccgatcatatggctgcgtcggctcaacagactttaatttcatggagatccggtgagaattcccggtctctatcttcttccggtgagtgttcttcgtcgaatcgtcctgagtcgactcggttacaaatctttgtgaggatgatgtctggaggtaaaacgattgtgatccacgctgagaaatacgatactgttgagaaacttcatcagagaatcgagtggaaaacgaagattccggcgcttgagcaacgagttatctacaaaggtaagcagctacagcgtgaaaactcgcttacttactactccatcgagcaagacgcttcgcttcagctcgttgctcgtatgcagagcacagagcatcctgtagcttggcaaacgattgatgatattatgtatacaatttcgagaatgtataaaggtgagaatcttcaatctaacatcaacgagaagattgttactttctttgcgatgattcctgtggagagtgacgaatcgattgcgaaatatctcaacattttctcgaactcttcggttccagctgctttagtgatgctatatgcttcttctttagagaggaataagtcttgtgctaagagctctgttaagctgttcttgagtaattgtgtagctttaccgaagaatcagaagaactattgtttaccaatagtgttagagttttgtaaactgcttaggaaagtttgccctgatcagaagctatatgttacttgccggaacaccttgggatcgatgctggaaacgtttgataaccctcatggtgtatataatgatcaatatgagacttttggggtggagattttcccgttctttactgagttaactggtcttttgttgaatgagttagctcagaattcagggcctagtttctgtgactttcagaaagtttcttccttttggcaacaattgaggaaagtcattgaactcaaagttgcctttcccattcccattgtgttacctatgcaaagtactgcattggaggcggagatcagacatcttcatcggttatttggaagcttgttgacgactatggacctttgtatgtgtagggtcgagtcttcgttggctgataaagaagttggaaacagtgaaactatgtcttcatcgtggtctcagtatctttccattctgaagattatcaattcaatgtctaacatttatcaaggtgctaagggacagctagctgttatgttaaataaaaacaaggtttcattctccgccctcgttgtgaaatttgctaaaagaggagatgaccaccaatggatctttgagtataaggaagctaccaactttgaagctaggaggcatttggcaatgctcttgtttcctgacgtgaaagaagactttgaggagatgcacgaaatgctcattgatcggtccaatttgctatcagaatcatttgagtacatagtgggcgcaagccctgaagcacttcatggtggactgttcatggaattcaagaatgaggaagctacaggtcctggtgttctacgagaatggttctatctggtatgtcaggagatattcaatccaaaaaataccctcttccttcgatctgctgatgattttagaagattctctccaaacccaggtaagctttgtgccatattatgttgtctttctcttgacatcactagcctagatacaagtgaatttggagagaccttgcttagacattcctatagtttgttactatctggtatcccattcgctgatagtcatcccttcttaaaattctgagaacatatttaggttgtcagaattgcataacctgttattcctaacgccctcttaatttgtttggtggctatgtcaagtaaacatgcacaagtatacactttaaatatagacgatgattgggctgtcatcgtagaatcatctatatgctgaagggtttactaatgaacttatcggaatcttatattcttacataaatgcttgatcgtggtacttctttacctgcttgattatctgaagtgaagcatcagtgagttgaaactatttggaagctgtctagccttggaaacaagcttttgtgatgtcactctttgctctaaatagatatttcttgtgatgctcatatcttgatctaataatattagatttttgtcttacgttcagcatccaaggtggatccattgcatcctgacttcttcgagttcacgggtcgtgtgattgccttagctttgatgcacaaagttcaagtgggtgtgctgttcgatcgtgttttcttcttacaattggccggactgaaaatatctttggaagatattaaggacaccgatcgaattatgtacaatagctgcaaacagattctggaaatggatccagagtttttcgattcaaacgcaggccttggtctaacattcgtgttggaaaccgaggagctgggaaagagggatacgatagagctatgtccagacgggaaactcaaggctgttaacagcaagaacaggaaacaatacgtcgatctcctcatcgaacgccgatttgccacaccaatcttggagcaagtaaaacaattttctcgaggtttcactgatatgctatcacattctgtaccgcccagatcatttttcaagagattatacctagaggatctggatggaatgcttcgaggaggagaaaacccgataagcatagatgattggaaagcgcatacagaatacaacggattcaaagagactgatcgccaaatagactggttctggaaggtaataagtaaaaaaacacaaattctttcttcaacttttaaactttggaaccaagtttttaaatgccttgtcgtattttgtagattctgaagaaaatgacagaggaagaacagaggagtatactgttcttttggacatcgaataagtttgtaccagtggaagggtttagaggattatcatcaaagctttatatctacagattatatgaagctaatgatcgtcttccattgtctcatacttgcttttaccgtctctgtataccgagatacccgacgattactctcatggaacaacgcctccgactcatcgctcaagatcatgtcagctccagtttcggtaaatggtgaaataattatcaaagtaatttctatcttctctctctctctctctctcaatctatccgtctctcagtctgatctttagggttcgtagattggtgcttttggtgtatagatttagtgttatggtcatgcctctgtttatgaccggaagatttcttaacttctgtttttaacttatggataaattaagtcccatcaattaattataaacttatgccgatgagcacaaggtatgttaaaatcgtttttcacttttttgtgtttggatttatcgaatcatgtaaatactaaacattagagtaatttcacttcgatttgcaaatagcaaaataggagtctttgttttgtagtatgcttcttttgtgtttatgttaataatttgtgttaagagaacatttctttgtattatatgaaattagattacaaagctttctttttttatttagcaaacaaacatcaaactctctttagaccacctcaatagtctcatcatagaaaaagaaacccatttaggatttaagaagaaacaaaatgttcttataggttaaaaaaaggctttattacactgccttgccgtcaacaggcttctcctccttagtcggagatttgacagccggtttaccatctttctcctccacaactgctgtaattacaactggtttctcctctttaaccggagctatctcggttttttcagtttcattctctacatttggtacttcttctcctttgatttcaacttcaaccacagtggctgaatcatctgcatgaacggttttcttaggcgtctcggttgttgtcttctcttctgtgtttgatactatcttctcaacctgtgggaaaaaatcgattgagctttgcgtcatgaatcagcttttatagatcaaagctaactactaacaaaatctacaaaaactgagctttcgaaaacaaactaaagattatcacatggagatagtattacactattccacatgttttgttgtctgaaagtacggtaagttaaattaattgcacatatgtcaacggatttaagacaatgaaataaggattttgcagttttcgagtatcaatattaataacacttgaactttacaattggatcaaaagaaatgaagaaatacctcaacaccagccatttggagactctgaagaagaagaatatggacaaaggaaaaaatggctgagtttagaaaaggaggaatagttgtgagtgagtttagcgaaaaagcgaatgattgtatttatagaggtggtcttcaaaaagtaaattcaaattttaataaaaattgttgaagaatattgaggatgcttggtgtgtcatatttacaggtaagaaaaacatcactaattaaagtttgtaaagtaaactaccttatgatggtgtaaaagcttcataatgtttttgtcaattgacaaaaatctttaatgttttgtggtattttataactttttacctatttcatatgatgatttgtgaacatgttatatgtttggatttctaaacaacaatgacctcctctgaacacacttctttttagtgaaataacccccaaaaacgaaaataaaaattgttagtgagttggttcactatttggtgtggtacacttggacatatgtatagatgacaaccatctgtcattatttctctactttagaagtttaattctctcacgtcacttctttattaactctttattccttctagaattttggaccattactttcaagttcccatgttttgatacacaaacgaaccattcgattcttttcttgcgtttgctagttttattttgatacttttgtttcaggaggactaagagtgaggtttagtatcgaaaacatggttacatgttattatcttgatgatcttattttgttatgatcaaaaaatttaaacctaattgagtgcatgtgcaaaattaaagacgacaaagttaatgaagcatcaaattctgattggcgatacacattagactatatcaaatggtcgaggactatatatcaagcttgcatctggttgcaacttgacttattattggctacggttccattattatgttttagggagagagtgaaccaacgttgattacgttcaggggggaaacgtaagcagacattgagacaactatctgtacgacctaagagtgatcgagtcgtataaagctcaggtgaaacaagactaaaactaaaccgataaccattggatctcattaattcacagtaaaccaaattgtacccaattaaaccggaaatagatagtaccatacggagaacattttctttttttgagagagtagtgagtgtcacaataattgacagatgacgaaaagaaaaccagagcggaatctacgagctgaaacacaagaactcactgttaagactcagtttcaagtaaaagtttctacaaagttcgaatgttttcaacatcgagtgaagtaaaccagatttcactgaaaaccttatcgtgtttctctctacttcacgagttttcttaatacagattctgcgcgctgctcaaatcgaggtagtgcccattcgtgctggattatgtctaaaccatccttctctgcacccagactctgatcaattttgcaaggcaacgataccaaatcaggtatggccacggagcgaacaaaacaacaacacttagcaatcatatattcatatatagtttgattacctttgatgcatcaaatccaaacccacccatttgcatcatacgttgtgtgtcatcaatggctgcatacgaagcaaaagtaaaagattatgaccacagtttagtttttgaggaatgtggagcaaattcgtatgtgacagctaaccattttcatctccgagaatgagactgaacaagcctcttaatccaaacaagttcaagaagtacctgaagagcgaaagaaaaactcataaaaaaaaaaaagagaaagggcaaatatccagaagcaaatatgattagcatactgaaaatctgaagaggaccggataacacaaagtcctttgtgtaatttgagtacttaccaggaacgactactcacatagctaacatcgacagtgctcaagtcaatgccattctgtaacattgatctgaacctctgagtcagtggaaatggtattttggctgcaagataaacaaagaagccttagatgctatggaattataaaaaaattagagtatcatggaaacaattaactggtttctcagatgaaagcagtgaaacagccagttataaaatcaaatacatgattgctgtttatgaagtaaccaagaaaaataattgcaaaacactttgtttaggaaataaacctgcaacaaatccagagaagaagaagttgacccatgcaaaagtgagtgtctgcaaaatggtaagtgatatcagtttcttaaatgaccagtaacgcaaaaacatagatgaaacatttcaaatacaactcacctgaggaataatcatagaaagatttttcttcatcatatccatggccatgttaggatcagaaaacatagcagcttgtggattttgagcttctcccttgggaacatgtagcaaaccattctcctacaacaaacaaaaccacatacttctcacattccatatccatcaatacactcatcagaaactattgaacagattacttcctctagcaaaacaaagagacaatataagaaagacgatcacaaatgaatgctaagtaaaaaggtcaaagatcaacaacaaactcaagctttcaatggaatccacacaatgaatctcttaaaatcagaaaaccagatcaagaccaaatgtcaaatcttagaaaactcattacctcgttgctgaagtagaatctccgagcacggaatgatttcggcgggataaaattagcaccgactttaagattccgagctctaataacaacttgcctatcaaacaaatcaaatcgaaatcgaatcagctaaacaaaaactcatagatacagacttaaaatctacgcatagagaatacaatccagagaaggaggaagaagactcacccttctttaaccatcttagcatcaggagttggagtagaacgcataagcttagagacaaagtatctcaaaataccgattagaaccatcactacggagagaggaatcagaacccaatctctgatcgccgtatcgagaactagatcctccgccattctaaaccctaattatctctctttctcgtcttcttcgtcttcgatcttctctggtgaagcaaacaaaacacgatctgagattctgagagaagagctgagaatccgataatttagtggaaattattttattttttttatttaaaaaatatctgaaaccttctgagtcagagagaggctttgatgtgttccctttataaaaccctaattcgtttgtctattaaacccaaactaaaaccctagctaccttgttctcctcaccgcttctttcttccctgaactcagaacttagaacaaagaactctcgtagacgaagaagaagatgacggtagaaggagtgaaccctaaggcgtatccgttagctgattctcagttatcgataacgattcttgatcttgttcaacaagctacgaattacaaacagttaaagaaaggagctaatgaagctaccaagacattgaaccgtgggatctctgagttcattgttatggctgctgatactgagcctctcgagattcttcttcatcttcctcttcttgctgaagataaggtatttgaatttcttcttatcgtttcactttcttatgaatctcaattagtagtttctttggctcttgcaagttttactggattcacttgggtatcttcttcatatgataaaaagataagactttattggctattagactccagttttgagattgtgattgttgatgttcgtagtaatcacttaggtaatttagtttatgaatgtaggagacagattcaattaggatttttaggcattgagaagttcgtttgttctgtattaacgtagcttgtgtaatgagttaaatctgtgattcttggtcttaggattgacaatatcattactttagcttctgagtattatgctctgttgattcatgaatgtttagttgacagttcccattcaagttttttttttttggcctatttaaatttggctgcacaaacatatctttatttgtattcagcaaatctgtttcacaagcaacattctgattctgattcttttactaattagttgttctctctctggctttgaactattgcagaatgtgccgtatgtgtttgtgccatcgaaacaagcccttggaagagcatgtgatgtaaccagacccgtgatcgcttgttccgttacatcaaacgaggctagtcagttgaaatctcaaattcagcaccttaaggatgccattgagaagctcctcatctagattcttggtggaatgaatgaatgatgggtctctccatttatgaagaggcttggactgaagtgagtttatgtgcaactttttagcctatgagaaaaacaaaaaacttgtgaacgaatcctatcctttttgaagattgtaatgctttttatttgatattgtgttggtgccaatgcatttatgaacaacaagaatccttttaaagtgagtttcttcaatttggttatttgtttggtgactttggtcttttgttgcataatgggataattgatatgtaatattgggagccaaatgaagcacgtagaacctatcataagtaggatacaaactttctccttctgctactaagcacaagatattaaaactagcatgtttgtatcaaaaatataaatattggatatggttaaatgaatgttattaagttgagacccaaaaaaaaacacttgtattctttggatcagtcaaaagggtaaatcagtcttttaacatgtaagtcttcggactcactatttataacctcctcttcattagagatcccaaagcttaacattctctcaaaatcattcgcaaacaaaactctgaattgcaatctcaaatctcagaaaggtaataagaaccctagattccaacaacacaatcgttagattttatcttggattccttctgttagcttcgcaattagattttcgaaaatcgtgaagccctaaattctctcttcttttacggtttcagaaagaagacgatttccttgggatcagaacattatgtcgaactgtttgcaattgaatacgtcttgtgttggttgcggatcacaatccgatttatatggaagctcttgtagacacatgacgttgtgtttgaagtgtggtagaaccatggcgcagaataaatctaagtgtcacgagtgtggaaccgtcgttacacgtttgattcgggttagattttgtgtgtttcttcaaacaattttgagtttctgaagaaaattttgataaaattgttgtttgggtgaaattgtttaggagtataacgttcgtgctgcggcacctacggataagaactacttcattggtagatttgtgactggtcttcctaatttcaagaaaggttctgagaataaatggtctcttcgtaaagatataccgcaaggtcgtcagtttacagatgcacaacgggtaattttgtgtttgttttggatcataccaatcattttgatggtttttacaatgagttttgtgtggattctaatttttgtaggagaagttaaagaacaaaccttggatcttggaagatgaaactggacagtttcagtaccagggacatcttgaaggctctcagtctgctacttactatctcttagtgatgcagaacaaagagtttgttgcgattcctgctggttcttggtatggagaatcaaattaccgttgcttcttctgttgttgtattatccgaattctgattatttttgtgctgtgttaggtataacttcaacaaggttgcacagtataagcaacttacattggaagaagcggaagagaagatgaagaatcggagaaaaacggctgatggttatcaaaggtggatgatgaaagctgcgaataatggtccagcgttgtttggagaagtggataatgaaaaggagagcggtggaaccagtggaggtggtggtaggggtcgtaagaagtcatcaggcggtgatgaagaggaaggaaatgtttctgacagaggggatgaagatgaagaggaagaggcgtcacggaaaagtagacttggacttaatagaaagagtaatgatgatgatgatgaagaaggtccaaggggtggtgatcttgacatggatgatgatgacattgagaagggtgagtgatctattaccaaatgatcgtcaagaagcttaagaatgactttagcattttcgtcaatagattgacatgattgttcttcattgtctatttaacaaaactgctgaaatgtctgtaaattataatgcattcaggggatgactgggagcacgaggaaattttcacggatgatgatgaagcagtcggtaatgatcctgaggaacgtgaagaccttctggctcctgaaattcctgctcctccagaaataaagcaggtctgtacttactatagtgctttacttccaatgtacaattttctgtgaaactaactgtagtaatttctgttggtaatcccatttatatgttatccaagtttcaatgtttactaattacaggattgttgtgcctttacttcctatgaggtcgtaactttcttttgacatcccttgcaggatgaggatgatgaagaaaatgaagaagaggagggaggtttgagcaaatctggtaaagagttgaagaaactgcttggtaaggctaatggtttggacgaatctgatgaagacgatgatgatgattctgatgatgtaagccctcttttgacatattttacttcttaaaaaattgttaaattttcaatcaaactcattttatctggtttggatacacgcaaatcatcatgaatgtcattcttaggaggaggagacaaactacggtacagttacgaactcaaaacagaaggaggcggcgaaagaagaacctgttgataatgcacctgcaaaacctgcaccatctggacctcctcgtggaacacctcctgcaaaaccatccaagggaaagagaaaactaaacgacggcgattctaaaaagcctagcagctctgttcaaaagaaagtgaagactgaaaatgtaagatacttgatttctatgtttgagaaagagttgatcgtttgtgctggatttgatttctaacaaacaggtttctgtaatctttgtaagcaggatccgaaatcttctttgaaagaagagagagcaaacacagtttccaaatccaacacaccaacaaaagctgtgaaagctgaaccagcttcagctcctgcatcatcatcctcagctgcgactgggcctgtgactgaagatgaaatccgcgctgttctgatggaaaagaagcaagtcactacacaggatcttgtttccaggtttaaggcaagacttaagaccaaagaggtaatatttagtctaatattccttcttgaagtgaccatatggtttttatctgagcttattctggacaaatcaatcgtttgtgttatataactgtgtctttttacaggacaagaatgcctttgccaatattctgaggaagatctcaaagatacagaagaacgctggttctcaaaacttcgtcgttttgagagaaaagtgaggacttcctgttttcacagctaactcttttcaaaaagatttcaagatatctcatgagctagttaaaataagaatgtttttctcatttcttgatttcagatgtttaaagttggacctatttttttcccatgacactattagtaattgaaaatcttcaaatgttttattcgaaaaaaatgttttatgcgaaggttttcaaaaatggaatgttccagtgaaagcccaattgtgaagaggaaaatagtaaccataaaaaagcccattcgtagggatcctattgtgattaggatttactgagattcggataaatacaattaggtttccaactgcttatatgatggagagataagatcgttgggactcttatataaagaaacagagtttctcctaagacgagattctactacttttctctccaaaaaaaagaaaatcagagtcattaaaaggacaatataagaaactttgccttggtgagcaagcaacgctacaatataaaaggcgaagtattattgttctctcctttgttttacagatgtcagcctaaaccagggaagagagaaagtcgtgtgaacaagctcaacatccgatctaatcttcaaccacgcaagatggaacttgtgactgaagacgaaatccgcaaagttctgatggagaagaagcaattaactacactggaacttgttatgaggtttaaggaaagacttacaaccacagaggacaaggattccttttcccatattctcaagaagatcgcaaagttacagaagaaccctggttctgaaaagtttgttgttgttttgagagataatgttactccgcttgcttctgatctaactcgtttatctatttcatgatctcatgtgaatttagtaataataataagaatttttctcgtgtcttgttttcaaaaggttttcaaccggaccgatttggttctcggtggtgatttatatgttaacacaattacgaaaatattaacaaagatgacatcagatcttttcgatgataattaatagtttgtgttttcatataattttctattttgtggtaatcaacatatgtatcgacaatacaattaatttaacacatttgataatctaattaacactacagtaatattttggctaaaaataggttatattttgtaacacgtcttagtaagacggtcttacaatatctttttttttttttaacacgtctcacattatcttaccgagtttaaatttgcaagcttacaattacatgcaccaacaatgtcaaatacaaatcaaaactgaaacatttttttttctttctaaaagtgatgtactttcaaaagaaatcaagtaattaatagtttcagtgtttactattaaaaaaatgtcaaatcatctttgtcaaattttagtttacttttaacacgtgttagaattgaaaaactataaatctatatatgtcatgataacatcaaactatttattaaacaaaattagtgttatttagtaaagacaaaacatatttaattaattgttaatctcacaatatttatgaattaaagaaaattgtatctgcttattatcattatatatactttttttttttggacgaattgttattatatatacccttaacacataaacaaggagataatagaaacctgacataaatatttacagagtaattaaggaacattaaaaaccgattttcatatatatattgtgtttaactcatatcatatggcaggtaataggtattttgaagatcagccgtatgaggtagaaaacccttttaacatcatgataacgttgtcaccatttgacatagatttgagtactacgataatgatgccaaaaacgttactagaggccaacttatttcgtttcatggatataagttatctcgtcggattgttacaagttcctaacaagccaaaggtgattgaactttttgatattgataccaaaattacaacatttcttaccataagaagagatggagataatttcaaattccatggatggaataatattctcgaacgaaaacattacaaggcaggcgatgttattgcattttggtgggatcttcatcacactagacttaatttcaaacatgttgcttagttgatggagcggatcctcacaacttctcgatccaactctcaagttggggagtattgtttgtaaacagaagtcccattatattcgtaagaataaatattctctagagaaaaaaatacaactgtgtatgtgatttcacaaacaaatgatacataacacattttaaaaacagatacaaagtccagataatcatatgaatcaaactagtctttaaatttaaagttgagtgattcaataaacagaaaaaaaactcacaagtaattggccagccatggaagatccttattgtctttcaatgcaaaagcaacatcatcacttggaaaattcagctgcagcttctgcaatctatgcttctctccaggttcacagagaatgatcctacattcaccaagatcgcaaccgattttaagaagaatgtcccaacctggaaaagcttctccattggttaagcagatagacgatactgtcgttgccactcggtcaaatgttgtctctgccattcctgttttgtaaagctcatgaaccatagccgtcaagaagattttactcagttttgacacgctcttcatcacttgaatatgaggtgcctgaaacatctcttggatagctgcttcaacatctgccataatcaccagctgattctttgcggatttgttagtatttagacggtgatccgctacttctgcagcacgcctgcatatctcaagcgcacgtcttgcatctcctgaaatcgcagctacttttctcgaagcaaattcaatagctgtcttctcgaaagcatctattccattcaaccttgtagaaatgatttcttgtagctgagtgtggttataaggaccgaaacatagtctctgtatacccattcggctagaaatccgaggaagcagcttctctggaagatccatagtgtttgctattcccaacacaactaatttggagttaggcttggtaggccaatcaagaatgttgtataaaacagactggtttctagttactagaagatcaagttcgtcgatgagaagtatgcaaggcttctcatcctctttaccaatcctttttccttctgcaaacctctcatttagacactgtagagctttcttccaaccgactcgatgaccactcaatgcttcatagattacactgtaaatgttctcaggtgaagccaatttgagaccattgatctccacaaagcaataagggcttacgcttccctcttcaacctcagccttcagattcttcataaccgataacacactaatagtcttcccagtcccgggaacaccatgaatatacatacatcttcctaaacactgatcatccgagattgaaccttttataaacgaagtgatctcttccatttctttgcttctacaaggaagagacttaggacgtgtagccaacaacaaagtagctttcgccttttctaactcactctgcttatgacatctcacatgttcaggaatcagcttcatccccaccttctcaaccccaaagaatctccctttacgagagttcgcacctcctcttgcactagtcaaacctcctcgcttactcttcaaaacttcatcatcaagctccatctcttcatcactatcatcaacctcctcctccttcctaccattccactcttgatcactatcagaatctccatcagccaattcagccaaacgcttaaagctacgccaatgaacatcatactcatactcacacaagaacacatcatcaccatcattactagctttcgaaaactccttaggacacttgacagaacaatgcctaagaatacattccatctctatatcagcaaaatcattcgtcaaataaagctctcgtttcagattatgcggttgacgccccgaaacggtctcttcaggtatcatataccaacgagcacgaatccaatacacaccatcatcaacttctttccataacttgtcgattcgagcagcccatagatcaccggaaagtagcttctccctcatagttctcgctaacttcttcccttccggtggcttaggaaggtcaagtgtttgactttgaccagactttttaacctcacagaattgacagatccaatcaccttcaggaacttccttcaatggcggtttcaagcatttcaaatgaaatccacctaaacaatcatcacactcaatcattatgttagtatctgatttgaaacaaatctgacaatcttcaatttctggatcttcttcttcatctgaattcgaatcttctcttctcttaacgtaaacatcatcaccgatttcgaattcggtttcgtcgaattcgactttattgtaataaactctcttcttcttcttcgtcttcttaatcgtctcagatctaattggtgaaacaggagtgaaggaatctatcttcttcttcttcttcggagtttctgttttcttcgacttcgatggaacgacatcagtggttggttttctgggggcacgttctcgttttcgaattagattcattccttcgattgggtcatttcctggagcatcaattgggtcatttcccagatcgattttacgagaaacatgacgagcagatctacggagaggagtgtgagtttctggggtttgaggagtgtgtgaggttgaagatggagatagatacgatttgcgatagatgttagacggagttttggttggggatttgaaggtttttgctcttggagttgaagccattgatggtgtaagctagggtttttctgggtgaagaatgaagagtgaatgaagaggaagaagaagacgatgatgatgatgaagaaggaggtagagagagaaagttggcgggaaaaggtggcggacacttcttcttcttcgcatcagacaagagtttgcgagaaaagggtttaactttgggccgaatattgggcttattaacccaactcatcactttaggtttatccaaattaatcataacattttgggccgatttgataagaaatcaataatataggtccttttgtgaaagaaaaaaaaaaaaacgaagagcacaaagtgaaatggggaattgttttttgtagagccctaaatagaaaatctccaactgtagtgaaagtgaagaagaagaagaagatggtggagatctgaaaatatgcgatagatctgacgaatgcagatctaaaatggtctaattctataccaatctcctctctcattgtttctactaagttcaagttggtgtactgatcttattttgtggcggtgtatatacagtcatctagaggaagggagaggatgatgatgaaggaagacggtagaggaaggaatccaccgtcgcgacatctttgggttggtaaccttcctcatgggatacttgaacgagaattagccgatcggttcttaagatttggtgaattggaaagcttagcgtttcagcctggacgaagctacgcatttgttaattttaatcacgatgaggatgcgttcgctgcgattgagtcgcttcaaggcttcccactctctggaaacccacttaggatcgagtttgctaaggcggttagtgttgaaaactcctttttttttttttttttttccaatgcttgcttaatttggcttggtttttgagtcttgaggttgattagagatgacatgaactaacttattaggagtgattgaaagttatcagttagtgtgtcttcaatagatgactagttatgtgattacttacacgtaaattagttccagtcagtaccattctagaaattaatgattgttgactacgcaaaggtaacaagtctcttaccttgttctggataagttgttactcggatgatacttaatcattgtctaagtttatagaacttagcaatcagtaccattctagaaattaatgattgttgactacgcaaaggtaacaagtctcttaccttgttctggataagttgttactcggatgatacttaatcattgtctaagtttatagaacttagcaatgagcaaaacaaacgaagatggtggtatctcatttttgtctcctcttcataggcctcacactttattattacaagaagttttttttcacattaactgtgaaagttctgtagtttctatatatggaaacttagaatcattctttattaaaccatatgcctccacatcaaaagtatccatgtgtaaccgcacaagcattcacctttatcattcacagcacaaacattcacctttatcattcacaacacaagcattcagccattacgttgtgaagcattcagaatgttattgacaaataatacaaacttggtagttgatcccaagttggagttctttgttcatttaaagatgctcttagctcacttgaggtcaagtgtgttccaggaacatcagcatgtgttgaagggaagtggaccagtgttcaactagatcttacaataaagataacagaaaattgtcaataagctttatggctcttagagttaatgtttacctaacaactttggatgattccatatgcttcagcgtcagggtcacattcatgcaaaagtcataaacccaagttaatagaattatgttggcattggtccacatgttgtaagtttgattgcgttgctgcctgacttcagttgcctctcagtacttacgaaggtgtgacttgatcatctatattgtgtctccgagtaacttttcctgccttctattatgtcattataaactgagaagttacagagtatagaactattattcagctagcagttggtgacattttacatattttctccataatatgtgagtaacaacccaccatacgttcgaggcattgttaaagttcattctcatcttcaccatgtttcatattcctctgcaacttgccagtgccaaacagatacatgcttttgaaatggttacctatacatagacattgttaaaagcagaatttgattcgtatgtaccaattccagcttgcaactgcccaataaaattgatcattgttatttttttagattatacaaaaattgacagggccaaatatcttaagcttgatgattgtttgtgtttatgacatgtttactttttgccatgattacatcttggtcatgtcttaaattctccatggctagtgatgatgtgtaaaattgaggagctaaatttgtataatgtttaggattggcctattgtctgatacctcaatatattaatattgtaacttatacattgcagggatattctttagctcaaattaatcaccataggcagctcttccttccttagacttgctgataactagatactcgagttttttcatcggttaatagtttaaagagtttctatctgctttatattgttgatattaatgcatattagcttttactaactgtgaggcagaagcgttttctgttgcacagtgtttgttgcctggtggactttcttacccagctgtgttagatgggcatctcattatctagttatgaattaaaatagcgtatggattttaataatcttgtgatggatttgaaacttgattctatttattatttctcttgataacagtagctactgcatagctatttagtttgttacttgaagtaccatataaatacactgctgaagtttccttctgattagctttcatttagagcctactgaagctgatgctttattttcttgatcatgcagtgaagtaggccgttggttaatacttctatctttgtgatactctttatcgcaggaaaagtcatcaactggatcacgcactgatgatatatatcgccatgatgaacagcggtctgcagcaagagggtcgtcttttgtccaaagggactccagaatgcgttatgagagcccagacacatatagcaaatcaaaaatgaatgatagaaatgcagaacccagtgaggtactatatatagggtttcctgcttcgttgaaagtagatgatgcgctcttgaggaacgtcttttcttcgtttggagaaataacaaaggtcacggtattccctggtcgcagttatgcatttgttcaattccgaaatctgatggcagcttgtaaggcgaaagaaagtcttcagggaaagttatttggcaatcctcgagtgcatatttgttttgcaaagagtgaaccttcctcatctggcagtggaaggggtccgtcgggtagatcactctctccaccttacagatctgttgatcgactgggatcttcagaaggttatcttcaggatagaaactatggaagcatcagcagaattcccagtgtgagggaaccacattacatagaagatagggatttagaagattctgaaggttacatttttaacaggaaacgagactcaagtagcgatggaggtcctgcatatggaaggtcgagatctacgcatagatttcctcaggatatgcatgaatatcatggtagtcctggggaaatgggtacttcattccgtgataatcctcacagattccagacaaggagttcagagtatgaagagccatgggatctacccgaagatgactactactaccaggaaatcaagagattgaagacaagatcctcgcagcctgagaggcagctcccagggcatcagctttctggtatagagcaagaaagacgccccttttcaagggcatctgctgatttttccccaaaagatgcatttgagcggaactatgaggctggacagctaagatacaaccaaacagttgagcagccgttaaacctggctataaggaatggggacaagagtagcttacgagaaccacatgaagagttaatgggaggttatcctctgccatcagttgtccctgaaagaaaaaggtacacccctgaactgaatcgaccatcactaaaggactggaactgggaagggactattgctaagggaggcaatcccatttgtcgagcaaaatgctttcctgtgggcaaagtgatggacatgatgctgtaagtagctctaagtctttatttttctgtatttcttgttttgattggctctctatatttggcttaagttcattcaaccaagtataagtcaaatccgtttgtgtattggtttaagacttttgcttaatttcattgttctttttgtgtattgcttttagacttctgatcaaattaatttttattggtttgttatggttataaatgcaggcctgagtttctagattgcacggcaagaactggtttagacatgctggctaagcattactaccaatcatctaaagcatgggtggttttctttgttcctggaagtgatgctgatatcgtgttttatgatgagtttatgcattatctggaggagaagcaacgggcagctgtttctaaattggatgacacaacaacgttgtttctggtgcctccatctgatttctccgagaaagtacttaaagttcctgggaaactaagcatctctggagttattctacgtttagaatgtggtggttctggctccggtgggcctgttcaacagcaaggtgagagaaaagatacagacttgctaacttattatggtgaaacatcatattcagaagctagtggagcgtttcctgatgtgggaaacccacgtattccgggtccaacagcttttctgcgtagtgcgggtcgtgacaatcaaagtgcatcaatggatccatacgtcgaggacaagcatgatcagttgagtcaccggtattctggatcggactggccgcctcgtgatacaaaccccagaagttcacccttcatagatcatactgttcaaaaacacagcgggtttgttcctgggaaacagcaaaatgcagatctaagtcgttatcatgatacggaaactccagtcccagcagggtttcagcctgaacagcttacacatttagcttcctcgctacccagacagcaacaacaggtacagaacactccaaatcagcctgagagatatgcaccagaaggccgagcaagtttcagccatttgcaacatgcgcagacaccaagcatacctcaattggtaactccacaaaatcaaaatgtacagatacaaagtagcaacagccaacaacaagaagaaacagaggctaatccacagaagcgtcttcaagcaacattacagctagcagctgcacttctccagcagattcaacaagctaaaccgagttaatggtggcttcctgagtatgaaatctttacattctttcttgctggttggtataaagaagaaaaggcgcaaatgcaagtgttctaatatcgagattaacatgccgtaatacatataggcaaaagcctttccagtataagatgattgtaaaatgtagaatcctcattttacgtcgttttaccttttgtatgaaaccaatactacgttacgttgaatagtaatattcatttttctcatttgctgagccattcattatcgtttcaacaactcaattctgccacttgagaacagatttgtactcatcagtggaaacaaagagaagcaagaaaacacaatccaaaagaaacctaaagcagaaaggcaaatttgtttattttctactcaaaagttcaaaacaaaaacataatgaggcggagatgtaagaaaaaaaacatataaggagaatataggtccaggaaaaaataaaaacatgtaaaatatagtggactctacaagtctagtactgacaaaaaaataacaacacctgaaattgctttagagaaagcagagatcaacggctgagattttgtcgtcaaggtatcaatcgattttgacagaggaaaagagatagtggacgaagtaaaaggaggtgaggaagccaatggttccagtggcgagcatgattgcaattgccataagcagagagtagccaatgtaaagcatagctgagacgggtccgctcagactttgtagatcaaagaccaaatagttgatggagtaagcgaaaacgtacaatgcgactgaaccagatgcatagaaggctttccaccaccacctccagtcttcaacgcagaggtgcatgtaggtcaagaccactgatacttctgcacacacgactaccaaaagaagcagaactatgagtaagaacccaaatacatagtagaatctccctaaccatatgctggagaagatgaagaacagttctatgaagagcgttccaaaaggaagggttcctgctccaaggactagaagccatgacgggtatttccgttctgggatttcccttggaatctggttggttctcactgggaactggattgcttctgctcgtgttcctaggaatcctccaaatagggtgagaggaaccgagatgcagaaccagagagccaagagctcaaaatacaaagagattgggatggctccagtgctgttgctgctccagagaaggaagttcaacactgtgagtataacaaaagcaatacccgggaagaagcatgcaatggaccaggaaagtgatctccatccttctgaagtccccttgacagttctccagagccgaacaccagcgtacccagcaacaatacccaagaaaagatagagaataatcatcccggttagtagcattcctcttgaggcaggcgacatgaatccaagtgcagcgaaaacaatagtgacaacagccattcctgtaattcgaaccccatctcccaccataatgcatagaagctttgacatttctggttctctgaacacatctccgacaacaagtttccatccagagagctcctcattcatctgtgcctgtgcttccttgtccagttcctcatactttgtcaaatcccttctcactgtcctcaggaatatgacgaaaactataccggccagaaagaagatcaccataagcgagttcaaaatagagaaccaatgaacacgagcaccttccattttcaaataggcatcccatctggatggccatcttgtctcactcttaacaaattccacttcataagtgaaggttattctttcatgttctttaatgatctgagctttgtcaagctccaatggacagttaactgaaggaacagggtcatacatgtgaagcttcgtcattttttcagcatcatacttaacactgcagggaacaacctcaaatccaacaatctcataccccaatgccttcttcttatcagcttcagagatcacacccataccttcttcaccagtaccaatcacctccatgacattgccttcatactcatgaaccaaaaccttaaacttgaggtgattaatgatgtaatcatcattactgttaggtggcgaatacccaacaggatatccagtccactggatagtaaccccattctgcttagcgaatctcaaagcaggcaagttatcaagaatcatattcacttgatacaactcacgagttctctgtttcaagagcttgacctcatgctcattcaaaggactcgtagtgcataagtaaagagactcattggttctcatccgaaacctataagcagagttatcaatctgat

SEQ ID NO: 574 - DNA, 79375 bp, Arabidopsis thaliana
aagcttcgtcattttttcagcatcatacttaacactgcagggaacaacctcaaatccaacaatctcataccccaatgccttcttcttatcagcttcagagatcacacccataccttcttcaccagtaccaatcacctccatgacattgccttcatactcatgaaccaaaaccttaaacttgaggtgattaatgatgtaatcatcattactgttaggtggcgaatacccaacaggatatccagtccactggatagtaaccccattctgcttagcgaatctcaaagcaggcaagttatcaagaatcatattcacttgatacaactcacgagttctctgtttcaagagcttgacctcatgctcattcaaaggactcgtagtgcataagtaaagagactcattggttctcatccgaaacctataagcagagttatcaatctgatcacccatgagaagctcaccaagattctcagcacttttcttgataccttcaagtggttggcagtaaggaagactatagtaactgaaaggaagctcagtttcaatagaagtcaaggaattgactttggcgaagatagagtctccatctgaatatgtgtgcatataactccctggtaagtaaaacccattgcaaagctgactaacaaacaccagtaacacgaatactcgatacacaccaaacattgtcccttcctgtatcaaaatacaaaaactctctcacgattagtaaaaatcactactattgtaacagattcaagcacattctcacgaatacattgaaatcgaaatggtttatgcatgtagatcagattcgtagtaaccagattcgggattaatgaatcagatcggtggatcaatagatcagatctcaaatggatcataaacgcaaaactcagaagctaattgatataatggaatacgaaaacgatgaatacaaaatcagaaaacgcgaaagaagaagcagatgcgaatccaacagatctcagagtattcgagagcaaacctgagagagagagatccaggtatggagatctacgagggagtcagatctagaagaggtggtcgagggactttgggttgtttcgaaggtcacgctgataatctctctcactgctttgctttggttgcttaatgcgttcgcaaagagagcgaataacgaaaatcaagaaaatcgtgggtgtgttgggtagttattctctgtgacgcgcttatacaatatgtcggtgcggtaatcaccgtgcctaacttcatctgaggccaaaaaaaaaaaaaaaaaaaacttcatctaaggccttgaatttctattggttgaactggttataattaattatatttttaagtaaacgacggtttttaaatgagatttttgtaaaatagagagagtataatgtagttaatttttaaaaaaataaaacaaagccaaatgaccaattttttggaaacaaaaaataattttatcacatataatttgaacatttttttttttgctaaagaattcaatatttactacaattttgaattattttgaactcttatgtaagaaagtaaaatttacacaaaatacatattttgagaagctggcatccggcattttgacatgcgtattttctcaaacattaaatacattaatatatatgttaactagcattataatagagtaaaatattcacaaaataatgttttgagaagctgaaatgtaacatgatattctacagtctagcaatttgaggttttctaccgaattttcatagtttgtattgtaaattcaaattaaatttaagttcatgtagttataagcacataaaaaagttcggtgaatggaaacgataaagcaatttagttcatggtgaaataggccacatgattattagcaggattcatagataagaatgttaacaaaattaaatggtaaattgggtttaattaggtttatgacctccggtcgtccttacgctattatctccacagcgtttttgtttcatctaatcaacgaagtgaactttcgaaatcgatatctgaattttgatttaaaaattggaggtaatcattcaccaatcggtttgtcaacgtaaaaatctctctctgattatatgaattgatgtgatgtgagttcttagaattatgattcatcgaattggaaaaaataaagttgttcgttgtcagtaaaattagggtaatttgaatcattaacgagtatatgtatgtattgtaagacatgattgatatacataatggtaaaagaagctaagcatgagtaaagccgattattggcagagatagtttttttcatcagtcttgatgattgtttcgattaatactctattggatctttattttattcatgaacttgattagaatttgttcctatatgcatgattttagggttaaaatttctcttgaatttggtatattctcttgaatttgattaaaattttatctgttttactttaaagtaaagtttagtgggcacagcccaacctaatgaaaataaaagaagccataaacagcccaataagaaagaagtaaagtgaaccaaatcgcaggaattaacctctgaaacgatgaacagaagaaattgcaaaaagaagaagaagatatgagttctcgaattttatcctccgattcggtaatcttcttacgtttctctgtacttactggagataaaaaaaatcgaaaattctcatcttttaagtcaattttgttactttctttcgaaagtttggtgattgttttgatgtgataacgcaggacgacgttgatgaagaaaacccgaaaactcacgagaatggtccaattggaggaaagactcaaaatttagggcaaagcaagggaggtgatagtgataatgttgtaaagactaatacttgtttcgtgtgtgatgggaaagacaattgggttttggtatgttacggagaggaatgtactatagctattcatcagagttgtgcatctgatgaacctgatttcgatgaatttggaaatttctattgtccttattgttggtataagcgtgtagttgtcaagtgtttggagttagggaagaagcttatgctgactgacaagtctaggaagggatgtagagagagtttaggaggagtagatgtgggtttaatgatggagaaagaagctggaggtgttgagaatgtagtggaggttaatgtttctggagcaagtggtatggttagtgggaagagaagggaaggtgatggattaaacaataaatggatagtgatcgagaagagtcagaaaatgcaaaaagttgctgctgaaactcattctcgggaaaattctaaggctgatgatattgattcggataagggaagaaagcagcgaggaagatttaatgagaagaattatgaaatttcatatgcgtgcatttctaatgcaggtgagggaagaaagggaagggtaagaagaggtaatgagaaaaatcatcaagcaccagaagcgcacagtattgatgttggtggggaaagaaagcgacagagaagatgcgatgatataaaccatgaaaaagcacaaccgcacagttttgctgttggtatcaaaacaaaagagaagaggagatacagtgagaagaaccagcaaaacaaaacagttgcaactactcatgaacacgacgtcttaactaatgatggaagaacagaagcccgcgattctgatttcggtgagggaagaagtgggcaaggatgtttccatgagaataaccagcaaacgaaagtgtcgtctactgaaagatgcgagcaggaaatccctaggaccaataaaagagtgtcactcggttctggattaggggaggggcgatatcgggagggaagacatattgaaaagaatcagcataccgaaactgttaaaactgaaactcatgggaaggaagtttctaaggataggaagagaaagcgggaaagaggagtggaaagagatggggatgagttctatttggcggagaatcaagacagacaatgccaagctgatatgagaaatgatgatgtggccttcaataagcaagcgactggtttcagcacagttgaacaagtagagcgaaagtctgtatcatctatttcatctccggagtctacaaacaatgttaacgaccctaatgttgcttttcaagagttagctttgatcatccaccctaaggctggtgtacaagaacaacctatcgaagcacgacctttacgctctgtctcttcgaagaaaccatcttttcaacctgaaaaatacggacacaaaagttacctggagaagaatggacctgcgtctaatgatcccgcacaaaggtttctattcatttggaacttcgtgacatttaaattgcctttagcataatggatgtttttgaggaagattcctaagcagcttgtcacgggctttaagctaacaatttttcttccatgtagtgctacaaaaaggaaaagacgattttggacgctggcagaagtagagatgcttagggtatgtaacttgcacatttctctctatcctacgtatatttcatgctgcagttatcttggtttttcgtaatttggagcttacacattcaacggctctttttaaaggtttatgcctgttttagtttatcagctttataaaaacagccagggtagctggtcttatcatctcctaagaggcggtatttcattttcagtcgtaatgcaattgttttgtagactagacttcataaataagagcttatcctccaaatcattgtgaaattatatctgagatatataacattgtttgtggctgtccaaattaaatattttgctatgtagtgcacaatggtgataaatgtggatttgtctaacttcgtcctgtcctttaggttggtgtgcagaaattccctggcgagaggaatattccatggcgcaaaatcttgcaatttggtcgggatgtgtttcatgatgaacgggctccaagcgacctcaaggacaagtggaagacgttaaacaaaattccttctgacacggggaaatgggtaagcctttcaactgaaagacaaccgaattactatgtgtctgaagttagttctgaatgacctatcggacttagcaagcattagagcttagaagagtagtagatagggctttgcagattttgtacaaccttgcttgctcctagtttgctaaatgtatatggagcaaaactgatcttaccttttaacactaaattcaaaaaaaaaaaaaaaaaattgatcttacctttctaatttgtatgtcctcggcaatgtagagaattcacaagagtgagatgatatttcatgacacttgaacacaagtttatactaaaaatcatgaaccaatgttgtacttcaatatctattaaacttttacatgtcttttgatatggatttctctgcaattgtaagacaaagaagaaaacagtaaggtcaattttacacttcgtgtaaacaaacttttttctaagtttttaatgaattaaaaaatagatgttttagacagaaaatgatgagggtagaattcccgccagtgcgtgggttcaactataaatcctttaaccgccacgtgtcctagaagagtgccacgtacagccactatcctccactttcggcttatttctgtcggtttattctctgctcactgagtggcaagaaaaaaagaaatggaagttcccaaaggattctttgagaaactgtggagttttgtctcttttcttccttacttcttcctcttgctgctccttggcgtcaccaagggtatgaatcttctcttctttcttctctccatccataagaatggagatgttagctttgcttattagctcttgagtttgttagagctccagagtcgtgtaaactcgaatctgattttctgcactcttaaggttagattttggtaaatggaatactttaggaggctactgaagctatttgaattcatattaataatgagtaatgatgtttatttacacaaaacttattgagtattttagtaaagcactgtaagttatgtacggtgtaacgttctccctcttgtttcgttttggttctcagccctgattattggtccaatatcatctgctataattttggttggcaattcatgtgtcatcattggcctttggccagcacatttcatttggacctactactgtttggcaaggtgtatacccatcaaatttgaaatactttgtttcttgtttcatctccttttaatttccactaaatatcttgtttttgtaacctctagaaccaagagaatagggctggttttgaagaccttggcattggtattatttccactgcctttgctcctctggccagttgctggtatagtaggaagtctcttcggtggaatcgcctacgggtttttcacgcctcttatggctacattcgaggctgtaggagagtctgttactagcaaatgctaccattgctttgttgatggttcgttctccactattaaagggagttgtactgtggttacagacttcacagatttctgcttccattcttacttctcctacatggatgagttaagagaaatggtttcggccgatgttgaacccttagagataaagtaagaatctgaatcgctctcttcgttagagataaagaagaacaatttttttttacagtttacagtgatggcgtaatctcattttcttaccaggttgtctcggctacctagttgtctccttgctagtctcataggtgtgatggtagatgttcttctaataacagctgtcgctgtttacaaaagcccatacatgttactcaaaggatggaagaggctattggaagaccttgttggtagagagggcccattcctagagagtgtctgtgttccatttgcaggtcttgccatattgctatggccactggctgtcgcgggagctgtaatagcttcagttttatccagcttctttcttggactgtacagtggagtcatcgttcatcaggttcacagcctttacttatagtccattaagtggttttatagcttacagatttggttatgttgatgttctttggttttgaggcttcattagattctatgtcgaaaggatttgaaaggaaactgcttaattcttgagctcctctggttgtgatttttaactatttgtgagatagttactgttgcttcgacaatagttctggctagtttagatactttatgttagttaaactgcggcttagccatagattttgtaatttaagtatctgccatgaaaattcttaagacatgtatcttgaatgatcgctatgggtaggcactgataatttatggtcggttaggaggtctctatcctttaatcgtttgattatttattcaggaggactctttcagaatgggacttaactatataattgctgcggtctcactgtttgacgaatatgtaaatgatttactctatttgagagaaggaactagcctgccgaggtacatagtggaggctctgttccattaatatttcatatccacgacgtaaaccttcgatttcgtgatttagcgttggttgattataaatttgtgactgtaaagtatatatgcttgtgacagccaggccttgctataggacgaaaacagagactgttcatgggaaaagaatattaggagagagtaagaacgttgatctcaagagcaaaagaagcagctccctgggttcaaagcttgtttcagaacagtcgaggacactgaaaaaagcaattacactatataaaccagttcaggtatattagacctttatttgacttcatagcataatctccagtgagtaagtgaacacacgtgtttctcttttaaggtatgggaatggttgtttaagtcgtgtgaggtgaatgggaggatacttcttcgcgatggcttgatagatgtgaaggatgtagaggagtgtcttgtcaagggtaattctaagaagctctatatcaaactacccgcgtggacggtgttacagtgtctccttgcatcggctaaatcgaactcatctgggttggtgatcagtacgtatactcgatgatctctgcacaaattcttgtaaaaatcttcttttttgtttcccaccacgcagacttatgattttgtgatgaatttctggcagctgatggcgtggagcttacagaactaaacagcccaagagataaagtatttgtgtggctagttggacccttactgataatgaaggagcagataaaaaacctgaagcttactgaggatgaagagttttgtctgaggaaattggtaatggtatgcaaaaatgaaagaaccgaggactgggacaacaccgggttcccgtcaagtgatacagtaagaaaagcacaattgcaagccataatcagaaggtatgttatcaaacatcagcagaaattatatcttctctgcatctcatgttgtgaatggttctcatgtcttgatttagaccatttctttatagaaagtgaggctttttgcaaagtttggggtgaggcttttagtggtttattgattctgttctaaaaatatgatcactgaagctagttctcttctttcctttgaaggctgcaaggaatggtagcatcaatgtctagaataccaacgtttcgacgcagattcatgaacttggttaaagtgttgtacatagaagctcttgaaatgggtgcatcaggtaatcgagctggtgggatactcaaacccaacagcgaccaaacaggaaatctggatcggactgaaacaccggacatggatgttgtctaagtagttatgatatcttgtctttttccttcttccctctgtctaagcggtttcagtagtattttaggatttgttttatattccaatatgtatgttaattaaatcctcaaaaagagcactctttgtcaagaataacatatattcataactttactttaatcatcagtatgaggaaatagttttcgaaaacacttcatcctctaacttgagatttcctccattcttatgaggactaattgttgtggaatcttcagctagtcatgcttcactataaaatctacaacacagaaaaaatatggtatacatatgtcaaatgtggcaaaaagaggaaggacgatttggatttcgtgaaattgctaccttggttttaaagagtgaactaaacaatgtagggcagtgttattcttcgtccaatgagccactaaaaagtatcaacatacaagttattattcagacaattgacgttcttctttcttgtatattcatacttcaccctctcaatcatggaatcccacatctcattatccacaatcttcagacaattgacgattgtgataatttcagtcttttaagcatcacaataacaaaatcaaaacgaaaaccagccattgaaagcaattttagaggagagaacttactaaagattattagtctcatattgtgtttttgactacgagagcatccccatgaattgttgttatccaattgcactcctcatatgtttctacatttgtttccacattccttgctgcacatatattcttcaaagcaagattaaggttgtacacaacaaaggccttgaatggctgcggtttttgaagtagtttttgaattttgattttgcaaaaactaaataattatccgttcatgattttacaaaaagtagatttcctaacaaataggaaaaccagattttaggagtttttacttatttctttatacaatctaaaaaccaagttttgtgggtttttaaaacaatttacatgacatttttttttaatgtactattattgtttaattatgctatttttaccatttacaaattcatccaaagataaaatacacaatttaaaaacgtttaaaaattaagattatgtagaaaaactaaaaattaaacaaatttccattcatgattttgctaaaactaaaatctacaacaaaaataaaaaactacaaaaatcaaaaaccaaagattaaaaaccaattaaaaactacaaaacattcagggccaaaatgtgttcaatagatgcgaagagaagcacactcaacaatctctccagccgccttacattttgctgcattgtcaatagtgatttacgcaatgtttttatgactcacttcattgataacttccttcatgaaattagaaattcaaagtatatatttcactttgctagaacaatccacagccatctgacacaatctttagtctttttcctttcaatgttaacttaagtggtaccaataatccctcaacatagtttatgtctttctttagcaaagttttcctcaacttttatatctaagagacacataaccatcattttgttaacatcaacaaactgataatacttcttataatgcggatttcttgcaagatcgaaaaccaaaccttcattataaaacatttccaagtttccccttctctcacttttctagttttggtaaaagtgacattggacctatcaatattaataaaattaccaagcactcatgaatttagccttttgaggacaaaatcacaagtagataagatacaacacgtggacgatcagttccatgtggtgactcacatatgatgctcctataatatgccaaccactaaataaattttattatataaacatgtgaaccagtaagaactaacaaatcatgtaatccaattataaataatatcaccgcttttgcttataatcaaaagattacacaacctagtatttcctgaatattacagaaaaagtgcagcaaatagccaaatacgatgatggctcatcaatcatcatgctatattcattacatctttgtatcatttgtattctgtttcacctccttggttagttcaattcttgtatcaaccttttacaatctaataaagttttcgatgtttaaaaaaaaaaagtgtttttaagtttccattaaacacttgtataattcataaatttccaaaatctctcaagaacaaatcagagaaaaaaaaatagtttttcttttgtactgacacttgacctaataatcttctgcaaaattcgagactgtactaacgtttgctctccataactcccatgtgcaatttaatgaaccaaaacaaatataatgatcagacactcttaggtcttggcaataagaagaataaaataataagatataagctaaaggatattgttatattttaacgacaactggggacaaaaccaactggacattttattttttgcttttataaaacttctaacaaaatttaagtaaaataaaattgaagaacaactggaatatgacaaaaaaaaattattatttttgtttgataatgcaatgctctcttccttgaagatccttcatgattacatggatgtttcttctccttctatcttctccctccctctcaaattttaatctccagttttttttttttttttttgactcagagatcaacaaaacctagtttttgaatttgtttcaatttttctcaaattactctgtttttgagatctctgttttcgttaaattatgtctttgaggtcagaatcttcaacggcagagaagataacagaggatccggtgacgtataagacagcacaaagcagcgtgacgtgcatctaccaagcacatatggttggattctggagaaacgttagggttctatggtctaaaaatctcatgaaccattccttaaccgtgatggtcactagcgtacaaggcgatatgaattactgttgcaaggttgatcttaagccatggcacttttggtacaagaaaggttacaaatcgtttgaggtcgaaggaaaccaagtagatgtctattgggattttaggtctgcgaaattcaacggcgggcctgagccgagctccgatttttacgtggcgcttgtatccgaggaagaggttgttttgttgttgggtgatcacaagaagaaagcttttaagaggactaaatctagaccttccttggttgacgctgccttgttctacaagaaagagaatgtgtttgggaagaagattttttcgactagggctaagttccatgataggaagagagagcatgagatcgtagtggagagctctaccggggcgaaagaaccagagatgtggattagcgtagatgggatcgttttggttcaggtgagaaatctgcagtggaaatttagagggaaccagactgttttggttgataaagaacctgttcaagtgttttgggatgtgtatgattggttgttcagcacccccggtacggggcacggcttgttcatctttaaaccggagagcggtgaaagcgaaacgagcaacgaaaccaagaattgcagtgcttcttcttcttcttcttcgtcggagttttgtctctttctttatgcttggaaattggagtaagtctaaatgttttcaatccaaaagcttgcattgatttttttgcctgactgtaaattcacattcaaaaatcaatcttagcgtgtgaccgactcttgataattttgagttgtcaaattcaccaagacgtgtagagagtttattttttttatcttagacaagactgtttctgtgtgcttaacactgacctagaccttttcttagccaactcagaagaagatttgattaggttgaaaatgttgtaagattgattggctttagaatcattgtgtaaacacaaaaattcttgccatctcaagattctttacttgttttgtctgagagagttctattactactttaatggctctgcgcaacacagtacgctgagcgattatcaaaagaaaaccgttaaggacatcactgtctaaaggggatggtattggtaaatatcccacactggttaggaatgagaccaactaatacctaataaagtcacatggatacacttactcataacctaacttacctatgagggttattggacatggttaagggcctagtatgggatatgttttgtttaaaaaccacaatgaggatttaagaaaattaaaatgatatctataattttcattcgaaatctcacgaatagttcatcaacttagcaactgacaaagtagctcaacctaaacgccaagtctaggctggtaaccattcaaagaaagaaggaagatgtagagaggaaaatactagtagtttagaagaaacgttacattagtgattgaacatacaaacagctattctataggtaccaaagtggaaacaagtggaacaagacggttcaagttttctatcaacctacaaacaaacaactgtctctgataacaagcttttgaaatacttaccagagcgatcagcttgctgctacgttgcaagtgccgattccatctctacagtcattggtaagatcattgaatgtttcaatctgcttcttccctctcaagaacacctctgtatcaacagacgctctcatgtaaccgtcaaactcaactgggtttcctccattaagcttcgttgtctctgaataccattcgctgctctcgtcccagagatccttaaactcatccagaaaatggggtttgtacttgtctttcaaggggttaaagaaagataactctggttcatttgttgcaatataaagattccttccttgttcgattttgtcctggagggtagataaaatggagcttggtgaagtatccttttcaagattaggccaaacttccttgtttctcgccttgtctcctctctcaatgtgaatagcatcataatcccagtttaacctcgaagcaatcgcagaaacaatctccatcagtcgtttagatttccacaatagattccaaggcctttgcacaacagattctgtctccccttcgcatactctataccaatagttatctggttctactgtcccgaacttcctcattatcaacgtgtccttcacatcaacaagcttcatcggtgtgacccgaaaatcttccacaagatgaagctttaatccattcttcttataccatttcccccaatcagcccaaaactgcacctggtctaacatagaagcagcctctttcaaatgctcgaaatcaaagtaaaacctaaagtccttcccttcctcgttttgaccagacaatgtataaacagaagacaaacaaagagtcaaatccatcactaatgttctattcaaatactgagcttcccctaaagcacacaagaaactccacaagaaatggttcatactcttacacctatctcctccaccagaataaaccaagtaatgaccttctttaaacacattttcagactcaacaacaggaagtgaatcattcactgcttcaccaactacaggcaatgcgaaatcatcaaccttaccaccactcgaatttcgaaacccgggcctcttccgcttcctcgcattcacacccgaatgatactcaccaatccccatcacactaacactacaattcccagacttttcaatcacaaacctcctataatccttataaaacgcagccgctttaccatccttaggtctataacgccaagccatatcacaagaactactactaccttccacaatcacaggtttaccaaacttataaaagtgactgtctttaaacttctccatagtagctttcatcatcaagtgaaaaacttcaggatctttgcaatcaattgggatattggtatcacaatccaattgattaccatcagagtcattctcagatgtttcaacatcagctatattgatgaatccgccaaacgcggtttggttcgccgccatgaaatcttcaccggttttgacaatactgtcgtcggatttaagagtagcgtttgaattggatgtgaggaaagttgtgattttgtcagatgggtgaaatagtggatcttctggttcatatgtagcagcgataatggtgaaaactacgactccgattacgagtacagagaagcctatgcttccgattaaggatactgcgttttgccctagattctcaggtcggaaacctccggttctggaaaatgcagatcttcctgacatctttgtcttcaagattcgatgaatgtcattctcagagattagagacagtgtcaagaatagttatggccatgtcaagcggaggaatcgaagagcttggaacatttcttgtaatgtgtgtgtgtatttttttgcctacacgtgtacatgtggaggtggagcgactctacttgcgtcgtcatcgagacatcgactatagcaaaaggacgttactttagtttataatctgaggtcagtgtgggctaaaacgacgtcagtttgtgagtttgtacatttttccaatagttgctgtagttagaaaccatttttatgcactcggtgaaataagaaatccatttttgtccggtggtcttttaatagagctcaaggccgtcatttttactgtatttcatttaaactgtttaacagacaaagaccaagaataccaaacttcaaaacgaaaatgccgaatcaatgtgacgagacagcgtaaaaagcatgaggaagggttctgatatacacatgacccataaccaaaagtatgtacaaaagggaaagaaaaattcagccttcaaaacttagcaaatggtttttcttccaactccggagaggtaagactagacctaaacccggctctaattcttgaatttttccagatcagaacctgaaacactacaaatctcgtaatgcaaccttcttgcttctacgatatcaataatattaccactacgatcgttagctattcgatttggaagagatatcaggaatagatgcacaagacgcagccttgtgctggatgcttttcatgctcagctccatgcttctatgaaccatgtcctgcagcagtttcttagccgtttcagcagctttttctgccccgtcgacttgtactgcaatgccatagacaattttctctagtgttaatggagtcatttctttctcacgaggggtttctctcagtaggtccaagagaactctggctctatctcgggactttgatgttccatctactgttgaacttaggagacccgggattgcaccttctttcagtatgagttttcggtacttatctcggtcgctgcggcatagagaaagcagagctccaactgcgtgttctatgctgagtggagaaccatcctctacagtctctactaaagtcagaataccatcttcacagctggtgatggcatttcgcccgtcctcagagtgagacaggatcatctcaaccaaggctgtggctttttcagcaaacttggaatgttttttgcattctttaaggaggtggatgagcgggtagacagctttagcatcaagaattggagcagagtactctttgcaagctgataaattatgaagggctgtgacagcatctactttcccttgtacagttccggagctaagcatctgaatcagaagcggtggaactccagaacttataatcatcgccttgttggctggtgcagctgaaagtgttagaattgctgcagtggccaattcacgcaaactagcattgtggagcttcagaatctgtatgagaggtggaacggcaccggctttcacaatctcaatcttattcctggtcagaaatcacaacccaaaataagtaatgaccaccacaagaactgaaaatgcaaatctatttccacacagattacaaaggatctgtagaaaatactgctggagcaagtaggtaaattacatcctacatttgctatctttatccaaatagcagtaaactacaggtaaagctagacctagagcaatcagatcagtgtccaaaaagcagtatcctcttggtttcaacagatctaaagtccaaaatgtagctactctcagtacattctgatgcctgattgatagagttaaacaattgccttaacactaaaactacaaatccagaacaatgtcataaatcaagctctgagcagagattagtgaagtcactaatcctaaacactgcctaaagcctcagatcgagttaaattagacctagaagacaagacgagagaatcagtttctggtacatggcaataaaacctagaacaatccaagagagattaccgttcatttctaacggcgaggttaaggagagcgaggagagaggcgtgacgagcatcaacgttagaggagaagagcatgggaacaagcggcgggataacgccggcgtcggcgagttttgacctagcggaagacttaaccggagactttctaagcagctttcggatttccttagcggcttcaattcggaaatcgagatctccatggagaagcttcttggagagatgtagaatcagtaattcctttgtggttttccatgtgttggtggtggtttcctcctctgcttcgtcttcttccgatatatttgccgtcaccgttgagtcgccggcgatggaagccatcatctgattctggttctcttccaccaccattatctctgtctctctcgctcgcttgctcgctcttgtgtttgtttctctctagtcaaagacgaaacgacgacttatcgaatcatctacttaattaaaacgaaagttatggtattagttgaaagagcccatatttctcgaggttagttagttcacaatttaccaaccgggacatttcaatattttaactttttcaattttatgcaaggaaagaatataagaaagaattagctagaaaaattattttcaaaattaacaacaaatcccgaatatttatataactatttaaaagtataattaggttgttcgtttgatcgccgcatctatttgcgacagcagcaaccatgatgatattcgtttggtggacgcaagacgatgtggtcaaacgttaaggcaaacgcaagtagctgcggttaaaaattgttgacatcattttacttcaacaatatgcggtagagtttgctgctgccgttaggcgtaatgaaacaaatagactaacacaaagaataaacgactacaatttataatttttcatttataaaataaaataaaaattggaatatattgtgcggaattcctatatatcagaactcattgatctgctgcttcttctgaaagttcttaagtggttccacgatgtttccattttgttctgacttccgaggccaacgagatgagtccaataaacaaagggcacggaaacattctttttaaattaggtttgtttttttatttttggtttttggtttttcccggaaattgtatgaagtcttcgttacagtttctctctctcaccttctctgtataaagtcttcttgagatcgaaggataacttcaattcaattctctccaaggtacacacaggtacagttttctccttcattctctcttgtttgagatttctgaagatgggtttgttaaaaaagtgtacttttttttgttctctctcgtgtagctgatttttgtgataagaagattgattgagatgggtactagagctcagcagattcctttacttgaaggtgagactgataattacgatggtgttactgtaaccatggtggaacctatggattctgaggtttttactgaaagtcttagggcttctctttcgcattggagagaagaggtattaacaatatatataactcagattcaagccttattgtttgattgtactgataactgataaacttctgagatatgatatgagctcttaagagtttagaggattgtgataacatgaggacttagtcagagtttatgatttgcaggggaagaagggaatttggataaagctgcctcttggattggctaatcttgtggaggctgcagttagtgtaagttttatatgaggatttggattgacgttagttattgtgatgattagttgaatatcttcttgtgtttggtgattttttcaggaaggatttagatatcaccacgcggagcctgagtacttgatgcttgtatcttggatctctgaaactcctgatacaatcccagccaatgcttctcatgttgtaggtgctggtgctttggtcatcaacaaaaatactaaagaggtagccaactgttctcttctttgcatagtttcgcatacgttgcttaacaaataatgataattcaatgagcaggtcctcgttgtccaggagaggagtgggtttttcaaagataaaaatgtgtggaagctgcctactggtgttatcaacgaggtgatttttacataagattgtttttgtgatcttttactatcccgttaaatatttacaatcacggtgaatgacatgaagagttaaatgctaaaaagaggcaatcttgatgaacgaagctcctaggatcctataccttattgtcctgtgaatgaaaacgagtgaactactagtaagggtttggcttatgaagggtgtcagcgtattgtttaggggagtatattctaggagttggtagtgctgagagttgttggtgaattgcataagaaagtagttcttacatcttacagatccatcaagtgtttactgataatctgtaatgataccaagaatgaaactaagagaatggtggatatgaagttttgattgttgttgtcttttgcttctaactaaaacattccaatgccacagggcgaggatatatggactggagtagctagggaagtggaagaagaaactggagtaagtatctggctttcaaaaattaagcatttcaatcataaggatctcttacttgacattctaatctaaaatttgtgttcttctcttggcttttctcttcagattattgcagattttgtcgaagtactggctttcaggtaacttaaattttattgctgtagacacattgatctggcttaaacgcatttgttcctcattgttcaactctttacactctcaggcaaagccacaaagccatcttaaaaaagaaaacagatatgtttttcctgtgtgtcttaagtccgcgctcttacgatattactgaacaaaaatctgagatcttgcaagctaaggtaaacctttctaactttcagtgttgatgagccaagaaaatgttaaaagttactgacatatatttcaaatttaaccgaaactggtatattgtattacagtggatgccgatccaagagtatgtagaccaaccatggaacaagaagaacgagatgttcaagttcatggctaacatttgccaaaagaagtgtgaggaagaatacttgggattcgccattgtgccaactaccacatcatctggtaaagagagctttatctactgcaatgcggatcatgccaagcgccttaaagtatcgcgtgaccaagcctctgcttctctctgaaaacattctcatctgattctgtttgatctcggcatgtgtgtgtccagtgtgtacaaaacaggaaactttcttctatattattccgattctacaaaattgcgtctaaatatttaagtttataccatctctatgagccactgtaaaacttgccatcgacttctagtctatttccagtgatggtttgattctcccaacgcttacgtgctttttaaagatatgaggcttaagagtgttaccatacacttggtttattcttccaaaatatcttctcgtaaccggttttaagttctcagctgtatcgtctcttgaccatttactacactggtaaatggtgtgaatccaagaaagtgttaatgccattaaaaaggttcacattactttgtatatgtacaccaatttttgcgactcgtttgtactgtgtgcctaacgtgaaaaagataaggcatatatgggctttagccccaaaaaaactttataggccccatattaaaattatagtgtatttatttttccagaaatagaaaatttattgtaacatggaaacatcaaaatttaaaatggaatagttgctaaaaatacttgggttcacccttcacccccttatattcacctcttctattttaatcaattaaaatctgacatttaacaataataaaaagaatttaattttattataaaatctaatttgccactaaaacgaaattatgtatcggtttggatttattagaaaaggttagggtttagattttatgattaaacgaggttaaatatcggtttgggtttagaaagtacgattagggtttagattttacaattaaccaattaaatattggtttaggtttataaacagatttagattttacaattaaacgaggttaaatgtcggtttgggttttgaaaatacgattagggtttagttttttcttacgattaaatgagtttaaatgaaggtttgggtttacaaaggagaattagggtttagattttgtaattaaacgagattatatatcggtttagatttataattatagctttaatttattatgtaatttaagtaagatttgacatgacatgtttttattggttaatgcaaaaggaggtgaatagaagggtgaataaagcttcgttcaatagttgtggcattaaatgttttgaagttttgcacattacttaaagcaataaaatgtctattttagtatccttcaaaataattacatttgttataaaataattacatttcttacaagtaggtactaacaaaatcaatttttatctcacactaaatttcttaaatacatccgatttttatttaataagttaaatcatgattgttttttttaattacacctaaaccgcaatttgtaaaccggattagagattaactaaacttacatgtccaaaacactattaattatggattgatggaacaagaaagatctagtatatctaataagaatatcaccacattaggtaggagctgataatacaatttttgttggagatgcccaacctagagatagaaaaacatttaatccctcttaaagcccttattactatgtgcaatgcaacacatatggttaaaagatattacgacattataatcggaagtttgaactaacactcattttatctcgtattataatctttgtccctattctgatttcctctgtaattgaaagtatactatatttcatattagtgtagttacgatggagcatcatcatgggtcaaatccaagcgaccacaaaggatgtaacatgcatcttacagctcacagcctcacactatttcgactaccaccgacactatctttatagatacacgtgattccaacgtaccaatcactcttttgaatgatcatcacatttttttagaataaaacatatcagatccaacacaagtggaacaattaattattccaaatctccacaccaagtatcaacgtgaacaaaaaaaagaatatgtaaaataaattaaaccgacagatcacaaagaaaaaggaaaacaagattcccaaagcgaggtaaatgccacgtcacttcacataagccaaactccgaaacagagcccgacaatggccgttacgacattacttgttcgagtaatcatcgctgatacggcgccgtttttatcgtcagccacctcaacatcatcatctgacggagcatcggcgctaggtccgtcggcgtcagcctccgcgttcttaggctttttcttactcgacttaggagctggagcggacgtcttaacggccttgtagatttctctaggcaacaacactttatcgatcttgtaaactatcaatggctcttgatcctttaacgtccccattaccttcgccgtcacaacgtccgtctccagcgtcacgtcttctccgtcattttgaacggtgaaatcaaacttgttgttaccttccgtcgctaacgtgttaacggcgccgttacctgatctaagcatttgtaacgactggtaaaccggcatgccgtggtaaagcactaacgcagtcttgttcgccggagaaagggatttgaatttcggcatgaacttaccgacagcgctgtcggagggacagaacaccgttaagcctccgtctacggtatcttggaacgttttgtcggcgccggttgacttcaagatgtcggagaaagctttgcacccttgtttttcgaggattgtggtgaggatgaggtcgctgggactcgccgtgggagcttctgcttccggcgaggttaagacttggctgatgtgaagaacagagatgttgtaaggcttttcaaagacggatttgacgtagtgagctgtgagcttgctatcgtcgtcttggacaccaaaagcgactttaccgccttttatatcggtgatgttgatgtatccagaagttccggtggcggatccggtggattgaaacatggaggcagtggaggtggagccgtcggtgatctggtgaagtttcttggtgccgaagtaatcgaccaggacgtggagagagagaatgttgcggatttggtagagtgagtatccgttagagaggatggaggacattgctgagttatcgacggccaagacggtgattgtttgccggcggttgatctcgtcggcgagatgagtcgctgagagatagtggttgaaagtggagaaatcagggtctttggccaagattcgggttatgttatgtgcatttgagagagagagaaagagatggagctggaaaatgagaaccaatgcggtggctgctcgccggagataagccatttttgggtggaggattgggcggctttgatagaggaattgtgtggtagcatttggagaggagtcttataataatgaaagatatataaaatagattatatgaacaaagctgtctcgcatatttccagcgcagcagcaggtaagtgggctctacatagcttgagtctgggtcacatttgaaagtaagtgtcgacgagagaaacacattagtgtttaggaaatattaaggcccggttcaatattttattcggctctaggtacatacgtagacatgaccaaaatttaactgtaacagtatagtatatttttatttttaccaattttaggtataatttaaatacctacaaaatttaactttcatcttcgtatttctataaacgggaaaggttggatcctattggaaagtaagagacgacgatcgtgggagctcttggagacttggttttgcttttcggtttcttgaaaggcaagattttcaagttagcgtcggttgtgttaacccgtgaatcagatttttggacaaagcaagccaagaagggtgtgaagagagacatgtttggagttgtaaaacttaagtgcgaggttttctattaatttgaatcttggcctaaagtcaggccggtccaaaactaaagcttgtaaagcataattataaaaaaaattaatgacatcattttacaaatatttatagtggtagagtggtttttaaacaaaccactccgcaactgaccctgatatagcaattgagtaaacatattttctgtttgtactataatcgttagaatcaatacatgttttactcaaaagacgatttgccgttgcaaatgttattaacactgcataaaacgaagcaaatgataaaacgattacaagatatgagtaagcatgtgagtttataagatataatttgctgctaaatattttatttcattttcaattaagtaagaaagttttgactaaaaaataatatttatatcaataaatagttattctgtctctgtgccactgtatatacataaacttacccaaaacaaaatcatcattacaaaaaagtgtcgaccacaagcagaatctttcattggtctattacatagataaacaagattggactggatcaatagtatcagcctcatatattttcttggttgtgatcataactacagaatttcacttttatccttcctacttcctagttcctatagacgagaaaggttggagcctacgggaaaataagagacgacgatagtaggagttcttatggactcggtttttcttttgggtttcttcaaagacaagacttccaaattactgtcggttgtgttaatccttgaaccagattttggaacaaagcaagcgaagaagagcgtgaagagagacatccttggaggtttaaaacttaagtgtgagttcttaagttaatttgagcttactatacatgtcagataatgtatatataaggggatggtgaagaaagtcactgaatcttctttgtacacgtctcttttttggaaagtgacattataacttggcggccaagcttaataagtgaatagtttcgttgtccgttttaattatgccttttgacaagtcttcgtacgtgaagttcaaggacttttgactctttatgtaaatcatttggaagaaagagtccacgcgattatatgaatccactgactgaatttatttctgggcttaagttgggccttaacaatccatttttttaatatttgttagcccaaaatacataatcaacccctggactctggagggatcacacatcaccgtcacttttctcagtagaaactaagctgttcaatttcaaaccaagatcaccaaatttgattcccaatgctagacaagaactatagaagctaagcaacatgaagaaaagtgtgagaaggagatcatgagaattttcgtttcctcgatatggctgttctatttgatgagacatgagaaacagataagccttgcttgtgtgcttcaaccattgaatacacctgcactccaaaatttgttccttctcaaccatcacatccaaggatagtcttttaatatgttgaagacgaaaaggaggtacctttctaacagctgatgtcagtcccaaggtagaaagaacatcactgctcacacacttccatgttagagtgtcctttgcctgacctttgaacagatcttcggttccgcctgtaacttcttgttagtttctctaactatatgtaaaaaagagacctagaaagaaagagatagatagtggtcaaacctgtaagttgtacaactaatagctccacataaacttttcgacgaatgtgagtgaatatgtggacgaattctccgagttcttctcttgaaactatagtgcatgctttcttgagttctacatgaaaacgaaatgcttccttaaggtagacgtttattgcgttcctccttgttgccgaatcagcttcctcatttaatataacagatgggaactcccaaagaccagcaagcagaccttgttcgggtctttttacaagaacaaatctacctcctgattggttcctctccagattatgtatctccaaaacacaaacgcaacaaaagtcgtgccttggcttggccttgattacttttgtaggataatctgtcacggaaatcgttctgttttcctcggaaagtgaaaatgcacgacattggctggaaacaggacaagaagagcaacttggctttgatacagtgcatagtgtagcaccaagctccatcagagattggttgaaatctccagggcgtgaaggatccactagctgagcagctagtttcctgacaaagataaatgatttctttatcctctcttttagtatagtctcaatagcgaaacattcgagcaaatacaaaagttatttcaccagaaattcctggccgtaagtcggtcttttggattagctgagatggcttttaatctagcaagcactcttatcacatttccatcaacaacaggtactgcctggttcataataagtgtcaaaagacgtaaagataattacttagatgtcttacattgatgactgaaaaaaatgaaactgactcacctcattgaaagcaattgaggcaattgctccggctgtgtactgtcctattcctttaactttcatcaagctagacgcttgattagggaaaccctccgtccctgcaacaaccatctttgcaccctgtgagaatcaagacaagaagaaaagatcacaatgatatttagtgaacgtatcaactaggatcaaaccccagattgcagaagagtatttacctctaaaagaaaacgtgcccgccgatagtatcccaaacctgcccacatttcgtttacctcctgcagcgcgaagaactcaatttgattagcagtaagaatcacttttttctcattccccctgaagaaaacaaatcccaatggtgtgcattgaaaaatagagactaatagagtactcatttccttactaatgatgggaaaatgcagagcaaaacctaagaagattaagcctttacttcccagttattacacatcaaacatgattctctaaaaccttctttacaaaaaaaaaaacacaaccacatagggaatcaaatggaacatttgtaggatatattctcaatctcccacagagtaagatagaaaacacagacactctctagaaaagagccaatttgccaaacaaagacaagcaagcaacaacataacacaagaaaagaaagctctttcttctaacacactcacacactctttacaaagtagcccatttgccaaaacaatgacaagcaacataacctaagaaaagaaagctctcttgatctactaacgataagattctgcagagcaataccaaaaaggtgaagtctttacttcccaactgatgcacatgaggattgaaatagtttaaccccaatttcccacatagtaagactgtaaaaacacacaacagtctatactaaggagcccatttgccaaaacaatgacaaacaacataaataacccaagaatataaagctctttcttcatctactaatgataggaaagtgcagagcaataccaaaaagatgaagtctttacttctcaatcaatgcacacaaggacccaaatatgatagtcgataaaccccaataaaagaaagctatttcttcatctaattaattctcccaaattgaaagagaagaatcacctcaagagaagcttgaccaaggtcataaatggttggccatttctgcatccaacgtttataatacttcattacagtctgaaccctagtttgctgaagcataatctccgatacccaaacctcataagctcttctctccttttcactttcacttcttctgttcctccatggaagatctctcttattcacatcgtaccaatcaagcaaacccattctgattttctgagtttcattttcactaaagagatcctctatatctcctccaagcgcttcttcttctgcttctgcttcttcttcttcttcttcttcttcttcttctgattcttcttctgcttcttctttgtctgcttctgcttctgcttcttctgctttttcttcttcttctgcttctcgttctgcttctcgttctgcttctcgttctgcttcttttttctctcgacactttctcatgagtttctcgcgaggagcaaaagattgggacatcgttttggtcttaaagctcgaaactttgcaatgaaaacttagaatggtctttggattttgtctctgtgaagcgaccgttgatctttcgaatgtagggtttagagccacgcggagaagacaagccattcaattaggaggaatgtggactaaattgaaacttccatatagaattagagatattaaaaattatgatacttttgggggatgactatgcaaaagaacataacttctggggtaaaatgtaatttatatattaaaggactaattgtctaattgacacaacgttaaacagtctttctatgcccatacacaaaaacaacaacaacaaaaaaaagattttggtaatcaaacccaaaactgaatgtgatccatgctactatctaaattgtctgtacatattatctcaaagtcacttggattgtagaattttccaatctcaaattatctcaaactgaatgcaggaactaaacattcttcctctatacaatcttcttcccctattctatcgccgtccttgatgtccagataatagctacaactaccgcttagacgctcgtctacctgcaatggagtaatacacacaagtgagaaactaaaaccacccaaaaacattatcaagttcaagtgacgtgaaatcatcaagacaattggcaaatgacgtgaaatctgaaacttcaaaaacgatcagtcttgaaaagtcgtaagcgagaacaagcaaaagcaagaaggctgagttctgatagatgagtttagaaaagtaggatcatacttgtatttctggtcctgcacaacggttgatccctttcaggtggagctttttcgacatagggagcaatcaaggtatccaattttaccaaccagagagcaatcgcagaagttgtttgaggcatcgaagggaagcaatttatgatttctcccattaaagtctgcccttgatcactacagtgccatagccattcttcattgattgccccaacaaagtcgccaatcaccttcataaattacacataatgttttatcaatttaagattcagttggaggacagtcaatttgaactaggaaaaggagcttatataatagaatgaaacctgcgtaatttcagacacagatgagcttcgccgaagtcttttcgcccataacctatgagctgactttctccatgcaccaatcaaggcatcttcaggcatagcagactgcaacatgtttcagcacacgtaaaacaacagaggcatctcttaatacaaaccaagaaagtaagactttgagcactcagaaaaaaagtaaagcaaaagactattgacatacctcaatggcatatactgcagcttttagtgattgcaactgggaagatagaactttatgatccggaaatgtatcacactcttctttcctcatacatgtggccgcatgaatcgcatatctttcttcaagatctatatcaacctcaaacgtggcatggcaaatcttacagtgcttctcatctctccaatacaaatcatggcaactcttacacctagtaagtgaatcaaggtaggatcttcggcggtgtttaacagaattgagattaaaattaaaatttgcccatatccaatcatcaaattcctgaataaggctccacaataagcttttctcccgcttacttccaatctcaaatactatagccgcatgttgcgaggagaattgatcattggcaatttcattcagacataggttgttgtctatatcagaaacaggtgaagaactgtcctctctaactatatctgtgaaatgggctgtctccgactgggtcacctgtctactcagcatggcttgacaaagaaaactttctcgtttctccaacgactcaataagacgagcttcccgtctgcccctatcgtccaaaactgacaacagcgcccgcaaagcctacaccaagcgaaagaggaaataatcaggcacatgatcatataactttcaatacaagtttccatttaaccagcagagtgattaagatttcaggaagagtacaatgacattacctccttgttgttgataacttcccaatgaccatcttcagaagattcaaagaacacacacctatgaccagggtcatttgcattgcatgtgcctaagaaaagccagtacctgttgaaccttcgatcagaaccaaggtacacagattgcatagggtgaacattattcgctctatttccagccagctttgcaaatgcccccacaattgatgaagaatcaactggatgagaatcagacgatttagatagtgcttttattccataaagctctcctccatggacccatgatccacgtggatagctgtactgattagaggaggatcgcttaatttttccaccagaaccatgactatagatactaggggcacagtcagccacagctctcggtagatcctgtggtgaaaaataaaagttagcactacgcaacggagatatatagatgtaacaaaaaagctttttccagtaactttcaaaaaaaaatgtcattttcttaagtttcaaagaagggtgtcaagttttagctcatatctttagtcaaggtgccgccaaaataacatggatcaaaagtccatctgcccaagattttattagacatgcaatgttggagcgatctaacactcaggttttaaaagttattcagacctcgactcagttgaaatgttgaaatatttggtctaaatagtatgtagattacctccattctgatagtggaaccagaactaagaagatcaatcaaagccacaaaaacatctaacttctcttcaacgcttaggtctgaatattcgccttccattagccccaacagccatggttctccgggatggctttcatcaatctcactacatacttcccgcattttacttttatgcttccgccttttcctacacttaacttttcgaagtgcaggattttctgaaacatgttcaatttcatcaccagaactaattgagcaatcatcagattcatcatcaacactcccggagtcgtccgaatcagactggctcttgtcagggtcctcagagaaacaattaacacgtacacgatacgttgattctgatatcttttcgaataatgtaatatcacttgctagagttgaacatattgaattctctcgttcttctggtacagttgcaagatttagcacagcaacctacaaaaccacacaccatcagcatattccattagatatcatctagggtttcagagagcagccaaatagtacaagtaaacgaccaaccaaatttagtccaaatttctcactttatttacaaacagaagctgataataatttaacaccaacttacctctggagcatcggctaactcggatattttcaagccattattgccttgcccattaagcattctaaataattcaccctttaacgttccaagacgaaggccatactttttcatgagtttcctttcctagagaaagaagaaaggtaacatcaaccaacaatgcatcagaaaagaaaatgccgaactaaataatacaaacatgtggatatcatcaataacaaaatataatcgagcaagagccttcaattccccacatataactgatctatctccaagaacaaaacaagtagatgctagttgctgaacttcaatacgaaagaaaaggacaagaaaatcatcatggtcttgaataaaatatagccaagcaaagaaagtcaacacaaaatgtttcaatgatcaaacgtgtcagcaagagtacaaaatcagtaccttacttagttcttctgattgaacagcacacttcaatgaaccataaccagcggcaaccaatatctgccgcaatagttccgtccatgtaagagaatttaatgaatttctccacatatcaagaataagaatttggctctcaacctgaaaaatatcgtggaaaatgtcaaaatatatcccgctgtgctactattttatgcgtttatgaaaataaagtataaaaaggaagcacactgaaagacaggccacggagatgggaagattttaccataaattatctaatgttgatcctaaaactccattatactatcaagttcaaaaatagctcaacattagtgcttaccgactgaagcagggctagaaacttgcatgatatactcaagtttgaaaaagatcccctttccagctcggtttcaacatcaagcaaaagcagcttcagcagggaaagatgaattttaccaaggagcaaggaatcctgaggttcaaacacagaaagaggaaatacaatatacattatttgtcagaaagataaacgaagtgagaaagctgtaatatacaataaacaatttccttccacaatagaaaaaggtatgaaattgagtgttttttttatcagataagagcgaccaccttatcgtgaaatgcccgcgtgaactcgtctagtgtaaaaggacctatgtcaagagttactgaataagtatataggaaatggacaacctgcaaagagagtactgagtcacttccaagaaagtcagaaatgagaggtaatttatgaacacattaagatatcgccaagtgccaattttgacagtttaccttaaacagtttcttaacagactctggagaagaattccatggatgcaaaccaaaaggcatcctcatctgaacagagtttgggggaaacttgggcaataaatctggaaacaataaagaactgtcagaggaccgcatggcactggacatgtaacagaagaacatgaacgaaaactctttcatgtaagactgacttacatacctttgcaaagaaaacaaccatgagatccactactaggatgatggcatgaacatgtcaacggatttcctcgctcatgtcgctcacgcatctctaattcctcgtcatccactagtgtcgaaattgtctggcaggtttctttaaatacctccccgtccgcggcaagctcacagttttctttaaattctctctgagtttcatctttgtttaattccgcctgcagcaaagagtcaagtctttgtttgcatgtgactataatgaatcacaagtgccaaataaagatcaagctacctctctatgtatagaacgcctcttcttttctgtcgacctcttctgcaacagtttctgcttctgaaaaaagaaaattgcagttagcaagagatttaagagaaaaaggcaacagaaagaaaatgaatcataattatgaaagataaagtaggcaaccaataccagtattgatgctaattgtctttgctttttcttttgatgtgggggattacgtgctgagctttgaggtaatgtagctctttcatccaataaatcaacgcaaggagatacatccctcctgtttggattcattacacgccatacagtcatcaaaccctttccaataccatgtttcatcacagtagcattctcttgaatgcaatcctgactggtatgatccatcagctcagaaatctaaagaaaattaagatcagggactaagtaacttagcgtatccaggtaaaactaccttatgaaacaacacatatccactacctttctttttcttgccactttctgtttctgttgaccgacagaagaagtgcccagccaagaagctagcacaagagaaagaagtccacgttagaatcaatataactatacgatacttcttgaagtcatacaaaatcaagtccgcactcatccagagtccaattatccagtcatgcatatttttcattagaaaaatcaatactaatatgaaagcattaatttcatagtcacattataaaagctttggtgttaatagtcaatttttcagaaaccctagccttcttcattatacaggtttttatattgcgatgtagcgataaaggtggatatacctttgcgagctccagacgggagatgatcaaattcagaaccaagcgatggaccatcctttcgaaaaactttagccaaaatgtgtgatgaaggcaacaagttttgacaactggccttccttgttcccacaatacatctttcctcaacagctactccaacgcatctggaagatgtggaactcctcatgagggatctatcgtataactgaggattctttgctcccaacccatcattcgccatggattttacacctttccctctactccttcttctcttgaaccatccacgtacttccttcaatgttaaccctaaagacttccccaagtcctccatttccttaggagtcggatacatttgctctgctttcacaaatacgatagctatcagtgacagcaaaagaaacgaaaaaccaaaagagaaatataaccaaaagtaaaccatatccaaaaagctaccacaggaggccaattctagagatattcttacaaagatgatcaacacaaactaacatatcatcttatgtatgttactacaaatagaaaaaagaaaaaatcgcacccaaataaaaaccctcaagagcttgaacttgtagtggcgatttcctcttcatttccacttaaataaacttcagaaaatctcttactctctcttaaggtatcaaaaccaggcgcataatagttaaagccgtctccaacatttctgcaacatcaagcaatcaattatcttcatcatcattatcccataaaaactgatcaaaaatcataaagctatcagaccacaagaggaagaagcgatcaccactgatcacttaaatcgctacgcttcaatacaacaaatccaaaattaccggaaatgaattcaaaacaaatgaattcaacccaataatcgcatcaaatgatgaacacacgaaatcaaaaaagaattacccagaaacttagatttccatagtggcttagacacactaaaatgaagcgatacacaacagtagaagtacaattaaaagcaaagagcaaagtcaattcacaaaaaccattagaattgaagatacccgaatctcagtttcagcgaaattgatggaaaaaaacacaacgaaatgaagatgatgatgatgataactgaacttaagaacagtcactacacacacagaaaaaatcccagaaaatgaaaagcacatggaaacttacagagagagaatcaagtgcagagaaatggaagaaaggaggaggtagaagaagaagaataagagtaagattttagaaagagaagagagtagtagggttttgggttttttatcatcttcccttctttctctgattctggggttttacggatatttgttttgtttttcactcctctcttaaaatgctaaaaatatctctgttcataacacgacgtagttttcgtcagtctaagtaattagggttttttcgggaaaaatcaatctcccggtttaaaacccggttatttcacaactaaaccggaatcttcattggtttcgagttacatatagtattaatttaacctcgcaatctcgtttcttcaaggtctttgtataatcatcatcaatggagaaattggcaaaaacagcttcgacaattccgaaacggacctcaaataaatcccaacccgattttgattactctataaggaagcaaaaggttccttttcgatttctctttctgtgttcatagcttagaaagatggatttagaggttttctttttgtgttatgcttgttgactgaagtatctgaaaatggcattgatatatatacacagttcagagagaattgcttcagaagagttagagaagataggactcgtttactatggaaattaaggatctctgattgtcaatcttcagatcaaaaggtttttttttttttttctcttctttgaatctcaacaatggaagaaaaaagcttgctttgttaatgggtttttgttttgtttcaggagattataaattgtgctttccaagatattgtttctgatgaattgaaaaagattgaggattcgtcgagaaacctttcggggaataagactctgactgaagattgtgatgatatattatgggaatatgaggaaggtcttaaaggtgtttatgaaggtgatagtgaagagatattgttagaaatgcaacagatattctataaggatttgttatcagagactaacgtaaatggtacataaaccattcttctttgcttttacaattgctccatgagatttcgaatgaatgccttgtgggtcttcttcttcttttaggatcatttgttcaggttgaaacatgggaagacgaggaagatgattacttggccgctttagtttctcagaatatgtgtttaaacagtgaacaggtaggttctctttcacagagtagaattgttcttctcaagaccttagaaaccagttaactggtttgatgtgtttgtcaggaggaaagccagatatggtgtccgatatgcaagaaaggagagcttatggagaatcacagacatatcgattgcaacatgtgtgatatgcagcttaataaaggcgaagaggtgcaggttctttgtccttgtagctctcattgttattctaagttactgaacttgtccttgattctttcttatcaggttaatttgaacattctgcaagaaaggttagcagaagcgcacggtgaacatctccagagaggatgcagattaaaacccgaattcagtgttcagagtgtgtataatttgaaggctttgtacataacatgtgaggcttgtaaaacgtttgaggttgttgtataaagctcttaacttaaagaaggatacacatcatttctcatgtataccactcgagatcattgtaggttagctggttaggcatggtggaagcatgcagatgttgctaactagtaacaaaaaaaagaaacactcttcttaataataactgtgaattgatggtttattttgttaaatgattcttggaacatccaatttggtatggtgaaacatattcctaatgttcaatgtaactagcctgatgataccgaggtgcgattaatcgaaaaagccacagaaattacaggacgccacttaaaagaatgttcatatatgcatatataaatagtttggaaacaagaatacacagctctcaagtattgtgtttttttgatacagaattcaacatcaatacatttgacatcatactcttgaagaagagggtaatgagaaggaaaaattagcaacaaaaaaaagaatgcccagttgctgcgtggtatatgatgatgcagtgatgggtaatcagtctggggaatacatactctatcgacaactctctgcttccaacttgggcaccatttttggctttcgaattcgaatgaatgccacatgcttcatctttcgcgctagagacgaacaacacactctcaaaaacattatctcaggttttttcaaaagagttcctctgagttgaatttgttccatgcttcctgtttattgtcatgagaaaagagttcaagccagttaatatggattttgtacaattgtgcggttcttctagtcatccatgaggagacgcagtctaagtggatttttttggttcctttggtggcatctgaaagtagcagtgatggatttagttccagaaagatgttgaatcataccttgagcatgtcgaaaactttctcggcaatgtatttctgctggagattggctcctttttgctgaactttgtcaggatgtatacagagagtggccttcctgtaaactttcttgacagatgcaccggtaattaaatcggtcaacgatacaggctgccaaccgcattctggccaaagaacctgctcattcacataacaacatcagaagagattgtggattcataacatcaaagatacaaataaacatcagaggtacaaataataaagaaaacggacaataagacacacatattgtaatgttgaaagcagagcacgcaagtttccctccttccctgcaccccaacgtcttatctcaacatccagggtcccaccaatcctctgaaatccagaataagtatggtgattaaacaaaaaaacaagacagagaggatcaaggatggtcaataaacacaagggaaaaaaaggacggatggtcattgttgagacagttcctaaggtagcacaatatattttacactaatgactgcaagagggcccagacttaagtatctcaacaaagaaacatgattttatagcaaactgaaacacgtggtaatgaaagttacatctttctcagcttgttctctttgtacttgaagatcacgttcatttttctcagcaagtgcttttgcctgattgagaaaagaattcatgttataaaacatactggcaaatctggtgtcaatgtcagataaaaaaaaacccatcaaataaaactctaatgatacatacagcccgctcctgtgtcctctggtgacgttccagcctggcacgtcgtctctcttcagtttctccatcaacatcttgaaacccaccagattgggaagctggagctttacaattcaggaggtttcagtatgtgaccaaggtaaaaagacatgaaaataaagtgcgtagcgacagaatattatggtcacatcatgaacctcagaaattgcactacctccaaatattgaactgagatcatcaacaatgtttgttgctgaagaggcctttctcaagttctctgtagggccagaaggcactcgcgaagatggcctgctagattcaaaagatcctcctttgttccatgaatcctggaaaggatcctgtaacaaacccagagttatagaagtagacaaatcaccggtaaaggacttaaagcggaacagaagtagataatccatcttaccggagggttggttctctgtcttggaacactgcttggtctagaaaccgagttaaagaaggagtcaagatcattattattctcttgctgctgcttagctttagcttgagcagctgcccttccacgtgcctcagcagctgccctttcaacagcagctcgttctgccctaacctttgcttccttttcccgcacttcagcattcgccctttctctagcttctgctgcagctttctcagccttttctcttgccccagcagctgccctttcacgtgcttcagcatgggctctttgaactgctgctctttcggcgcgctctcgggcatcagtaaccttcccaacagcagctctttgaactttcgcatgagcttcagtggctgctctttcgcgtgcttcccttgtagccctctctaccgcctgtctagccaacagtctttccctttctctttcaattcttttctgctctctttctctctcctctctctccctcgcctgggttttttccatctctgcctccctctctgccctttcacggtccaatctcacttgcttttctctaagttccctttcacgagaatcataattttccgtgtgatcgccttctctacttctacttgccttcaaactttctttctccctcctttccttagcatgcctaaactttgcttctgctttatccatggcatccttcatggcagcagctgatgcagctgcagtagaaaaaacatctgaatcttcaccagaggaaggatcaggatatccattcgcagctgtctgatttctgccaatagaaaaatcgtcgagttcatccatttgagatgctgtcgggctatttacagaagctcttcctgagctaggaacgtgtgagtggtaagcagacgtcggtatagaaggctcattaaccttctttttaataggacgtgtaggtcttggtggtggaggtctcgtaggtggtggagcactcgtaggttgcgtaaagagggggatctcagatacagtaagccacacatcatcagatgattcaaaacttccatctgaattggtaggtggtggagtactcgtattctgcggctctacaacatcatcaaatgaaacattcttagaatggtaaagcccagaactttctactggtgactgggagccactgatgtttcctggtggccttaaatgactcttgcctctactattcatatctggccctgattttccaagactatcgagaggatcagtatcaacaaatactcctccgtggacagatgaatgatcagtttttctgctgttgaatttaccaatttcctccaatggatcagtgaaccctcctgtggaaggttctctaagggttgatgtagactcctccaagactacaaatgggtcttctttcacattagaagatgtctcggcagtccgatacggaggtttctgggattgactagttgtctctgaagttgtcctgcgcagaaagagtagatcatcaatcaattggtaaacaagttatgcctataccagcaaagatcaaaatgaaattttgcatataaacgagttatgctttcaaagactttctgggagttatcttctaggtttaagagagtacacataagagacccttgtattgtgtgcaagcaaacatacccttgagcagctctcaagacaggtctaggagaaacaattttgaagagcaattaatggatataaagacattgagtatagttcatgctacaaagctagatataaaggcactactattatgaaagcatgaagtctctagtctaagctctatacccttgagtcatttcacgcaagcaaggtcgcaaatttgaagagcgggtgacaggagcaaccctaactagtaaccacagatctaagagcaatgaccggatataaagacattgaatatagttcacgctacaaagccagaagtaaaggctctcaagtcagctctagctcctccataaccactgatatagttcatgctacatcacatttcattacgtgatggctctaaattctacacccttaacttctttcacgcaagcaagccctcagatttgaaaaccaatgacaagatataaagaacaatgacccatttgtagtcatatgaaatgaaattttgcatatgaatgaccctaacagcagattaaaggttgaagatttctcttgtaagttctacaaagtacacataagagaaccttgtatgctagcaaaaagctcttcagtaagacctaatatagttcatgctacatgtcatcatgtaattgttatggctctaagttctagacccttgagtaaactctcaagtcagttttaaggagaaacaaatttgaagagcaatgtcattcaaaattggatatgaatgacaagcaaaaggttgaagcttttgagagcaatataaaaaaaacttgtagacttgtagtatccaagtaaacagctatccataagcattatacagttcaagcaaaccaaaatctaagcttcatacccttaactaaaatcacgctagcaagctttcaaatttgaagagaacagcttccataagcaccaaatgctactacatttcatgctctaagctctataccgtttattcatttcatgcaagaaagctccctagctagtaaccataaacagaagaagagtgaatgaattcttaccgtttagctggaggagagctagtgcgaccaaacccgggaattaaatcatcaaaaatggaactacccttctcctctcggtcactctctttcttccccaaattgtttcccatgagatcatcgaaaggagaactgttctgtttcctgtgcttcgtaggagaagatgagatagaagagaaaacattctcaaacctagctgactgagaagaagtggaagggattttgagctcaggaatagactcaaacacatcctcatcatcatacacaggcttatcataaaccggcatagacgacgctgatttggatttgggttccttgaacataacatcatagtcaaaagcaggagcagatggagaacgagaatcaccagaagatccatactttggtggtggtccgctaaacacatctctgaagagaagatcatcaccatctcgaccaagatcgtcaaacaccggcaaagaatccgactttttaccagcggcagaggcgaagctataagaagaagcgaaagtgttgaaatcagcggcagaagagtttgattgagaagccatgggcgcagatttgccttgaggtttcaatccgaagtctctcgctaacaatcctgtgaaatcatccattggattcctttaaattctctagctccgaattcgaaaagctttagattttgcccactagaaatgaagaagaggttatcttcagatctgagtcgccattaacgaatcggatcaaagcatttgattttttaaaaagctcttttttcttcgttttccgacttgtttatggtttcttctccgactcgtacatgtttcccagtcttcataatttcttcattattgctaaatgggtcctaaagtttcagaaataacaaatttggtctccaaaatcttaaaaaaataaaaaaagtaattccttagagttgatcctcaatatatataaacttataattatattaattaccaaaatacaattatatgtttaacattttctatagcaatgaaactcttagaattatcaaaatatgtagaaaatatttgtcaatgtacaattttgttttttttgtgaataaattttggtattttacattggttcaaaaccaaaatgaataaatccaaaactctagccaaagtatcaccgaatttataagacttgggggacccaaattgaaaactctgaaactttaggacccatttagcaaaaacgaagaaattatgaagacacccagtcggagaagaaaccagagacaagttgggaaaacgaagaaagaaaaaaagagagcttttttaaaaatcaaatgctttgatccgattcgttaatggcgactcagatctgaagataatctcttcttcatttctggtgggcaaaatctaaagcttttcgaattcggagctagagaatttaaaggaatccaatggatgatttcacaggattgttagcgagagacttcggattgaaacctcagggaaaatcagctcccatggcgtctcaatcgaactcttctgccgctgatttcaacactttcgcttcttcttatagcttcgccaccgccgccggtaaaaagtccgattctttgccggtgtttgacgatcctggtcgagatggtgatgatcttctcttcaaagatgtgtttagtggaccaccaccaccaaagtacggatcttcttctggtgattcacgttctccatctgctcctgcttttgactatgatgctatgttcaaggaacccaaatccaaatcagcgtcgtctatgccggtttatgacaagcctgtgtatgatgatgaggatgtgtttgagtctattcctgagctcaaaatcccttccacttcttctcagtcagctaggtttgagaatgttttctcttctatctcatcttctcctacgaagcacaggaaacagaacagttctcctttcgatgatctcatgggaaacaatttggggaagaaaggggcagatagtgaccgagaggagaagggtagttccatttttgatgatttgattcctgggtttggtcgcactagctctcctccatctaagcggtaatattcattcactagttgctttttctttatctgtggttactagttagggtcactcactgccatttaaatttgagagcttgcttgcgtgaaatgactctttgaattgtagagcttagagtatgaaatgtagcatttagtacttatggagaactgtttccttgtatgtagagctgtttgattccctggtttcgatatgttatttactatgtaccttcatctgtggttactggttagggtcattgctcttcaaattttagagcttgcttgcgtggcatgagtcatggctcttcaaacgtacataatgatgaagttgatattagtgattatggagcttggttggtcacagagcttggatattggttcttttatgaatactctctaaaacttgagtgagaaatctggaaaaaaaaactttagaaacttcaagattcatgtcattcatatgcacaatctcatttttgatctgtggctacggtcattgccttaataattagtttctcctagacctgtggttactagttagggttgctcctgtcaccttctctctttaaatttgagagcttgcttgtgtgaaatgactcaaagggtatagagcttagagacatcatgctttcataattgtagtgcctttatctctggctttgtagcatgcactctattcagtgtctttatatcctgacattgctcttcaaatttgtttccccagacctgtcttaagagcttgctcaagggtataaagcttagagccatcacgccttacataatcataatgcaatgtagcatgaactatatttattagtgcttcaatttgcttgcatactatacagatttctcttatgcgtagttttctaacttaatttcattttgatttttgttggtataggcataacttgtttaccaattgattgatactctactctttttgtgcaggacaacttcagagacaacaaatcaatccgagaaagctccatatcgaactgccgagacatcttccaatgtggaagaagacccgtttgtagtcttggaggagtctgaatcaacccctagagaaccctcccgtactgatccattggacgatattggtaaattcaacagcagaaaaactgatcattcatctgtccacggaggagtatttgttgatattgaccctcttgataatctaggaaaaccagggccggatatgaatagtaaagggaagagtcatttaagaccaccaggaaacatcagtggctcccagtcaccaccagtagaaagccctgggagttaccattctaagaaagtttcatttgaagattttttagagccacataatatgagtactccaccacctaccaattcaaatggaagtttcgagtcgtctgatgatgtgtggcttactgtatccgagatccccctctttacgcaacctacgagtgctccgccacctacgagacctccaccaccaagacctacacgtcctattaaaaagaaggttaatgagccttctataccgacgtctgcttaccactcacacgttcctagctcaggaagagcttctgtaaatagcccgacagcatctcaaatggatgaactcgacgatttttctattggcagaaatcagaccgctgcgaatggatatcctgatccttcctctggtgaagattcagatgttttttctactgccgctgcatcagctgctgccatgaaggatgccatggataaagcagaagcaaagtttaggcatgctaaggaaaggagagagaaagaaaatttgaaagcaagtagaagtagagaaggagatcacacagaaaattatgattctcgtgaaagggaacttagagaaaagcaagtgagattggaccgtgagagggcagagagggaggcagagatggaaaaagcccaggagagggagaaagaggagagagaaagagagcagaaaagaattgaaagagaaagggaaagattggtggctagacaggcggtagagagggctacaagggaagcacgcgaaagagcagccacggaagctcatgcgaaagttcaaagagctgctgttggaaaggctaccgatgcccgagagcgcgccgaaagagcagcagttcaaagagcgcatgctgaagcacgtgaaagggcagctgcaggggcaagagataaggcggcgaaagctgcggcagaagctagagaaaaggctgagaaagctgcagcagaagctaaagaaagggcgaatgctgaagcgcgggagaaggaaacaagggttagggctgaacgagctgctgtggaaagggcagctgctgaggcacgtggaagggcagctgcccaagctaaagctaagcagcagcaagaaaataccaatgatcttgactccttctttagctcaatttctagaccaaacagtgctccacgacagagaaccaaccctctggtgagatgggattatctacttctgttctgctttaagtcatttacaggtgatttgactccttctataactctgttgtgtgtcaggatcctttccaggattcatggaacaaaggaggatctttcgaatctagcagggaatctttgcgagtgcctcctggccaaccagagaacttgagaaagacctcttcagtaacaaacattgttgatgatctcagttcaatttttggaggtagtgcaatttctgaggttcatccataatattctgtcgctgtgcactttatttttatgtcttttaacttgctcacctactgaaaccccctgtgttgtaaagcttcagcttcccaatctggtgggtttcaagatgttgatggagaaactgaagagagacgacgtgccagactggaacgccaccagaggacacaggagcgggctgtatgtatcattagagttgttaaatctttttctttgatggtttttgtatctgacaatgacatgatttgccggtatgttttataacatgaattcttttttccatcaggcaaaagcacttgctgagaaaaatgaacgtgatcttcaagtacaaagagaacaagttgagaaagatgtaagtttccttaccacgtgattcagcttgaaacttttacatgtggtttctccttttccttcctctgttgtgcacatctcagaccatgttgctttgttcagagactttggtctggggccttttgcagcctttagaataagaaattgcgccacctttcgatactgtctcattgtttttttccttttgtttatacaccatacttaatcctggagtgtagaggatctgtaatttttttgttcaatcatcatgcttatcctggatttcagaggattggggtgactctggatgttgagataaaacgttggggtgcggggaaggagggaaacctgcgagctctgctttcgacattacaatatgtaagtcgtattgtctgttttccttattatttgcacctcttaagttcatgtgtacctttgatgttatgagtccataatctcttctgatgttgtaaatgagcaggttctttggccagaatgtggttggcaacctgtttcattgactgatttaattacggctgcgtctgtcaagaaagtttacaggaaggccactctatgtatacaccctgataaagttcagcaaaaaggagccaatctccagcagaaatacattgccgagaaagtttttgacatgctcaaggtaagtgaattcaccatttttctggaaataaatccatcactgctacttcagctgccaccgacaaaacaccttgcattttacgaataactgcacaattgtataaatccacatttgctggcttaatctcctttgtcatgacaataaacaggaagcatggaacaagtttaactcagaagaactcttctgaggaaatcatggggctatgttttgagatgtgtttttcgtgtgccgcccaaaagatgatacatttggcattcattaaatagccaaagatgatgcccaagttggaggcagatagttgtggatagagtatgtattcccaggattgattacccatcactgcatcattataggcaggcatcgcagcaattgggcattctttttttgtcattatccttctcgagtcttgtccttaaagagtacgatgtcaaaatgtagtgatggttatttttgtatcaaaaacacaatacttgagagctgtgtattgttgtttccaaactatttatatatgcatatatgaatattctttttagtggcatggattgtttaggcttttggcaacaacagtgatggaggcaatagtgttaaggttactttttatgggttaaaaaatagcctacgacaaatattcaatgtaaccaaattgatccagtctggttcgagaaatttcaactaagtttgagtgcgtctcacattgaaggcttttgatattcaacaaaagttctcacaaacgccattggtaactgacaagaacaatgagaccaagcttgtttagacttttaacaaaagttgtagaaaccgaatataacaattataggtcaggaccatcgtcactaaaatcgtcatcatctttgatgttcacatcagcatcttctccaaactgaatacagacgtcgatttgcgacagaacatattgaatgctgcccatacaaagcaatgttgatgttaacttcgtattggataaagttagagaacgaactgtgaggaaatagctttacctcttttctttcctcaagttaatgggtatgaaattcaccatcccatactctcccacctaataatcataacacaaaaaatgcaatcatgaaaccgaactacttgtttttataatccattacaatcatataccataccatctcaatcaaggctttgtttagttttgcatattgaggacccatccttttgtttaactctgctagcaatgtgcgaggctccggattcaagtaactaaagccacgtcaaacacaaagcaatttaataaataccgaaactgcaacggagaaaaacaaagggaaaaataggaatccatactcatcaatgttgcttttgtcctgcaagaggtccatttttgagaggatgttgacatgtggtaattcaagctggatcattgcagcgagagatgacatgcaaccactgataaacttggttacatctgtgatgaactgatccaaacaaaaattcatctttagttaggcaaaatggttcactacaataaggagtaagtagtggaagggagatagaacttatataatacctgtgaatcaagcagataaacaacacagacgttgaagttcttctgcttcaaatgctccacaaagttcttgagcacaggaacatgtgtaaacagctctatctggcctattaacagaataaaattcacagaatttaaacatagttgggatgcttcatattggtatgccaacattaaatagctttgtagaaaccacacactttatcaaacacatagatcagagataaactcattgatcatgtatgtacctggacaatcaaagataaggtaatcgtcatccctgtagttctccaattcttcatccacccaatcatgtaagctatcctcaagatacctatggattaaaagttaaggctaatccaaaacatatcatgtaccgattctatttttacacacaaagttaacaacttttcaagacctgattttacaaagctagtaacattctcaagttgccaatgtaaccaaaacaaaggatactccatgcaatacataagggcaccattaggaccaagctttagatcctccatcacatcttccaaagaaataagttctctgatatctgcattcaacgatgtcaaaaaagtgagaagcactcaaaactccccccaaaggtaattgaacaagaagaaacttcttcactcacccatagccacaggatagttgaagatctccgcagcaggatcaaggttaacaacatgcattgttcgaccgatagtttcacaatgttcatacaaagacgagcaataagttgactgatagatccaaaacacacaaaaaaacacagttagtcaaatctcactgatgaaactagttaacagaaattaacttaacatagactatagcataacctttccactgcctgctggaccaataactagctgggcgtaacccattgtagcaagcaagcagaacctctccacaaaagctcttgaaattaacaaatacagtgaaagattctaaaagacgcaaagattgcaacagttatataagcaatacaccagacacctaaaccaaacaacactctcaaaatgtcgcagggacccataaaccagaagcaagaagcaatagacacatttcagtacctgaaaggcaaaaaagatcaaaactttaacactcacatacatgatttagctagggttttaaagacccacataaacccatgaaatagataacctaaaaaagacgaaatttgggagagaaattgaagaaattagaagcagccgacaaaaatttcacaaggttgaaacgaaacccagaaggaataaataatcagaagcatcaatggagaagaaaatcggaatcagagaaatgattattgactttcacctttgacgcgtcttcgtttttctttgctctcaaaacctaaagctcaagcaaaagaagaagagaggaaatttcaagagcttcagttttttggtttgttgcgttttattaaagaccttttttagggttctttatggtttttcattcattacttttttaatagtggtcgtaatatataaatcaaaaagacttttttacttaattattttttaattctttgaaacagctaaacgatttgaccatgcaaaagaactagtctccaccaacgtgtctcacgtggatcaaaaacaatgggttttatgcaaaaaaaaaaaaaaaaaaaaacacattcaaaatcgatatttttacaattttagtttttagatttaaaaaatagaaaataatttgattgaatctaaaataatatgtaatatatctaattttagtttgcaactttacagtaaacgttttcacgatcacatatatttgtgtttaaatattttaaagatatagttgaattcatcatctcgagagattccatttgatatattatttatcaaaattttaacatttgacgataatgaaaaaaattgaattgcgtattattttatattttataggtttattttgcatttctgacataaataaaattgtaaaaatagacgacttcgaagtttgagcttgagatcactaaaagaagttaatgaggtatgttgtttgaaataaatttggggacttgtctcccacaaaaactccttatggattaaatagatcaaggcacacctactcaaaagagtcactatttggtaaataaaagaaaatactactttgggctcttagatgtggaagaaattactcaaatacaaaggagtggccaaacaattttgcaaagttgaggtaaacaactggaaaaaagtttcattctggtatgataactggtttacaatgggctgtttgatggatatcataggagagaggggacgaattgagtttgacatcttaaagcaaatgtcgatggcggaagcatggacataactgcaaccctaaaacaaattgaaacagatctcaccatgaagagacaaaatcaaaccgatgaagaggatgtggtattatggaaaggaaaaacgatgtgtatcaatcaatctttagaaccaaagacacttggaatcacactcgtaccgatacaaataaggtagtttggcataaagaggtatggtttactcacacaacaccaaagtattctttttgcacatggttggcgatccagaacagactctcaatgacaaacttctttctctacagcaactgcattgaatcagaggatcatttattcttctattgtagctatgcagctgaagtatgggaggctctaactataaatatctacaaagcaaactactcgacgaactggacatctctaatcacaagcatatatagcccatggcaggagcgtatggaaggttttattgcgcgatatatattccaagccacagtgtcacacaatttggtgcaagagaaacatacgtagagataaagaaacaccaaaccctctggctcggctcatcaagtggatagacaagcatagcaaaatgttccaattttaagtaagaaaaacaaaattctactgacaatttcaaaaacaagataagtaaaagtttaaatttaaaaaaaatgaactaaaaagctttgtcctattgatcacctaatgagcctttaaatttctaaccgtcttaaatcctattactagttaaaatctttaaattattttaaattaaagatataggttacattatttaaaatatagatataatcaattaaaagtttaaaactcatgttaaaagcatcttaaagggaaatgaaatattaatacaagaaacaaatatatatatgtaaagacatattttcaccagcggtccaaaaaaaaggatatattcacatattaaaagaaaatattggggcaaagtggataagataacatccaatgagaataagacatatcaaaattcatatccctgagagccacaacaatcttaagaaacagatcctctgtcttgccacatcagcaaacgcaatctcaagtttcgtagattgcttatttcttcatcacacacttcaaactcgattttattttaattttcataagagaacaaccaagacaaaaagaacaatggcagcgagtgcatctccaatggcgagccagctaaggagcagcttctcctccgcttctctttctcagcgtctcgccgtcccgaagggcatctccggtgctcctttcggtgtttctccgaccaaaagagtctcttccttcactgtccgagctgttaaatccgacaaggtatcttctttgttaaccatcggacacaaaatgaatatacaaattatcagtcatgcggtttaatatcttaggaaataacatgttatttgataaatcaatttggttaggataaaacggccataataagtacaactagttgtgtagattggccatattctttagtttgatactttatgttttggtattacataaaatatccataaatatttttaacgatttctatagaacctcttttgtggaatttataggatcgaaaaagaataaatatttaggttcttgatttatgcaatggcaagttatgtatagaagaaaagaagttatgtatagtgagtgtgctctaaccactaatatatgtaatttgtcagacaacattccaagtagttcaaccaatcaacggtgatccattcatcggaagtttggaaactccggtgacatcaagcccattgatcgcgtggtacctttccaacctccctggataccgtaccgccgtcaaccctctcctccgcggtgtggaagtgggcctggcccatggtttcttcttagtgggcccattcgtcaaagctggcccattaaggaacactgcttacgccgggtcagccgggtctttagccgcggctgggctggtagtcatcctcagcatgtgcctcaccatctacggtatctcttctttcaaggaaggagagccatcgatcgcaccgagtttgactttgactgggcggaagaagcagcctgaccagcttcaaacggctgatggatgggctaagttcactggaggattcttctttggagggatctctggggtgacttgggcttacttccttctctacgttcttgaccttccttacttcgtcaagtaaatgtagatcaaaatatatcgagtgtactttcaactctcttgcatcattgttttttactctttgtcttgatcaagaatcttgaaactcaggattgttaatgtatattactctttctttatcttattgacattaatttatatttgccttgctttgaaaatgctctaaattgagttcatgataattacactaaatccatagttgtagactgaaaacaaaaagttgccatcactggaacgttgaaataacgttagataacaaaaagtactagaaacactctcgtttcaaaatataaaaagaaactaatctagccacaacaaaatacaaaacttgatactttttaaagcaaccattttgaagtaaaagtgggaaaaaaacaacgagcatccttgaaaagtattttcgaggtcctggaagaagcagtaagaagttcaaccaattggaccacattagcagatcgaaaatggtagacgaagacaccgctcttgttagatacattccatagactattctcattgtatctatgaaactgatcattactaaaatatatgcaatttttcatcactttcgcctcaaccgttattcctagatctaaaatcaatgcttcgcctgctagagacttaatcgtttcccatcttgatgatttaggatccatcttgtagacggcgaagaagcataatctcgtcctaggatatggttccactttagctacaatgatcaaaacttctccagacaaagtgacaacaactttatgacccttccgcaatggcgaagatggcaaagttgcacatctcactggagaatcattaccggagaaataaaaaacatcgacgtttccatctacactaagaacgtaaagcttgttttctttaaacaccatagcaatgatgcaacgttcattctctaaaggtttaaacactttccacctatcatctcctttcttgtgatatccaaaaaggctagagatattccaaacaaccaagtaatctttcctttgttcatctacccacaaaaccgcattgcctattttaatatcgctgccacgggttgattctagagacggaagaggaatcctcactcgagtaaacagattcaaaagatgaaattcagttctatggtctaacataaggaaccagctaccggaactagccaaacaacgactcgtaactaaatcaaacccgaggtctcttactatgtaggttttgttttcatgaggatcgtacaacttacatgaatctttttttatttccacatctccttttggaaataggatgagccatggagttgttggatttgttactccaatgactgttttggaagcaatataccatattgaagaaacgcatctcgctcgatgaaaatcaacaaagctcaagcgttccaagatcaatcttaccaggtccacggcaagtatcgaatgtttcgaatcttcattgaatgtctttttctcggaatcgctcatctccttcttctgcttcttatgtgtcatggccaagtaaagacctagaaacattttttaacaaaaaaacgaaagtaaaattacataaggacgcttccctagtctattcgttatcaacaattattatccattgaatttactaattacatttcgacgggtgcaaggggtgggcattcggggtgggcattcgggtaagcgggttgggttcgggtgaaacctgatcagagtaaaacccgatcatgtacggatcttttggatagagaagtttaggacctaatagagtaaatctaaaatatcgattcggttttggtttggatccaatcgggttcgggtcgttcggatataaatttttgggtcttttttggatatgatacctgaattttcaggtaaatactcatatatttcggataaaattttgggtttcgggtaaaatttagattttccaataaaatattctggtattttcaggttcgggtttgattttttgggtagaagaatttaggacctaatagggtaaaatttcgggttcggattcagtttcagatctattttttcggatcagttccagtttagataatcggttctggttttttgcccaaccctaggtgacactaaaacatatttttcttcaattatattccaactttacttttttacgtaggtaaatactcttccatggaatttataagagtgaataagtgagctcttgacgtatgcaatgtaaatttatgtatagaatgaacattcatgtttgttgtctaataattaataagaaatgtgacacgtttaggcacttttagagaattttattccttttgagacacttgtcagggatgaggtacttttccaactttttcattaaacttttgaccaatttacccctgaaaattaagaaattataattaaaaaaaaagtttcatctctccacgttccctttttttccttattcttcgtcgcttcttcttgtcactctctttctctctcttctcattattactttttttctttccttgcaaaatcaaacatttgagagtttgtcaagatcgtgtagcttcccaacaaatatcagattttaaatattatatcaaataaaaaaaattaagcctaagtaatattatatattcccaacaaatatcagattttaaactatgttcctaattatgcatccaatatatattgtccacgtaaacatattcaaacagttcgcattatataaaatgctttgaatcaaataaaaatatttaagcctaagtagtattatatattctcaacaaatatcatatattaaattatgttcctaattatgtatccaatatatattgtctacgtaaacattatatgaaatgctttaaatcaaataaaaatatttcagcctaagtagtattatatattccaaataaatatcagatattaaattatgttcctaattatgtattaacgtatccaatatatattgtccacataaacttattcaaaaaattcattttatatatatatcaatacaaggtccatcaacaaactttttttagaatatgatacaacgtcgttgacacaagcaaatggtttgtggtgtgtaaaccttatacccttaaggctctgcattaaagcctacattctttaccctaaaattaaacccaaaccctcaattcctaatccttatccactaaatccaaaatcgtaaaacaaaactctaaaccataaaatatattgtaagcataaacaagaaagtgataattttactgagagataaaacaaattcacagcaaatcaaagacaacatgtgtccattgatgatcgtccaaccggtttagtccatgtggtcatctaatgacacacgggatcgtttcatttcaatacacaagttcatatatgaacgataatcgccagaatcagattcgatggaaaaaaaaacgaaaatttttggaacaattcaaatcgtaaaaatgtgatctttacgaaattcgaccaatatcaattgcagatctagatgctaaacataagaacaatgaacaaaggaaacaattttttttaagcaatttcttatatcaaattgatacccaaaattagctggagaacgaatctaagatcaaagtaaagatttgaagaaatgtaaaatggagcattggagataatgacataaatcaaagacatgaacacatgtgcttagtgtgttagatggagaattggagataatgacatgaaaatcaataggaatcatgtgagagagagagagagtactaacttggagaaggcagcggaggattctttttcgagccaatcgcggatgtgcttgatgttacgccttaagatggtgacagattgccttcacatcgtttttgtaatccgaaacttgactaatgaagctatcccagagagcaaagattcattctagttttgcagtaaagagagagaaaaagagcaaaatctgaatctcagatttcaacaaaaccctagaaattcaagtataacaaaattgaggaacgaactgataagttgactgatgatgggaagagggggagagagagatcaaaaccatggtaaagatttttattttcttcccttgattgtgagagaaagagagagaaaagagaggagaaggagagagaccaattaaataaaacgaaaaaaaaatgtatttaaaaggtaaatgggtcaaataacctatcgaaagtgtctgcttttttcaaagtgtctgattaggaattaattttctaaaaagtgcctaattacgtaatattctctaattaatatttggcagccaacatttgatgagttcaacaattggtcaaatgctaaaccgacgaccaaaccgtatgaagaaatggagtgtaccgagaataattggcttaaccaacgattttctttattttaatggttttctgcaaataacgagaagtggtcttctttattgtgaggaactcactttatcacttaagtattctaaagcaatctaggaatcatgattgattccatttgttatttgttcttatgtaaatgagaaaagccaaaagaaaaggcatctagcaacactcttgttccacaatataaaagaaacaaagccaaccataccaaaatacaaaaattgatagtcttaattcttaaagcaaccattttccaccaaaaatgggaaaaaacgaacgagcatccttaaaagcaatcttcgaggaagcagtaagatgttcaaacacttggaccacataacgggatcgaatatggtagacgcaaataccgtttttgttagaatcatcgcatagactcttcccattgtatctatgaaactgatcattactaaaatatatgcaatttttcatacagttcgcctcaaccgttattcctagatctaaaagcaacgcttcacctcctaaggagattctttcatatcctgatgaattatgatccatcttgtagacggcgaagaagcattccaccctcgggtatggttccactttagctacaatgatcaaaacttctccagacaaagtgacagcaaccttgtaatgacacccttgagtattataactataaccattccgaaaccgcagagatgggaaagttgcacatttcactggagaatcgccaccggagaaatcataaacagtgaccttccgagttacactaagcacgtaaagcttgttttctttaaacgccatatcgatgcaacaatcatttttctttaaaggtttaaacactttccagctatagttttcatctcctttcttgtgatatccaaaaagcctagaaatattccaaacaaccaaataatctcttcttttctcatctacccacaaaaccgcattgtctattttaatacaactaccatcagaaacattttcataaacccttttgaaaacatttccatcaccggttgattctagaggcggaagagggatcctcactcgagtaaacagattcaaaatatgaaagtcagttctatggtccaacataaggaaccaactaccggaactcgccaaacaacgactcctagctaaatcaaacccgagatctcttactatgtaggaactatggtcacgaggattgtacaacttacatgaatcgtttttgctttccacattttcgcttggaaagaggatgatccatggacttgttggattttttactgcgagacatgattccgaagctgaataccattctaaagaaatgcatctgcctcgatgaaaatcaacaaagcttaagcgctccaatatcgatctaagcaagtccaagacaagtacaggctgctttgaatcgtcgttgcattttttttcctcggaatcgctcatctccttcttttgtttcttctgtatcacggccaagtcaaaaaccctagttagataaggacgcttccctaattaattaattataacatatttttactttattgacattaattttaattttaattttatttttaagtaattttattttttttattttactaaaaacatctctaacatacatccctaatcataagtgatatatagctgagaatttatttttattttaactgattttttttttctatacattagataatgcatgaaatttatagatataaatttagaattaattattttgaaattggactgtgtcactgacttactgtcacacatttagtgcatatatgagctatgatgctaaaagatatcatccgtgaatgaaaagttacagtctcataagtcaaagaacataaaaagaatctgaaaatagtataaggtaaaacaaaattgtcatatgtatagtactcatgcaaaaaaagagtatttgaagaactatcggaagctcgaaatcaaatatctttttattaattagaaaactaagtagctagaagaagagaatggtgaagagaatgttagaatcacatgagagatgcataaatcttggaaaccggcattgataattagattcttcttctccagctgcttgagagttgagaggcgccattttttcacatgtcactgcccaaatgtgaatttagacttggaaaagaaacgccactagtttctggttcattatcatgactcagatttttatttttgtttactcagtctagatatgtaacccatttaacataaaccaacatatatatttgacagattttttttttctttttttatatttactttacaaattattttatcatttacaattaatgtttgaagattttaaaaacactttttcatatcaactttctacatagattagtatgtacaaatccaaaatatatgtaactaaataattacaataaatatcaatcacgtttttctttatttatttataatatttcacattttcattaattattgtgtcacctaaataaagcacaaaagttaaataaaaaagacaaaaagacactagcttttacaaaaaaaaaaaaaaaaaccttgcctattgcaaaacattacccccatatctcttcatatgaccatagcatttatatataccttcacttagaacaattcataatcaaaatctcaaacattatcaatataactatatagacgggagtcactagttagaagacatgaaattcattacatcagtattcatcgtattcattatgttatctttaattctgactaaaacaatgatttctgggaaagaggagaacgcgacatgcgttatggcaaatcttcaaatatgcaagtcggcggtaacaaccggaaacccacattcgaaggaatgttgtgaaaaactgaaagaacaacaatcgtgtttttgtgaatacttgaaagatccattagttgttccatatattacatatgccaaaataatcttagcagcttgtggtttatcttttcctaattgttgaagttttaaacatttatgacataatctataaatgttataatcatcaaaattatatttgataatgtttatcattggaagtttatcatgtcaaggttattaacctgattttaatatataaaaaatgtgttttcttatagaaatatattgttattatggatgttctaaattcaataactactcgtcttttgctctttagtaaagtatgatttttctatctaagtctctccctagacagaaaatataaccacatcaaactagaattcatgaccatactcatgaaaaatataaatttggatcatgcacatgataagttgtgttagtttgcagcgtgaaacgaatatcagaatctatgagcctatcaataaccttaacactgaagttgcgtccaatagaaaagttaaaaagacactaaaagccaaaccaaagaacatagagggattctaaaaaatagtataattagtgtaaaacaaaaatgtcatatgtgtagtgcttatgtaaaaaaaaaagtattcgaagaactaaggaaagcacgaaataaactatttttttttattaattagaaaaccatgtagaagaagagattagtgtagaacagaactgttagaatcacataagaggcacataaatcttgacaacatgcatccatgattggatttttcttatgaggatgcttgaatgccatttttacatgtcactgctcaaatgtaaatttaagacttcgaaaagaaacgccactagtttctggttcattgtcaagacccagatacttaattccggtatattcaatgtaactctgtaatctagttaatataaaacaaaagctttgagatatatatgcttttttctttttgtatacttactttacaaattcttttattatttacaattagtgtgtgaagattaataaaatactttttcatatcaaatttctacatagattagtattgtataaatccaaaatatatgtaattcaatatttaaaattaatataaatagcgaaaaattgtgtcacatagatatgaaatgtactaaattttttaattttattttcagacaaaagacattagcttttacgaagaaaaaaaacacaaaaaagtactcttgcctattgcaaaacattaccccatctctccatatgagcatcgataataaagatgagttatgttaatcatctttgtgattgttgtttgtgaggctgttaataattcattttaaaaaagggaacttaatagttgtctctaataggataagcatttaaaacgcagcgttttattactaacttacgtcattgtctcatgcaaatgacataagctagagaaaatcttgattcctccgtcaaggcaaaaccacataaagcctatctcctgccgcgaaacaaccgtttaaaccaccaattctctcatccgtaccaaagaacaaaaaaaagataaaatggcggttcatattcacaaccctaactttttccacactcatcatctccgagcatctcttacttctgcctctgcatcaccttcctcatatctctttcatagacactctgcttcaaagtatcctagcttcctctgcaaatccaataacaaagatgtatatcctttctttcttacaacttctaacaaaaaaccttgagtactataattgaatggtttcttcttcttctttttactaacaggactatctcattgatgctcctgtttctgttggagatggattctcttttagtggaggtaatcaaaaagattataccctttttttgtataattgtaaagactaaatctttttttttctctcagggaagtattcggatcaaccgagtccatcagatgagtggttgaagcaagggaaatgggtaggaaaaagattcctctacttagctttaagacatagttttcattgaacattttgattctgcaactttcaggttaaagctcatagagttggcggctctggtgtagaagcaaaagatccgattttcggattaacaatgggagctagctctcaagcttcaaaagatcttttccggtaaaacacactttgagttaaagtttctagtcttatctttgtagtaatggctttaagggtgtctatgattctgtctctatagatggtttagtgtagaatccgggagtgtagatagtcctcctgttatactcatccatggattcccatctcaggtacgtaataatattttcctttgaacacatcttacagcgaatagcttacggatatttttgtgtgactaggcttattcttaccggaaaactattcccgttctttcaaagaactaccgcgccattgctttcgattggctaggtaacttcttttcctgaagttttttccttttgttgaagttctgttgctgatcctttttcatgacaggatttggattttctgacaagcctcaggctggatatggattcaactatacaatggacggtaacatgatcttaaaccccgcttctcgatcaacagaccttaacccgagagagtatccagatttatcagaataatctgtggctttgcagagtttgtttcttcgctggagtcattcattgacgaagtaactactagtaaggtgtcacttgtggtgcaggtacgtaacatcacttcatttctcactgaagaggcaatatttcagatttttcagtgttgacttctctgctttggtgtttttgtcagggctacttctcagctgctgttgtaaaatatgcaagaaaccgaccagacaagatcaagaatctcatactcttgaatcctcctgtaagaaaggaaccttaaacataaccaacctactactttcttctctttgttaaaactaacttagaacttatatatacggtttcagctcacaccagaacatgctaaacttccatcaacattgtctgtattcagcaactttttgcttggggaaattttctctcaggttagtttcatcaaagttgcttctttgtgttttctcctacaacaaattcttgatttatagaaaccaataataggatcctctaagagcaagtgacaagcctttaacaagctgtggtccttacaaaatgaaagaagacgatgcaatggtttatcgaagaccttatcttacctcaggttcttctggttttgcacttaatgccataagcaggtccatgaagaaagaacttaaggttctcataaagcctctctttcttcattcatactgtcaaaaatcaagatttcaagttgatatctagagaattggcatttcattagaacttttacctgcagaaatatgcagaagagatgaggacatcactaatggataaaaactggaaaatcccgatcaccgtgtgctggggacaacgagataggtggttaagctatgaaggagttgaagagttctgcaagagttcgggacacaacctcgtcgaattaccaaatgtaccggttacttcctgatatatatatctgtgagacattgctaaacaataaagctaacttgaaaactgatttttcccttatcaggctggccatcatgtacaagaagattgtggagaggaacttggaggaataatctcaagaatcataagcaaatctgctctattctaactggaaccactccacaagaatattgaaagaacgtaaagaaccatttgtataaactcagctttattcaaaacatactctagttccagtggtacattacatataagtcaccagtaagatttttgtgcttaactttgaggctctataaagtaggagattctccagttctctagtacaaatttgtaacatcctaaaaagaatgtagcttgatctacatgtataccttctcttttgcttccttgaggtatgcatgtgctttctatatatgtataattgtgtccacaacaagcaatctttcatgtttggaatcggtctatccagcactcatcgttcttcacagcatttttccatctatgtttaaaagtctctaactcgacataagtttgcttccgaacctaggtaatgatcattgttttgaatagagattttagctaaaacaaagcactctatcatctttttaaataccaaactggttagaaacttacctcagttctaccagttgacactgatgatgatttgtctgcagcatgcggagtcttggtcttatcgagcttccctgaatccgtctgcttatacacagtaactataattacttcctaaataaaactcatgtagactagtatgaagaaatgacaagagaaccagtttcaaaccttgttttcagctgaacctcctcctaatgtaggaagacccatatgaagtatatactcggaatcaacaataccgatatttttggttcgatcaccctatgccaagcaacaacaacaatactaagaaaaaaacaaaaccaacaaataaaagaatgtacatattagcttggctcagtcacaatttacctgtgcacaatatccaagctgaaaatctataccccatccatggtttaagtcattctataaaagaaaaaacacaaagtcaagtatccagatgttgatggtcttcatgagtctgtaacataattagttcaaacatatgaaatacctgaatcatatgccatgtacacctccaagctgctctggaaaacacaggagccatcatttcaacaaatctgtaggagagagttttttttaatgagtttaagaacaagttatgctttccactgaagaaggaaatgaagattcagttcttttaccctgtgcaaggaggtccagtgctattctcggttgcacctcgcccgaccaatgactttgtatgttctccttttaaacatcaaaacgttgtaaaaagattcattcttacaatctcttttcttctctttgctaaaattttttctattggagcttgagagaagtacctatgtactcttgatttcttgtctcgtgaggtaagttgatgatgcacttcagagaaattgggatcaagagcaggttgtgatatttcaagcttttcttctttaataattgaaacatacctgaaaattttcatctcattagataccacatctttaccaagtgacaaacaatatattctttgtataacattgtaccttctagcatcaaaatggtcaacaccgagatcttcatcccatagaaaaatgtaagaataagctgagacaatatccgggtgtagaaaacgctttgcaaaccacctaaaagagtcacaaacatattcaaactgtacagccaaatgtaaaaaatcctcgtcgggttttacgattataacagaacagttaccatttggtttggtttactacagaaatatgaatggcagtgtcactccactcaaactccttccattcatccacagcaccatcgtagtgaaacagcatcacaacaaactcacttgatggaaactgccatataagaaagtggaaaaacagagatatcacatcaaaactgtttcattaccgagaaggtaatgtccgaggttttaccttcttgacaatcttgttgacactttccttttgtcttattccaactgccatagctaataagcttggtttcggtttctaagcaaacaaaaacagaaaatatagcgttaaaggaatgacaacagagaaacttgtgaacgtttggcaacaggtaaagataccttatcgcgctttgctccccataacggtcgcatttccaagtcagatgtacttgcaacaatacctcgcggtaacgtctcgctaccaggaggcctaagttgtgtctaattaagcaaagcaacatgaaaaaatgttaagattcatatagaaagggaactttgttttgagcagcttattcaacagaccttgcacatctttagtttagcaagatttagtctaattatcgaactccatcccgcgataccctgtcaattagtacactcaaaactgttctataacattattcagattcaagataatgcttaaaagttgcagtctaagaactcatacctctttatagtctactgtaataaaagcattccctataaggaagatcattgcaagaaaaaacactaaagagaacaagcgacgaagagacaagccctttcgtttttgattcatacttaatgatccctgaaaaggcaacgaataaagaagatccataacacattaaactcaaatcacaagaacctaatcagtatttaaacccaaacacacacaaaatgacattaatagggaaagtagtatgatctcattgaacaacaatgccacaataaagattcaagattgtgaaagacttgagagttttaattgtgtaaactcataacgatccacagtttcgtagagaatgggcatataagtagaacatcaacacatgaagaagataaaagacttgaaatttcatgattgaaaacttcaattggattcttgagctaatgaaatttcagaacttttttggtttatttcgacaacttttgaatccagaaatggcaaaatgggagacaaacaaaaagaactaaacaagacaagaagaaaagaacgaagagcaagagaaaaaagcttacagagctcaaaatcttgggtttcttgttcatttttcaagaacagtggtctaaatatagcgaagctctttctttaaaatcaaataagtaaagtgtagagtcatagtgttagaataccttatttttgtcagaattggttattttacaaaattataactactactttagttccttaaagttagcttcgaataggaaaataaaataaaattgggtatgaaagcaattactgtaagaaggtcaacaagtcaaccgttttaaacaaaagtgatattttactaaattcgaaatcgaaatttgcgtgtaggaatcgtcgcaaaagaaggtttttatggcttaaaatgagtgaccaaatgtcattaaaggttcgcacgtgtattgttttgctatgcatttctccactttatataagtaacgtatgatgcgatgtccatgtgaccagcttttgcttagatttgttacaagagaaaagatctaagaaaattagggtgaataatataacaaataattttcttttcactcggaaaattatacaaattgttttagggtcaaatttatctttataggataaagttattcatttacatctacattgaagaagaaaataaaatttggattaaggtatatgaggagcaatgtaagatacattaaaccggttcgtaagatacattaaaccggtttaatgttcagaaaaatcgaaccggattaagttttaggaaaatagaaccggattaatttcgtgaatcaaacataccggattaacagagcttgatctgaaacttaacgaactcgatccataaagggttttgttttgtgagttggatctggcttattccgatgatgaccggagatctgaaacttgatgaaccttacgtaggtttgaaattcgaatcagaagaagaagctaaagatttctatgtagaatactccaaaagattagggtttgttgtgcgtatgatgcagagacgaagatcaggtattgatggaagaacactagcgagaagattaggttgtaacaagcaaggctttggtcctaataatcaacgatcatctagttctagttctagttcacgagaaggttgcaaagctacgattttggtgaaaatggagaaatctgggaaatgggttgttactagattcatcaaagaacacaatcactctcttcaattcattgggtcttcttcttatgattcttttgtacgttttcaaagtttgtatctttgggtctttttgatttgctttgctattacatgacttggatgcttgaagaagacagatttgtgttactgttttttgcatctttggttcttgtttgctactacaaggcttgatgtgttgaagaaagagtgtgcatctttgggtcttttttatttgctattacatgacttggttggttgatgaagagagatttgtgttattgttttttgcatctttgagtcgtcaaattttgattctttgggtcttgttttgctattacaagacttcggtggttgaaaaagagagatttttgttactgtgtttctgcagctttgtctcttgttttgctattgcaagatttggttacttgatttgccattacaaacacttgaaattcctttgtacgtcttcatatattgcatctttgggtcatcttgatttgctattacaaagacttggttgcttgaagaaagtgaggtttatgttacatttttttttttttttttgcatctttgggtcttaatttgctattacaagacttggttacttgattttcctttgtacgtcttccaagtttgcatctttttggtctttttgctttgatattacaagaattggatgattgatgcagagagatttgtgttactatttttgtaggctgataaggaaaggaagattaaagagcttacggaggagatcgagtgtcaggaccgattatgcgatgtgtatcgggatcgattggtgagttttatcgataatgttgaacattatacggaagaattgtcacttaaagttcgagatattgtggagaatgttaagaaacttgaatgtcaaatacaaacaagagcttgattcatctataagcatttgtcgaaaaataccgaagattgctcctccttagatcatagtttgtcctagcattgaacattcaattattttagcagaaaactagtgttaattaggcaaattcaaaacatacaattatctatacaaaaattattgttaaaaaaagggaatgtttaattggagctaagagcagcaaatccaccacctctcatcatttgtttgaactccttaaaattaaccataccatctccatcaacatcaaccttacttatcatcttcttgcaatcttcaagtgttctcccttgcttcaaccccattgacgcgagcaccgacctcagctcttcatctgtaatgaacccatcaccattctgatcaaatactctaaaggcttctctcatgtcctcttcttcctctttctcttccaccatttcttgatacaatgatccaaactcatcgatatccatggccccgtctccattcacatccatctttgctatcatctcattgatttcattttcagggaccatgattcccacgcttttaaagaagtctttcagctcgtttttcgcaatcttcccgtctccattcttatcgaacatttggaacactctactcaattctccacgatccattctttattgaaaccttgatgatctttaagccaaaaactaatggagaagaagaatcaagatcaacacatagattctaaaaggaagcctaagcaagtgaaatcttgtaacagtttaaacaaaacaggacgtcgtgagaagacagaaaattttactaaaagaaaagacagatgagagagagcttaacggattctgttgatagattcaacacttttggatctttcatttttcaggctaaaaatagttatatatgccttgaaatagactctatgaatcatctaattctgacacaattaaggagaaccccactagtttaaccataattactcgccgagcaatggagacacgaaatagtagcatgttgaattacatcgaatattcatttgtaggttgataaacaaaagaattaaactatgaaatttgttgcaatcaaccttccacgtaaaatcgtaaaaaagagaccttgtaagtatctagcttccttaacccattcataaaccttgagtactttttacataagtagccaattgataggttggatgtaattcttcacaaatatactcaagaaaataacacacaatagataagctaaaccaaccctagttctaactattaagtttatgatgattcttacaacaccttgagtaaagaacactcttcagatcaagctgaatatcaacttcattttttgatgcatgcattgtttaccaaggttaataagcaacaattttaacaaaaaaaaggttaataagcaacaacaaaagcgtttaatgcaccagaaatgttgagaagcatgtcttatgggtctctctgtccctgattctagactcattctaagtgtttgtacactctctgtccctgattctaaggttgcaaaagaacaagaattagcaacatctcgatcacttgaattttcctcaagcgtggtcttcacatgaatttttgctcacatcttcaaggtcacaagggtttatgtttgacctttcttcttgcatagtgattatctttgagttaatatcaaattcatgttcctgttcaaaatgggccactcgtatatatatatatatataatatgtatttaaattgtggatatgttcgaatatctgttcgggttcggattgggttcgggttttaggatttagaagtttagaactcgttcgggtattcataaattttgggttggttttgaatatggttttttggatcgggttcggatcgggtaatcgggttctgtattatacccacccctacttctcactgtcagatctgaaaacatgaatattcatatcaaacgtgttacaaattacattatatcttatgacattttaattcaataataaatggcaataagtgaattgattcacaaatctcatcacattttcgttgtgggattttttaacgtctcttttaaattattagatttttttgggatgaaatatgtctgaacaatattcaggttggattaatgtatttttgtggtttatttttttgtcgagcctcattggccattagtaagtggtgatggcggcaacatattttaacggactagaacacatcccatgttttggttctgctaccgtattgaatgttcattcatagactcatagtccatctaaacatatacaatgagaaatatttaattggttctgataacatatacacaaacttacaaaaactaatttaatgctacttacatatcttacatattttcaacggctagctgaaatctccaacggtattcttttcatttatttatatataaattagtcaatatatatagcttgtcagctaaatccaaaggttgatatatgctcgtgagagctaataatcattcttcaattatcgatctcatttttaagaattattttgctacctaaattaagtagatgcactaaaattagtaaagcaaactcataattgtatagagattgcacataaattaaaattaaaaaataaatcacctaaaaaggcgtatagacttataaatttcatagagataactcacaaaaatattttcctaaagaaagatagaaatatttgaaactaattgatgctttgctctatttacaggttttattttgaatcaaaacgttgtactttagtaaaaactaattattatgattaaggaagattcttgatgaaatggaaagttgagtttattcaatcttagtttaatgaaatttttcacacacaaaaataaaataaaaattgatgacattagataaaaggtaaaaaatagactctattaaggttcaagctagacacccacttgcatattgtcattaattgttttccaaaactattaaagtataacaaaatattgcaatttgaaaaatgcattaagacctacttagataggtaggtagaagttggactaatttctatttactgttactaagattactttattttatctcttttatatttgatttgttacaatgctagaccattttttaataataattattatgattcactgtcagattttataactttttttttaccatcgtaacatgtgtgtcgccaaatagtttatgtgagtcactagataaaacggtaaaagtattcattatgacttcagttaacaatagtcaactctttatactttatactgtagtgttttcttatctccatttttctttttgtgtacatcttgtagaaaatcttcccactataacttcttcttattatttttaaaaaatactaatctactattatgttgttggacacaaaaaaaactaaactaatctactatgttgtatggataatctttttttgttgatagtctcattataaattaaaacgaatacttcacagttcactagatgattaaatatttgactcaatttgccaaatatgattatagaagaacttttctatataacataccttcaagtggatgaaaatgtgtgagattttttcttcataaatgttttttttcagtgacactatatttttctttattaacctgctatttcttctatatgactcaaaattgatttatttatctatcctatttttaaaaataatcagcaaaacatcctctctcaattacgattttaccaatattttgtttgtcgtttttgaacaaaaatttggctatctacgtaataaaccttaacaagagttatcaattttgatctaaatgatgaataaattatgaacctcaaaatctggacttggatccgccacttactagagtcacacaaacgtcaaaagaaggacccacgtgaaaaaccaaaaccaaaactaaaaccaaagtaaaaaagcacgtaacggtaaaacacatgaataacttggctataaataaatagcaaggctttagtcatgaatgagcactcaattcgatcactaactctcactcttagtacaaatattttcaagaatggtttctccttctttttcaaccaagcttgtcttctttgcttgctttgttctgttcacattctcacacaaactcgtgacaggagaatccgacaaagttgagctcaatctttactacgaatcactttgtcccggttgtcagagtttcatcgtcgatgaactagtcaaagtctttgactccgatctcgatacaatcaccgatgtcaagctcgttccattcggttacgccaaagtctccaataatctgaccgtcatttgccaggttctgttcaattttctcacccttcttgttcctatttatatcatcaaagatcatcatcacttgtatatgtttattttaaactctatctctaataaaatttatcgtttggtaaatttctgtagcatggtgaagaggaatgcaaactcaacgctcttgaagcttgcgtcattaacactttgcctaacccggtatgcattttatctcttaatgttttggtgcattcaggtaaaatgatagttaattacaattttaatttgataaaaatgtgatggttttttggaacgcagaaatcgcagtacaagttcatacgatgcgttgaaaacaatacggataactgggaatcatcatgtttaaagggctatggaaatgagaaagccatcaatgattgttacaatagtgatctctctaagaaggtataggtttatgtgaataataataatacattcataaaaagataaacatacattgtatagttatataaccttataattaccattatttttttgtcctaatttaccagctcatacttggatatgcaaaacaaacctcgagtcttaagccgaaacatgaattcgtaccatgggtcacaatcaacagcaaaccactctatacggtatatataaatcctttattaacacttactttcatttatttacattttctaaccaatttgaaatgtcttctatctttttttctattttttgttctttgtgtgtgttattggggatatagaaactagatgatttggtgggtcaagtctgcaaagcttacaaaggaaagactccactcccaatagactgtagttccgctgccttgtccgagaggaaaatgtcgaatgttgaattctcctatgtagatgaaattatcagtcactaagttaataataaaactactaagatgaataattaaataaagaccttatctctaaattttatgtttatgagttgatgaaccttctaaattttattttatcactatattaacaccatttcgacaagtaagaaatatgataaacactctacactaataatcatcatcaagtcatcataccataatcagtcataaaaaccaaaacaaaggaacaaaattatgtatgaatgttgtatatttacatgctatgcttttgttttcccctgtttttcttgtatggttctaccaaacttgttgatcacaaaggaccaggcttagtatctaccagtttatctgtagtttcagaggaaagggacaaaaatgaattatatattttgtttttattttgaattattctgccaattaaaaccagcttttaaagagataccaccaaaacaatcttgaattgacaatagacgcatcatgagaaaatttgtaaaatagagttatttgtgaatctattagacttgtgatatagacccttgttaattacttgactcatcaaacaagagtttttgaacttttgagttatcagcaaagtcgattagcgacacgggaatgggttaattatacttaaatggtccattagaatgagttcttatcattgtcattgtattgttgtttgatcattagtttccgttgatcgtctagcttttaccttgatataatagatttatttattttcttgtcttacttctctatgcttagtttattgctttaactcacctagatatataaaagtgattatgattgtataggttcatgaagaactaatccgttacaaagtatgaaagtagtcataaaaagttttctaataaaaacatctgagtacaatattcattactatccgcaatgctatactatagattgtgaatgtatttgtaggaactattattaatgaacactaactttgagtgtaatcaactctttattaagccacaaacaaaacctttatttattataaatctgattataacgtatacataaaaacatattatgaaatataacaacataatcacttctcttagtacgaaaacaacatttgccttatcaagttggtgaactcgccggaaaaaaatccaaaacaacttatagaaatacacataaaattgatttcttattgtgctggaggaggaggagtaaaaggaggaggaggaggaggagtctcaactaaaacatctagcttcatgccttgaacgcaaccacctcttccatcaagtagataataacgtctagtctcatagagaggaacaatatctctcccagctccacgtgtataattacgtattgggcggttggagatacatttttcataatcagccttgtttacctcaagaatgttgtgttggtctctatagaacacaaaatctgacaagaaagtgataaataaaacataagtctaaagacagaaccaagacttaacttaaccaaaaaaaaaagacagaacaaagaaagagttatgttctaactagatctggacttaaagaaaagttaaaaaaactattacaagatttaaagctaaaccaatttcaaatcagatctaaatatgacagatctgagagtgtagattgagaaagaagagatagagagaacgtacaaagccagtctccgacgtagaaatgtttgccttgagcccatagggtatagttaatgttggggttccagaactttttgtcgccgactaaatatttcttggctgttacttctggtatcggcgccgccactagaaaagccagtacaaccgccgagattagcaccatagatctccccatttctctctagcaaaactctctctctttctcccttgtagaattaattagctatcataaatatagtagttcatcagttccacttccactaaattattgtttttggcaaaacagtaacttaagttatataaaaaaaaaaatcattagtcaatcaatcacagtcctttatgataaaacgaactcataattattccaccgacaacatgcgttttaaattattttttcttaaattatattatattatattgatatcaacctagctaaaataattcggatggcgaaatcggacaatttttaatagaaaaaatgggtatgaagatagtctatgattccgttcttagcgactagagggacctgctcaaatctcccgggtgatacgcgatgtcaagctcaatagaaccccacaaccgacgagaccgagaaatccttgatttgggctagaagattttgaaatgaatttaatatattctaagtaacttgcttaaattttttttcaaactctaaagacataactaacataaagtaaaaaaaaaaagttaatacatgggaagaaaaaaattaaactaatgattagctctctaacgtgtttaatctcgtatcaagtttttttttaaaaattatattgctattaaaacattgtactattgtttctattttgtttagctattattcttgtgaaatgaaaagttgtgtttattcaattactaaatggcaatatttatcttggaaaactatacctctaattggattaggccctagacatcctctttagcttattgacgttaaaattattcccaaaactattaaagtttagtagtttgaaagatgcatcaagacctactcagataggtaaaagtagaaaactacagttagtgtgattatattttaaaatatataaaacaatcttattaaactaaatattcaagatatatactcaaatggaagataaaaacatttagtctgttaccactaccagcctagctagtcactaatagtcactttggaactgagtagatatttgcatcttgagttaccatggactcaaaagtccaaaaagagaccccgagtgaaaatgctaccaacttaataacaaagaagcatttacagcggtcaaaaagtatctataaatgtttacacaacagtagtcataagcactcaacacaaactctttacgaatacttttaagtatggcttcttcttctgcaaccaagtttgttgatctgttcccatgtcttttcttagcttgcctcttcgtgttcacatactcaaacaacctcgtcgtggctgaaaattccaacaaagtgaagatcaatctttactatgaatcactttgtccctattgtcaaaatttcattgttgatgatctaggtaaaatctttgactccgatctcctcaaaatcaccgatctcaagctcgttccattcggtaacgctcatatctccaataatctgactattacttgccaggttagtttcaaattttctcactttttgttgataaattactttgactctagctctagttaaccaaatttgggaattttgtgaagcatggtgaagaggaatgcaaacttaacgctctcgaagcttgcggtataagaactttgcccgatccggtatagaaaaaatacaattacctactatatttatactattttgtatgtgtgggtttgttagaagcttaatatgaaaaatgggatggttttggaacacagaaattgcagtacaagttcatacgctgcgttgaaaaagatacgaatgaatgggaatcatgtgttaaaaaatctggacgtgagaaagccatcaatgattgttacaatggtgatctctctcaaaaggtaggtctatatacaaaaatataaaaatatacacacatttatatatatatacatatatatatataaattataattatataaccttataaccaatttttttttttgtaattgcagctgatacttgggtatgcaaaactgacctcgagtttgaagccaaaacatgaatacgtaccatgggtcacactcaacggcaaaccactctatgacgtatatataactcttcctttcattttcattttaacgaattttaaattaatatctttattttggggatgcagaattaccataatttggtcgcacaagtctgcaaagcgtacaaaggaaaggatctcccaaaactatgcagttcctcggtcttgtatgagaggaaagtgtcaaagtttcaagtctcctatgtagatgaagctatcaattaataagttaattaacaaacttcttattgaaactaagatggatctaatctttatgctataagtggaatgataaataaagacgttttatctgaacttttatatttacgcgttcatgaaccttctgattatccatttttccttttaaatgaagaaggcctatattgaactatatttagactatttctacaagtacttagttgaaggacggcctcataaaaatttcaggcaatatcacggctgataaattttagaataatgagatgaatgaaatttgtcaatacccttagctagataataaagttaatagcatttgtctccaaagtttgttgaaaatgtttattaataccaaattctgccaagttatataaaaaaaaaaatcaagcaagaattgagaaacttgatgatgcaacaacagtttcaacttcataaatgaggtagtgacatcctaattaagcttgcggttacacgtagtccaaataatcaatgcaagtgccaaaatctcagccatagtgtgttaaaatttttaatttagaagaaggcatgcattctgctattagaagaggactctatgatcatctattaatgatgaagaatgaagaatacatgcaataaattaaatataattgtttcacgtaaccaaagagcttattgtgtatgagtcagtgagtgtaaaatgtccattatgtctccacgaagcatggactcgactcttaatagtgtttttattttactttacttccagttttcttttgttttcatttaatctaaaatataccaacttttatttcttatcatcatttgaaaacatttatattctatgttgtatagatattttttttgaaggagtcctcattataaattgagcattgtcactagctaactctttttttaattcaaattttcaaaaagccataagaaaaaaaaatatgtttaagtaggtgaaatgtgcacgagatttttcgatattttatatatctatattttcttttcaatccgctattttttgaataaaatgatattaaatttatacattattctcgttatttatagaaatcgatacttaaaccgtttcccatataaatattttaccactcatttttaccatttttgagccaaaatttgactatctacatatataattaactcttacaaaaatcaaattacaattgctttgatttaaatgaaaaatattattacccataaaatttagacttggatcccccaccggtagactggtagaggttactaggggagtagggacaaaaaaaatcaaaaatatcttatctataaatggatacacacacacacaaagcaactagcactcaactcaaattctattaagaacaatggcttcttcttcttcgttggcttcttcaaccaagctt

SEQ ID NO: 575 - DNA, 95009 bp, Arabidopsis thaliana
actctttttttaattcaaattttcaaaaagccataagaaaaaaaaaatatgtttaagtaggtgaaatgtgcacgagatttttcgatattttatatatctatattttcttttcaatccgctattttttgaataaaatgatattaaatttatacattattctcgttatttatagaaatcgatacttaaaccgtttcccatataaatattttaccactcatttttaccatttttgagccaaaatttgactatctacatatataattaactcttacaaaaatcaaattacaattgctttgatttaaatgaaaaatattattacccataaaatttagacttggatcccccaccggtagactggtagaggttactaggggagtagggacaaaaaaaatcaaaaatatcttatctataaatggatacacacacacacaaagcaactagcactcaactcaaattctattaagaacaatggcttcttcttcttcgttggcttcttcaaccaagcttgtattctttgcttgcctcctcctattcacattctcatcacacaatctcgtggctggagaatccgacaaagtaaagctcaatctttactatgaatcactttgtccttcttgtcagaatttcatcgtccatcatctaggcaaaatctttaacactgatctccacacaatcaccgatctcaagctcattccattcggtaacgcccatgtctccgatgatcttaccgtcacttgccaggttcttttcatttctccctatttttagttggtcctatatatatatatatatatatatatatatatatatatatatatatatatatatatatatatatatttatctcataatcttattctaaatgattatgtttgataaatttgtgaattaagcatggtgaagaagaatgcaaattaaacgcccttgaagcttgcgccataagaacttggcctaatcaggtacataacataacttaatgatcaatgtattccttactctctatctttgtgacaaaatgagtatgaaacatgtgatggtttttggaacgcagagattgcactacaagttcattcggtgcgttgaaactaacacgaatgcttgggaatcttgtgttaagaagtatggaggtgaaaaagcgataaatgattgttacaatggtgatctctctaaagaggtaggtgtacacataaataaaacactcataatcatcatatacatttacaatttttctatatgaatgtctaactgtttgttgtttttattgcacagctgatacttgggtatgcaaaccagacattgagtttgaaaccggagcataaatacgtaccatggatgacactcaacggcgaaccactctacgaagtatacataacagtctttatatattaatctgactgaattgtgtttttaatttggtgaaaaatcacttactgattgtgttttatttttggcagaatattggtgattttgtggacttagtctgcaaagcgtataaaggaaaggctgctctccctaaactctgttattcctctgtcttgtctcagaggacaatgatgcttgaattctcctatgttgatgaagctatcaatcactaagttaattatcatactactaatggatttaagcttaccttagtggaaatctttaataaagacacgttttatgaacgttgatgaacctttttatgaaacacctgaattgaactatattaagtttttttttcttttttcttttttcactgaatgttttcgaaattgaaatcatctcagtatgtagtgtggtgtagtggaaatggaccacaaaggcattatgaacaaattctcaaacttcttttaatgtgagttatctttatcctgccactaaaactagctttctaagagatacaatggaaacaatcttgagaatacaaccagttcatcctattcattaagaacagattgatttgaaattgtctaacatgtaagtaaatttgcattagtctccaaatgttttttgaaacgtacgttacagtttacgctttttagtgtaacggcgcacaattcaaacgtggaaagtagaaacggcatgcattctgctacaagtatagaggtaaatgatttttactatgttgaataatgagttgaagaatatatctttcttattcaaatcaatcaagattctatattgctataagatgatcacttttaaatacagcacagaatatgaaactgatgagacagctctcttaaatcttgcttccttctagaaatcggctatagaagtctaaagcctcccgcggtttgtctcaggaaccgtatgtcctgcaccctgcaaattaccacaagcatagaaaatataacaaacattgtttttcaaaatgagatggttatatttgagttgagattcaatgcttaccttgatggttaaaaatgtgagattgtttgcatatccttgcgtatacctgaaaagattgttcatagaataatgtagaaacattaggagctcgacataagtcatatattcgactaggcgaagaattattaccccgcgacttggtcatttgatatccatgccctccattcatcaataactttgtatccaagagattttgtccaagcttccgagccagtaaacggaacacacatatcgtgatccccgctacaaagaaaagcttatttcattactctctaaactatatagtatatggcttcagattcattttatatgtttttgtttaagtacctgtaaatgagagctctatatccacttagtgtaaggtttctatggaaatcgatcatgcttcctgcgtcgtgatagaatgagagtttcccactgcaaagttcccaccttccaatctcgctctcctgtataatgttccaaacacatcaatgatctgttttcataatacatagcaatagaatcagacagagtttgagacctctttagtatgaatagctttcctaatctctggatcgttcaaccacgctgttgcaactctatcatcctgcaaacaatcattcattgtttcagcttacaatcttaagtggtgaaacagagaggtacatggttttggtttacttacaatgcaaggaacagtgacgtcggcaagaagttgagaccagctagggacaatgcctggatgaacaggcgcacgaactggccacgctcgaccaaacattctttttcttataggtaaccgtttttcagttttgcctagctgaaggagacttgaaggaagcgatctaatgtcgaatgcagatagcgatgttccgtggtaacatggctcaagaatgttgtatatattcaactggttagtatcctgacatgtaagaataatattaaaaccatcatcttacaaacattcttaatgtctataagaattaacatgaaacattattcatacatcgttaactttcgtatactgttcctcgcactcgagtccctctatttcatagaaatttcccttgcaagcttttgtaacgttctgcgattttcttttcgatgttgttagataatataaagaaagtggaagagtaagactctattataagcaactaaacaaacctcaaagagttcatcagagattagtcccatcccatgtgcaaacgggacaaaagcatttccatcaaacttcggatccgcaactccatttccaaccaaatacccctgtccaaaaccagagaagaacacacagtcattgtgtgaaacaaaacgagaactcaagaaaccgagattgagtcgttaaatctcgttaccttgaagttaagagccggctttactccatttttgttccctgcaacataaaccaacaaatggattaaaaaacttgagaagatgtatcactgattatgaaaggagaagatagatagatacctatgacaacttctgaagcaagagttgggacataaactccggcgtaagattctccagagatgaaaaaaggatttgattgaaactcaggaaacatttggaaccactggtgaagaacattttgaatgaaagaagcatttagtaatctgcattacacccaaaaactaaaacatgtctaatgattcaccttgagaaggaacgcgtgagagtcaaccgcggttttaatatcaccggttatgtaatcagacttattgtttgagtaagagaatcccacaccaacaggagaatcaaggtatataatgttagagacctgaaaaagtaaacaaatcatacatcaaaacattacaaaactagtaaaaaaaaacaacacagatatgttttcattaaaattaccttggaccaactataaggattaagatgcaagagtgggagactattgtttttctttggtagttcgaaattgaatggaccatgctcatacacaaatccatccatgcttgaacaacctggaccaccattgagccaaagcaccaccggatctttcgatggattcttctccgattcaataaagtaataccatagattctttccatgttccttatcaattgtcacatacctttgatcaaaaaccaaaaagattatatacaagaaaaacagaatcttgaatttcaagaacagagaatttgatattttacccggagtaatgtttcgaaggaaaagtgccttcgaaaccaggaagtttggtgataagagcagattcaggagctgattctgttattacaaacactaaagagagtaatgtcacaaagacaaaaactttcattaaccaaaccattgtgattattgacataaacacagaatgaattaaaaaagaggatcactgtggtattgctttatatagactaacacaaagaagaaaatctagaggatattttgttagttggccataaaccaacaaaaagtattatgaatgtttggaaaatgatttagcacgaaataaggatgaaattctggtaaaaaaagacaaaaagatgatatgaatttttttgatttttagaacaaaatttggaaacttatggttggtatatagattttgtgattctgcaaagcaacagtttccttaaaaggcacgattttgagcatttctataaagaaaatggtgattgcgtctgcgtttagttgttatttacataagcatgattgatttgagtggcgcgagttgacttgggaccgcttcttaaagtgacaagcggttacttaaagtgacgactggcttaacaaaaggtgacacgtggctggtttttgtgaattctttttgttaagttttaggcgttttgtttggaaaagattcctacataatgattaaaaagttttggttttattttgaacgataacttctacgaattagctttcccattgttaaattacgtagaaaataaactgattattcaattattgggaatagtataatccgtattttggaaagcattttgaaatttatgaggttaaaagctatggttagcttttaaacctatatatctaaaatctagtggaaagcaaattttaatagaagaatagatccaggtccacactactattttgtttagttagtttttcttcttttcatattgttttctctggaattgttataacattataagagtatatgtaaagaataataaaatcagaaagttttggaagggaagaatttgaaaaaggtaataaataaataaagttcgttgtattatgttttcaaaattttgaactaagaatttggtttggtacaagaaactaccggttttattatacagataaaaagataacaagtttttttgaaaggtaaaaaagaagtgctaataaagtgtatagctgcgccattatcaatttatgtgatttcttacttcaaagtactaaaaataattacttctaaacttttaaatgcggttactaaattttagtggagtaaaaatggtaaatcgaagggtataaactacatagtttagaagaaattatgcaatagtaaatcgaaaagtggaataggatttcggaatgtgaatcattttaatttggtcctactagcaaaataattggttgataacgttttcgacttactttttgcgaaaactttcaaaatatatttttgaaaatccaatcatctggattgaataaaattatacttttctatcatatagatggagaagtataatgtcagctaaatctctgcttaataaatgatttagtaaaagagtcggttctcatttttttaacgcatatatacaagttaattatacaagtttctcttgctcactctttcactctttcgtttcttttcttctttacatattattacttatataatcatatatatgaaagttggtaaattttctccatataagtgtaccattatcacatgagaaaatgacatttgtcgttttatattatttaaataaaaagattagctacattaattgaagaaaaaccaaaattctcctattgtgaattaagtcatccattaatcttactcttaattcatttgttaaaaatactaaaaaaatacaaaatcatgctaatgtatcaagtattactttcattctactcttcttctttcattagttttttttatttattaatgatcattacttgataattgctaaaacaattacttgtgttgtagtttagatgtttgctacctaacctcttattaagttactaattttacagtgaatattttcttattatttgttttgtggatatgatttatcatatgaccttttctcttttcatttatgtgtcttatggtaagttagtaacaaagacatgcaagtttttgcacgtaatgcacatttgagatgttagatatacttgaaaattctagacataaaaagggagagatctaaagtattgacttaaattaatagcatatcaggatatggttagagtagtagatgagaaaagagtacgtggaacaaaaaaatgtttgttcagaacaaattatgcaagtttcaaaccatataagtaacataattatatactattgtatcaatatatcttataatgttattctatgtattcatgatagtaaaaatttaggattttagatgtataaaaatttagatttgtacataaaacgtataattgatatttcgaatcaaagatgaatctaatcataaaatttgcagctatatgagatagatttgagtttattattttcacaataacacaaaaatgaacataaataacaataataaccataaatatttgttttgttagcaattttcaaaatacccttattcatatgatattagatgatttacatatatttttattacatactttcatatccccacatcaaaccaaattatatcccaacatacactaccaacaaaatttctactaagtaactcattttttctttcttccctcactctttaaccattaacccaacttacctcttacttccacaaatctttcgttcactactttaaaatcatcacattttactacaaatcacatccttaattaatcagtcaaaaaatttaatataaatgaaaatcacattgacttttcttgtttttctttcctccgtcttttaattaatcatatatataaaaattggtcaactctctccatataagtaacatatcatcacacaagaaaatggcatgtgtcatgctacattaattaaataaaatgattaacaaaactaattgaggaaaaatcaaaagtcttttgttatgttaaattctctattaatcttactcttaaatgattttctaaaaacatttaatgaaaaaaaaatcataataatgtatcaagcactactttcattctactctacttattatttttatttttttatcaatagtcattattccataatggccgaataaaaaaaaaagttgtttaactatatatccatatatgcacaatggaaagtttttacgacaacaaagttgttttcctcctctctcgtcactccactcccaccgagatatagcatttatggctgaaattcattttaaatctcctcaaaagcgataaactcatcacatgaatatggggagcaacttcactgcactcaatgcttcccttgctcctactattatgaccataaggtttattcaaatgctcttagcttcaataacaaactacaatgcgatgtgtggaaatcctaatccaaaatcaaatatgtatctcacattgatcatttgataagaaaataacctaccgacaacattatgtagacgagaacaacatgaaaggaactcttgtgcaagaaatgcttacattatatacacttgatagtgagttcaaaatgttgcatgtttgtattttggatgcaacgagtatagcaacggttcggattttactagaacgggcatattagggctagggttggaaagtactccattctggggagtttggctcgaagttctctttttgccttggtcggatgagagaatctagaacctctcacaatttaatccttggtaatgatgtcattttcttgtgtgatggtgtggtacacatatggacgataactgatataggatcaaattaacctagactactctctcaaataagaggccagttgtaatacttaaggatcgatttccacgaaacttttttgttcacacagaaggttatagtatcgagactaaactaaatcaataagtaaaaataaataaagagaaagcaaataagcaagcaacaaattgtatgtgtataaattcagatgattaagacgtcaagcttagggatattctcaagaaatagatgactagtagatctaattataattaagattgttatggaaccattctagaactcaaatcactaatgtaaagtaacagatactagtccgcattgattaaactatgcctaataactaaggatcctaacgctagtctgcaaatacttaattgctaaacatgcaataatatcaggtttgattagttcacctaattatctaaaccagagctattcgcaactaaatacttacgcccatctatgatagctccagtaataagcagcttttcgtaacttacctattacttaagatcaagttctacttagctactctagaactagcattaaaaacaatcaagatggcaaactctaaagataattttaataggttggtgatctactaaatcatctaaaaccctaatgagaaaccttaaacctaacaagtggactaataatgtaatcagaaaatcttttggtgtgatttatggaaattttaaacttcaaaccgtcagacttcttgttgggccgcgagcggtctcgatcgactccaggagggtgtcgggtgacactcttgccttggtcaaaatccaaattcgtccttcaagtttgagttcttctgtttagctctagaatactccatgaattctcaaacttgtcccgatctttgaaatacctgaaaagcctctaaaaagactctagaaataacaaaaaaactctaaaacttatacctagatatagctaaaatcagtaaaaatagaggtatatcaactcctccagacttagcttttatttgccctcaagcaaaacacaaaaactgaacccgtggaagaggtttgaaaacgtacaaactctcaatattttctagcctattgccttgataattataaccaaatccatatgcctaacatgtctaatcaaatcctaaccaccatgtaattctccacaagcttacacaacaattccatacctaaatttcacaactatattcaacaagctttcatcgctggggtctcatcaatcaaacttatattcaagaactttctagacttattcatgtactataccatgataaatcaaccattctacattctcttgatattctttctctccccaagacttattatttcagagattaaacaaaggagtagtcacatcaccagaaatatcctccgtaaatttccaacctttgcaattggtcattccctagagtgtaaaataatgggatcatgataaatattcctagccctttaccctacaggaaatcctttcaatttctctcttttaccttttttatataataagggagataaatactattttatatggtttcattcatcaggtatgaacaaggagtcaagttctataaatattaaccgttttgacgaggttaaaagaagagtagtgtgattagctccagcctttatggattatgttgacaaagtggatgtcctctattttgtcggtttgcactctggattttctattagtcggattgactcgaacctgcatcattaatcaaccaaacaatagtctaaagaatatagatcataattcctaactaattttgactcaacaaatatttttatatacatacatatatatatatatataattttatatatatatatatatatatatagaaaagactcaaaacattaaaaataaaattactaagactcaaaaataaaaacttaactagtaagcacctcccccagacttaaacgttactgtctcttatggcattcaaatctgaagtgagcgggaaaaatagaagaataacgtaaataaaagaaaagaaaaagaaatcatactagtgggttgccttccactaaacgcttgtttgtaatttatagcttgactgttctgaagttcaggacttagctggatcaataagagatttgtgttgcatctcaactaataacatccttgccttccatggtggtgtataagcggtggagcttggtgcaacaacatgtggattagctcttttacctacaacatcaacagaagaaacaagctctcgagaaactcgatgctcgtttacctgtgaagcatacttcaaagattcgaaagaactaatcgaagaagtagattgaggaacagtggaggagaaatacctttgtgcataggagtgttgcagatgtggatctggacttagttccaagactttattgaagctgaaatttggctctcagctgctcgatggtgtcgatcaacactggtggtggtatcggttgacactgcagctgtgcggctctcacctgagttgtagaaacctctatagcgacctctggagtcaaaatattagtagccttagtagatgtgtccatgtagggtgctttgctactgataggagacttaaaatttgatccatccatgttgaaatccatcacaacatcgcagacatcaagtgaaatccaacctttttctacatcaatcctagcaccaactgtaggtaagaaagatctacttaagataagaggatccttgagttcttcatcatatgccaataccacaaaatctgccaggatgaggcaatctccaactttctcaggaacatcctcgaagataccttcaaggacttgtttagagcgatccgcgaagaaaagaatgattcatgctaccatgtaggtagttatgtttagtctttcagcaacagacttgggcatcaggttgatgatggatcctagattgcagagagagtggctgaactggatagtagaggtcgaacaatcaataacgaaactatcgggatccaagagctacttagttgtctgacttggaatgatgtgttcagacatgtctactctctttttcttgtcctcttcagcccaaccaatatcatctggctcatatatttttatatttcataacaattttttttacggtttatgataaataatttatatagcttctaaaatcaaattcttttactaaactataaacatggaagagaggcagaaagaattattaattgaatgtagtcatataaataagtttccttacacgataatatagcttaaaaataaatgttgagatatggtttgaggattttagaactaattaatttcactataaagaaaagaaatgtacaataatatgattcttgtctgttttggtaaattgttttataaattaattccaaacaattttacattgatgaatatataagattcagtgttatccactacgttacatcgatttcatattacatttttctcacagttcaacaatgcgaaacaacttttggtttggtccatgacatcatcaccatatacctacaatacggaagatagtggttctcagttctcaccacaacacatattggttttgggttgagagtaatgcaacacttcagcgagtcacgtcatctagaactaataccatcttcataaaagtggacaaactgattcgaaacttatagtagatataatctaaattttggatgagaagacagaacataaaccgtatgaaatattatgatttatgaacctatattgactacaaaaatatttaggatatccaatcacctaacaaaaaggatgaaaataaaatagaaaaaaatctcattgatatatcaatcccgtaagcgtagtagtcatcgttcaaactcgaagttaggacacatgttttcacccttcggtatacgttccaagctttgattcacagtctatggcgagagagaaatggtaggcgacatggtgagcctgcaattccggctttgaagctaactaagctcattgacaaaaacattcggaatagattcagcacacatcagaagatggggaacaaaagacttcaaagtgggctgcagtattggtttcaaactcgaagttaggacacatgatcatctctcagactctgtttgatctctctaaattcatgttacatttattgtaaacaatggtttttttggttgaatataattttacatttaaaaaaaaaaaagaaagtcatcgttcaaagtcagcaacaacctaatggcaacaatacttgatcacattcatctcatgtatattggaggctttttacagatttttctcttaagaatcttctctacaaacagaacctaaataaaagaaatcaatatatcaaattatcccaaaataagtgaaaataacatagaatacaatctatttgatctgaatcaatcaatattgaaatacatgaaaaaaaatccaaagtcagataatccaaaattaatcatctggaatagccgtaaatataactcaataaacttttgaattctaaaaatcctaaaagaagagaacagtacaagaacaagaataattgctgagaatgccctttgcacactaccttttttcaattctaccctttcctatttgccatttttatttagagatatttgccttctcggacactttttcaaaacaatttacgtgttacaacacttacaaaaaatcaggcactttgtacaaacaaagttactattataccctaaaaccaaattttgatttataaatcaaaccaaatttgttttctttaaaccaaatccggtttacgtgcacgacgactttacagttaccatcgaagtttattttttgaattctacaaaatatctaaatccagtaaaaaaaactaaattacagtttctcgactccggatctctattctaaaaacgctttcttcctcatttttcactctcatcaacaacttttgatttcagatctcaacgatgcaaagctccgccatattttctctctctgtcactccctctcctaaaaccacaacggctctctctccgccaccatcccataaccgtcgcttcttcaagcgatctaaacatttttccaaatgttgtctctactccttctttatctcgtcgatctttgcgtctcacttcatctgattcacctctccgtgcttggtccggtgttccttcgtcaatctctcactccttagacacgaatcgtttcacaaccgccgctactgcagttccttaaagtgctgaggaaggtgataacagtggaaaattgacaaagattttagaacttggcttgttgttttagaactcagttttattgtctgctatgtttctcggggaggtgacaatcaaacagaattcacatatattgtttgattgggatacatttatctctttagttttgatacaaaaagcttacaagtgtttggagatctttttcataatttgtgctaaagttcaataactatttgccccatttgtttgaaattcagtacttgatgtcatctattggaaagaagatgaacacatggactgtaacgtttggactataacgtttggacaataagtaatggacaaccataccttttgtttgcatgaattattgattaagtagacggtttttgtaagatttgttaaggatcaagccaaaatgttgattattggtttatatacgtcgaagatatgaaaccatttctcaaatttatccatttatcactccacgttttgcaaattataaaaccttaatagaatccaacttattgattattggttttatataggtacatggaaccatttttcaaatctgtttatttgtcactccatttttgcgagtttgaaaatctttataatagccacgtaattttcatttagatatttcttaagaaagaatgactaaatgttatataatgatggaactgtccatacacaaatgaataaatggtcaaagaaaaatgaacgatgtacgatgtactttgaattggcgattgtcattcatatataaacttgtgtattgaaatgatatactacccggtaagtcattaaatatggattagaccgcttggacattcattaatggacacatatgtctttgatctactgtgaatgtgttttatcgctctgtaaaattatcatttttttatagttatgatatactatatggtttagagttttgttttacggtttcaaatttagtggataaagattaggggttcatctcattttacgtttatttgaatcatcaagacttgttgcaggctttggacaccatcagcaccacaatggattaagggatataaacactttcagattatccactaatatttgaccataaacacttgtccatttgatcataagcatttgttcatagaaaacaaaagaaagttaccaaaacacatgacaaaaatatattttgttaacataagcagatttaagtaggtcattactaatattttttaaacaaaataagctaattaaacaatcattacctttttttatagctcatttttaatgagaagacatgtagagtaaaaaaacaaaacagagctgtgtggtaatgatattggcagccatgtaattaatgtgaagtttataacactgacctcttaaaaggatcatcaagagttaccatgaatacgaaccctctatatatggcaataaacttccagcaaacatttgcaacagcatgtgaaatccttccacctcgtccaaatatttatcgctaattcaattacgaaagtgaccaccaacaaagatatgttaaaaaaacacagaaactcatgaacacggtcacaacctcaccaccttgtacaagacatacttcatccagcttcttgtaaagataatcaagaacatgaacaacaatctcagcagcggagatcgtttagcttgagtcaaaaaaacgtgtgagggatctcaccatgtacaacttgtaagagatattcggcacctgaacaaagacttgtacaaggaaagaaaagaagaagaataccgttaaataaaaacatgaacacagagtttggcatttgatatataaaagaaaagaagaagaatactgttaaataaaaacatgaacatcgcagtttttcaaaaacgtacttcctccgccattacagttggccacagattgaaacccataaatttatgtgtttcaattcattgttcttcaaaaagcaggggaagtttctcaagtttgttttgtaatctcatctgttcaaactgttaatatccgactgccttcctttcttaataaccactcattttaaatcgtaagtgataactgttatttttaaaccaatttgatcgaaactaatgatcggtttggagtgatatctgggattgaatttgagagggtatatttgtcctttttactccaaaaataagggaaagtgcctctagttttaaaagtgtctataatgcttaaagtttttcggaaagtgcctcaatatggtatattcctttttatttataccctctttaattttttaatgatcattttacccctatttagaaattgttttaggttaacaaaatgaaatattaatattttttgcctaaaatattccaaaataaatttcccgccaaaaattttcgaaaaaaatatttttcccgcaaaaacttttttttggcgggaaaaagatttacaagtgattttaaaagggttttaaaagatttacaagagattttcaaaagattttaaaatatttacaagggattttaaaaggattttaaaagatttacaagggattttaaaaggggtttaaaatatttacaagtgattttaaaaaggttttaaaagatttacaagagattttaaaagggttttaaaatatttacaaaggattttaaagggctttaaaagatttacaaaggtttttaagtgattttaaaagggtttcaaagtcttttaaaagatttacaagggattttaaaagggttttaaagatttacaagaaattttaaaagggttttaaaagatgtacaaggatttttaaaagacttttaaagaatttacaagaagaccctttaaaaactcttgtaaattttattaaaaccttttaaaatctcttgtaaatcttgtaaaacatttttaaaatctcttgtaaatcttgtaaaacacttttaaaatcccttgtaaatattttaaaacccttttaaaatcccttataaatcttttaaaacacttttaaaccctttaaaaatctttaaaaaacctttataaattttttaaagcccattaaaatcccttgtaaatatttttaaacccttttaaaatcgcttgtaaatcttttaaaacacttttaaaatcccttgtaaatctatttcccgctaaaaaaaattacaaggatttttaaaagcatttttttggctgagaaaaaatttgttacgaaaaagttttgacgggaaaaaagttttgcggaatatttttttggcgggaaaaataaattttgtcgccaaaacatttggcgggaatatttcagtttccaattacatgttcctattagatgagggtaatttggtcattctgttcaatggaagaggtattttaaaaaatggacaacacaaaagggtattattgcaaaaaggtggtaaaaaaagagtagttttgcaaatctccccaagaacaacgagggcaccaaatttttatagaccaaaatttgacatttacttgttaccaaattggctgcattaatgatataccaaattttccttacaaagaactcaaacttcatactctttagttctctttttgcatatcggctcattccctaagaaatgataaggaaaaaatatattctgtaaatacagttcaaacaatgtaaaaataagatttaaaaaacatataattaattattaaaaatatggaaaaaatatcagacttttaattaaaacatgttaaaaaatgcacactaaaaaagaaaatataattgacttttttgtacagtaagagacatgcgataattacaatttttctatattgatggaaacatttagtattttatgaatgtaatattgtaatataggtttgtgtatgatctttgttcaaaaaaaaaaaaaaaaggtttgtgtatgataagttgataacacataatggtttgtgtgtggtagcacaaaataaattagaagtagttctatatttttcatcctatattctaagagtcattttttttctttggagaatacttttaatgcactgcatattggtaaatttgaaaactgaaacagccccaaaattgtctagagaatgttttctaatgtaaacactattgccgttgctcttactcatagaggaatcatcacaattttctctagttcatcattttgtgagacatggcataaagcttattccctataaaatgaaaacgagaagaaattcatgttacaaaataaattatgtaaatattatcaaagaaagtaaaaaacatgtaactaatagttaaacatgttgcggattattcccatctgaaattgaagcatgttgaaaattacgcactagaaagaaaaaaaaaagagaatttaccttttcttacaatttgtttttatattgataaaaagattcatcattatgtgagcatagtagagtaatgcaggtttgtgtatggttacggaaaagaaactaaatgtttatagcaaatgagaacaaactaaaaggatttataagaagcataatcagttttaatatgattaattatctcatcttaacaatttaatactttaaaaattataatcgaaataattcgttattgcattaatttgcatggccctaaagttttaatagattgatgagacaacagacagtaccttatatgtttatttgtttataagtctaatgattctcaatacaattaatgtagtaaatgtgcatatataacttttgtttgtcattcagttttttttttctttacgtctgatttattttgtgtaaagcacctatgataacattatgtgaatttcatttttttaacaagatttcttatcaaaaacaaaattagtttttaagtaaggaataaagagaaaatattcattaaaataaaaatacatacatgttttaagttatcataaaattatatcgttaggtattttagtataattattttaattatattttaagtgagcaaaaatagatagcatttgtcaaaaatcaaacattatacatattttatgttgtcaaaaaattatgactttaggtattttagtataatgatataattaatttagtgaaaatggataataagatatttagatttaaacgtaaaagacacatgtcaaatcagaaagtgttcggtgtaagcttctaagaacttgtttttagaaagaaaccttactttattattatatatatatattttattggtttagttccgcaagtatctcagataaaacctaatatttctggtttgaatagttcacttagagaaaactatattaaatatatggtatctaatgcaagaggatggggcttaaactgagaaactcttagtaattaaaaaaaaaagattttggtaaaaccgtacaacttgacttagcaaaggcataagtatttttatcaacatgcacttgatttgatttgaatacgaataaataacttgaataaaaattcataaatttttaaacatcatttacatataatttaaaacgaaaaaaaaaatagaaagaaaatatggcttcaagtcatggcagagaaaaagattagaagtgaaatatagaaattaaaatgaaactaacacatgatttgctttataatgtttttagtctcgtaacaagatttcaaattaaaataccaagaatgaagatcatttcttctttgcaaatattgaaataagccttttaaatagcaacgggagcatttacttttctctaacgaaagcatttttaatttctatcgttactggtttgtcacataatgccatacatacaactataacctacatcaaactataacctacatacataccaataataatttctactatcatatcctttcctgaccctttttatatttcttttttggaattgatctttccttactctttaaacatttaaccaacttatctcttactttgactaacttcttaatatgaagaaccattaaaccaatttatacccttctttcatgtgatattagatgatctaataaaatattttattggtgttacatacttttatatcccctacatcaaaccaaactatatcctatatacattaccaacaagaatttctattaactaacaaacttcttctatctttcctcactatttaaccattaaaccaacacatctcttacttatacaattaaattaacttattatgaagaaccactaaaccaacttgtacccttatttgatatgatattagatgatctacatattttattattacatactcaaaatccccacatcaaaccaaactatatcccaacatacattaccaataagaatttctactaactaacctacttcttctttcttccctcactctttaaccattaaaccaacttttctcttactttagtgtcaaactacaacttcacaaatcttccattcactattataatatcaccacatcttaaaaaacaaatcacatccttaattaataactctaaaaacagtttaaatgaaaaccacaatgaattttgtttttctttttttcctccctctcttgattaatgcaaaaccaaaaagagtcactctacatatccctcttgtgcataatggtgcaaacttttatgacagcaaagttgtttctcttccactctcgtcaccccactcccagcgagggctagcgttcatggccgaaattcattttggctcccctcaaaagaaacaatttcttcacatggatacgggtagcagcctcacatggactcaatgcttcccttgctccgactgctatgcccagaagatttatccaaaataccgaccagcagcttcaataacatatcgcgatgcgatgtgtgaagattcccatccaaagtccaatccgcattttgcatttgatcctttgacgagaatatgcacctaccagcagcattacttagacgaaaccaacatcaaaggaacactagcgcaagaaatgattacagtagatacacatgatggtgggttcaaaagggtgcacggtgtgtattttggatgcaacacgttaagcgatggttcttattttacaggaacaggcatattgggcctcggggttggaaagtactccataataggcgagtttggctccaagttttccttttgtcttggtgagataagcgaacccaaagcttctcacaacctaatccttggcgatggtgcaaacgtacaaggacatccgacggtaataaatattacggaaggtcacactatctttcaattggaatccattattgttggcgaggaaataaccttggacgacccagtccaagtatttgttgacacgggctcgacgctgtctcatttgtccacaaatttgtactacaaatttgtggatgcgtttgacgatcttataggcagcagacctctttcgtatgaaccaacgctgtgctacaaagcggataccatagaaaggctagagaagatggatgtcggttttaaatttgatgtaggagctgagttgagcgtaaatattcataacatattcatacagcaaggtccccctgaaattcgatgtttggcgatccagaataacaaggagtccttttcacatgtcatcattggggttatagccatgcaaggatacaacgtgggatatgacctcagcgcaaaaactgcttatattaataaacaagattgtgatatgtagaaacttagtggaattgtgttgttgttgctttttattttaagaaatataataatcgttcaagctaattgagaacttaaatcatagaactataagttcaaactaaatctatttgttacatgtattacgtatatgttcacattaattacaatgaaaaaagtattggattttcgagggcaagtttgatctttcaaactacttttttttttttggtttcaaactgaaactacttctagtgaatgcttttgtagagtttagtgttaggttttgattaggtatattatattttaagaaaaatatatcttaaactcatcgaatatgtgtaccgaaataaatgaaacagaaatttcttaagggggacttgtaattagcatgcaagtatgcaacgcttatattctttcaaataagccaacaacaacgtattaaaccatttgcacccataaaatacctgctgattttattttccaatggaaacgatcttaggagtctttactcggtggtattatagtactggatacaagaaatacatagcgttaagttatgaaaccctacccatgcaatacagtagctaacaacattgccaagaccgggagttacagaaagcttccttttacgccaaacaagaaattattttgttgagtacatatcataacataatttgataacaagttgtttcacccactaattaaaaaacagaaatgtaccttgatttgggtcaagccagtgccgtgccaaggcgttttggggcttggaacaaaaaataaaatgtggcctatctaatttagttgaataattatttttaaagaacctaaaatagaactagaagagagaagtaagttacaatacaaaatcaaggttataaatctatatactgaaatgaattattctaatatggatcaaacttcaaataaaatacatgtttgaggcaactaaaaattgctaaaccaacaaaaagaattttaataatgtggcctaaaaatcaagtctataaaatgtggctttgggcaaatgccttctatgttaaggggtaagcacggaactgggtcaagctagcatatacttgagtctctcctaagtactaacctatattaatactgaaatttgttttgattcaaaaaaatactgaaatttgtgaccaaatgtcaacactcttagctggacttcacgtctatgactcatttgtcaatttactacctagatctcctatagttttcatctatcactttgcccatatatgtaatatatatttactataggagtatttaataactttatgtagtatagatctattaggtgtataggatctgatgagaaatatatatgtttttgatcttcgatcagtgttcatacattatttttgtaacacacaacgatcatattattttgtaagccttacattagtttttttttttaatctgttctcaataacaaatacatttattgtaaacttttggaatgacgatcactaaatttatctaaatctcgcccaccatatccaaaaaaaaaactgagtgacgcaaaatgaaaataacacatttttcactccaaatatagcataaaaccgaaaactatgttgtgtgagataataatcattcgttttttttttgttgatctcatatttctgaattattttgctacataaaaatataacttaagtaaactatttttttggtaatagagtagaagtgtagaacttaaattactcagaagagagaaaggaatagaaaaaaaaaaaaaaattgaaaactaattgatgattcgctctctaatatttatttctttttttttcgagtattattggcgaaacagaagttgagctaatccaaacttaatgacataaattcaagtggaaaactgtctatatatgtataaaaactagacatccactgtagcttattgacgctaaaatgttttctaaaattattgatgtttagtaatttgaaagatgcatcaagacctactcatacaaatgaaagtagaacatacacctatgtgatttatacaagggtagcctcggagttggtgtttctacttttatattttttttttcttttttttttgtaattagtgtatttatcaaagttttcaattggtgcatgtaggtttgtgtattcaggtttttcggaacggttttgggacgagtttttttcttggattagtgttatttacgtagtgagggcttaggattcgttggggaattgtgactattcggttcagtttgcttatgtcttggaaccgtatttgttcccgaaatataaaaactaacaaaatggttcaattttaataaggttggttaagttttgcaagaaacaaaaattggcaaatattaacttatgattttcaaatatttcggatatatcgggtatttttgatattttagaatctatatagtatttttgtaaggattttgtgcggatgaggaaaaaatacattccggtctatttggtatccgcccattagtaattttgtccattaaatcttagttgggtcggttcaaataaaacctgattcaaaatccttttttcaatatcttacaccggatattttcatatctaacgatatagatcttttaaagatttggttaagatttaaaactatgaatcttttataatctttctttgattttttaacggttttaaattattgtataatatataaagaaaacaaattttaatataattttttgcatatattgtgattcaaattttttttaaaatggacatatataacccaattgacaaaaaaatgtgtggcttcaacgtccgctaaaatatttagacaatgattcggaatcatatcataaataagatcaacattaataaaataaattgtttttggcaggatgtatttgacgggacggatttttgaatcaatattaacaaaaaaattaaatattattaattcgctgcttcaatacgggttaaatccttaatttataaatttaccaatattagacatattaaatcagtctgatttagaaaagttttataaaaccaaaaagtgttccttggtataatgctatttaataacaatggtaaactataaaatataaatgtctcagagaatgatataatatataataattaaatttaaaatatctctacttttagaaaacaaatcatgggatacgttaaaaaataacaagataggttatatctcggaaaggggttatgtggccaacggatttgaatcaatatttataaaattttaaaaaattattaacatgtcattttaatacaggttaaatcttcaatttattaacaattgtctcgtgcttaattgtataccgttatataataacaaccataaactataaaatataaataatttttaactatatacaatttacaaacttaaatatatgctaaattaaaaaactaaatcgtcttgcggtaaattttgaggtaaaatataggttaaaatataacaatattcgtttgttaataattatattttgggtatatcggttaccctttggttattttttataatttagtaattttggatatagaatataactcaataaactaatatatatttgttatataattctattttgggtatttcggataagaacttcgtttgagtttttatgactatttggttcagtttggttctcgaatccgggtattttacctatacataggtggatccgtccatgtagcacttgtttctgatataatcttccttagaaatacaaattcaaaacaaaattgtttaaacagaagaaaaaaagtcctacccaagaataaaaccagaaatcctaggcatgaacgaacggaaaataaaaacaattccgaaatagaaaaaaaaaaaaaaactgaggaattaaaccatgtcagcttctgcactaaggccatacataagatacgtcaagagatttgtaccctcatattgacgacaataatcatactgcattggccacaagttaccgtgaaccttgttccgcaagtcaccgtatggatatccctgatgattcttccactcgccccaaagctgaacataacctcgaactttatcttgtaggaataatgatcggttcatgtaattggtagatgtggaaagtgagtatataccgtatttcttgtctgcttcttgttgccatcctcgaactgtctctctcaaaatcctgatataatcaatctccgattgatctagatattttttttgtttttcattgggatctggcctatatagtgcgatcgatgattcaactaacaggaaaaggaggaagactttaatggccagagacattgttaaagatatcaattagtgtgttttgttttttaaagttgtgatgatggatggaagtttgtttatatatatactaatatacaagcgtctcgttttcctttttaattgggattagggtttatcgttgtgatatatatgtttttttttatttatttcagttttgattatctgagtcatatttttaaaaaatagaaggtttttatataggaaaatttaacaattagaaaataacaatgataagttccacaaaaacaagattccagatttttaggaaacaaggaaacttctctttcatttgttttggctttatcgctttttctctattttatatatcctataaatatatgagtttaattatacgtaacctaacctaatcccaagagaaaaaggagttgagaaacttctgtctcgattatatatcacgacatcgatcagaaactagaagcaacaaaaaatttctagttgatgtctctgccgatgtctctcaccataaaactctttctcatgttcttattgattgaatcttccattgcaaaacaaaaaccagatctagatcatgtaaacgtagatatgtcagagattgattattccagttttttcaaacagatgattgaaggatgggaacgtgaagcaaacgagaaatacccctttaggccagatctcaacaatgatgacagttcatatttcctacaaagccgagaccaagtttatgtcaacagatctttctttgttcaaggcaaggctcaagcttatattcgtcagtggaacaactggaagccataccgtgacttggggaacaagataggtgtgttgtggccaactcaagacaatgattgtcctaaaattgaagctatgaatccgctgacctacatgattcatggcctgagtcgtcgttacaacatccttcctttacttaagtaaattgtttctttttttaatctagttttctaattagtttgtggtctaggggtttcggctgatttttattattaataaaatacatatttaagttttttttatactgagaagctattctgaaaaaaatcatatttcttttttgttttgatgaaatgtgaaatttattgatgaaagaataatgagattatgtacagctgtaagatgtatagttcatatgttctgcacaggagcagaaaacctattgaaaaaaacagagtataagcttttaactagaaagtcgtgttagccgtaacagaataattcaagaaagaaatactgagataaccgaaaccaaaatactaaaccgaacaaataaaaaaacgaactgaatcccaaccaaaattataaaatatcttaaccaattttttcaaacccaacccgaatggtgaaccagataactttttaggttactgtgtcattgggttcaaccggattcgaccatagatcaattgattaaaatttatttaatatttttaatacttttagaaattatatagtattataaatataaaaataaaaaataatcataccatgtttaacaaaatatgaagtttcacaataaaaataaagtgattaaaatttttaaatccaacaaaaaccataaaaaaaatacttagatagtatgagattatcaacaaaaaaactaataaaacattgcgaaaacaatataactaatcaccgttgtttctctcaccattcctaatatttaattccaaaatatcaaaatcaaatggattttgttaaaactcaaacccgactgattcagtggatagcatgttaatggtgaattttttgtgtttttttttctagtttttaaactgttggatgttaacccaaactggaagtgtgtacaggtcacagggtcaaactagacggttcgggtctagcgtgaaaaaaatggattatagaatctttaaacgaaacgaacgaaaaggtaaccgaatgtgtacccgaaatatccaaaaacaaaaggagtatccgaaacaattcaagaaggtgtttaagaccttagttctgtttaattatgtcctaattatgttatttggtttggagagcattctagtacacgctatcctctgtttacgtacttagcttttacatgttaatctatacaccaatcaaggcagtctcaggataaacaatcattatcctaaataattacgtatagactttgctttgttttttagttcggttaatatttgtttttaaaatcgttatagttaattatgtaatatgttttaggtgttttaaagcaaaacaatttcttttaaaacccataattggctttcattatatttttcagtcacagtctactttattaaagtaaagtttcttctagttaagtttatctctaattaaaaggttaagggtaaaggttcttttaaaccaatgctaaatcgtttggtgattcttaatattattatttctatttaataaatattttgtgcagttgagtgaaacaaattttgtcataaggcatcggtacctgcttttttcaagaaaatgggatgctttgactagtatgatatataattgtgttttatatatcaatcatgttatatttactcttggttaagattattttttattgttaatgatatcattgatacaatgatacttaagaaaaactaaaaatgttccaaatgtattctataaccaattatcatttgagctacattgttctctatctaatcaaatcaaaatcataatattaagctattatggtatataggaaatatttgaactcaatcctttttttttgtgcggttcaagcttctaaagaggtctcaaaatttgtgtgcagtctttcttcacactttcactcaccttttgttcctacacataattctctttgcttttaattatataatactaacttgatacaactagccatatcacaatttcctaactcccaagaacaaaagaaaactcctttcttccattcttggacttttctctcacttttggtctcttggatatgaatctcctactattttttcttctctccaccgtttcagttttcgccgttgtctctggcacggtggaggagacggcccgtgatgttattgatgcattggctcatgccccttttgaagaatggtcatcggttttcatagaaaccaatgaccggatccgcgccgaggttatcccatctaccctcttcatcccaaactcttccgccaacgggagcgatgatagacataagttggcttcataccacattgttcctcagaggcttgagtttgcagatcttctcttgaagccaagtagatcgagactaccgactcttctcaacggctcctccattctggtaaccaacaattctgctacttctttttctatcgacggcgttctcatcatcgaacttgacatctacgtggattccttcatagccatccatcgtattgcatatccgcttgattacacaacttacggcggcggctctaagcttatatcgaaatggccgctcttcacctttatgcttgttacggttgtgtggttcatttaatcatagtgatatgaatagattgtgctcatttcaccttatgatatatatatgaaaagactgaagtccctaatctataatatgaaagtcttttaaatgaacacttaaacctttttttcttgtactcatgacttggtcatttttagtaacgtacaactttttatttttgttttttaaacacgtagactgcatacattgagaggtttaacgatgaacatatatgctctcttgttttttactcattaaaatgccgacttctctatacacacaacacacggagatagatacttctcatcatttgagtcattatcaatataaataactgagacatctttccaaaatttaccacgacaatgagaggttatcaacatatatatatatatatatatatatgaaaagtaatattcaaaaaaagtaatagatgaatcatgaatggtcaactagattttgagtcattattaatagacgaagagatctctacaaaaaaaaacatttaccattctataatcactaaacaaaataccagctgaaatacaacaaatcttatcgaagaccactactaatcaatcttacatattctatattgttaaatactttaactatctatttcattttgcatcaataaacaaaattttatgctacacactcacttatgtttagggctgggcatatgggtcacccattcgggatcgggtttagtggatattgaatttactacctaataaggtaattctaagtattcggtttcggttcgggtcgagtctaatagggttcatgtcggtttgggtaaagagttcggagatttgcaaaactaccattttttactacccttttacaacaatatccttttttgttgtccatttttaaaaatactccttccttgaacagaataaccaaattaccctcatctaatagaaacatgtaattggaaactaaaattttcccgccatattttattttttccgccaaaaaaaaaatttccaccaaacttttttcccgccaaattgttttttttgtaacagttttttctcagcgaaaaaatgcttttaaaaatctttgtaaatttgttttggcggaaaataaatttagaagggattttaaaggggttttaaaagatttataagggattttaaaaagattttaaaagatttacaagagattttaaaaggtttttaaaatatttacaacggattttaaagggctttaaaagatttacaaaggttttctaaagatttttaaagggtttaaaaatattttaaaagatttacaagggattttaaaagggttttaaaatatttacaagggattttaaaaggatttaaaaagacttacaagggattttaaaagggttttaaaagatttataagggattttaaaaggtttttaaaaaatttacaagagtttttaaagggtctacttgtaaattctttaaaaatctttttaaaacccttatacatattttaatacccttttaaacccttttaaaatctcttgtaaatcttttaaaaccctttttaaatcccttgtaaatcttttaaaacacttttaaaccctttacaaatctttaaaaaacctttgtaaatcttttaaagccctttaaaatttcttgtcaatattttaaaacccttttaaaatcccttgtaaatcgtttaaaacccttttaaaatcacttgtaaatattttgaaaccttttcaaaacaattttaaacccttttaaaatctttaaaaatatttgctggaaatttattagcgggaaatttattttggaatattttaggcgaaaaatattaatctttcattttattaacctaaaacaatttccaaataggagtaaaatggtcattaaaaaattaaagaggataaaaaataaaaagggctaaaaaagggtagagttgaaaatgggcatcatgaaaagggcattagaaagaatttttctttgtttcaggccctaaaaatacccagaaaatagaaacgggtattttgtatgttaatagcgggtacccaaataaaaaaaaccttaaaaatttaataaaatttaattatatatgaatatattttactaaattttgacaaacataaaaataatttttaaatagtttagttgttttggagatttaggtctaaattaattgacatatttagatttataattataatcttagataaatagattatattaagattaaatataattaatattttgtatattaaatttatatttgggtttttgggtaccttgtttggataacgggtaatctctagaccgacccgatccccacgggtttactaaacctctacccaataaagaaatttcctaaaaccctaacccaccccaacctggttttttcggtttggatatcgggtccagtttttttgcccaatcctactcatgttattgataatatttgaattctatatagtaatccacacactttttctatatttagttcaataattttttttattcaataatctttttaaaaccaaatttcaatcttacgtatagataatatttgtaatgcaatttaagtatctatttcataatagataactggattttaattctacgttcttcatcttaatggataagtgctaatatttacctaaaaataaaatgtatgtcatatcaattctgtcttattttatattaaaagtaagtaataataaaaacattattaattaatagaagaaaaagggtgattttgaaaaactaccatatttttgagtttttgtttgacaaatagactctaccctatttttaattaaaaatagaattttaaatatgttacatgacaattttgttcagatttaaaacaaaataaatattttataaattaaaattaaatacgaatttttgaaaaaaagaataaattaaatttaaaatcttaatttttatttttaattatttaagagaaacacagtttatatattttaaatattaaaatctaacatgatattatcaataagatattttaaagtttatcacttcatatttctcacattatataaagaaatcaataaaactccaaccacataattctttaactctacattattacccaatttttatctaattataaggtgatattttcctttaaaagtatattcaagataaaattttatgtaaaattgttagcaatgttattaaacccgacccgcataatgaaccagactactttctgggtcattaggtcatcgggttaactaattaaaattatatatatgaaagttggtcaactctttccatatgagtgacacatcatcacactagtgaatgtcatatgtcattctaaattaatattattaaaaaagaataaaacttagtgataaaaaattaaaagtttcacattgcattgaatcatccattaataatctcacacttaactatcttcatttaaaagaaaaaaatacaaaaaaatcattttaatgtatcaaacactactttcattttatttttcttattatgctatttttttaatagtcattacttgataacgactagaaattttcgtgtattacaacttagttgtttgttacttaacctttttaagtttagtaattttaacttagtcttttttttattacgctttttgtctacatgatatggttttttgtgcattacgataaattggtaacattaataattaataatgacatgcatgttttttaagtaatgatcttttgagacgttagatataccaacaagttaaatatatgatactctcgcgtgggtactcacctactttatttaataaatttaatattaatagagattttacagtttttagagttcttacaaattaaaaataatcatatcctgttgaaccggttgaaccagccgggtgtgggttttaaaatattctctttattttggaataaaatatgggattttagactttattcaatcattttagaaacaatttcagttcgtaaactcatttgatgttttagattgtgatgaagacttcacaatgtcgccttaaaaaatgaatcgaatggtgagtgagacacctgatattagttgtgtgaattcacgatgttttattagtttatttccgtcattggtgatctcctactatatttgttacggtattagacatttaattggatttaaacaatttaatcacttacggtatttacggtattagaattattattgtttgattatatatatatatatatatattttttttttggtgtaaatgattttatattttatcaaacataatctggttttatattttataaacatgatatgattattttaaatttataaaaactctaaaaactctaaaatctctattaatattaaatttattaaataaattttaattagttgacccgtgatccaacctggttgactcgattacccagtgacaaagaaagtagtccggttcattatccaggtcgggtttaaaaacattggtttttaatttttggattttggttttaggttttcgatttttgtagtttgtgatttttgttgtagattttaatttttacagaatcttaaatggaaatttatttagtttttagttctctactttaatttatagttttttattttttgtttaaaaattactaaaacaatgaaaaattgtttaaaaatcttgaatggaaattcgttaaaggtggattgtcaaagtcaatccataactgaaattagcaattttagggtaaattagcaattttctgcgagggtagtagctgtttacccaaaatcttgaatggaaatttgtttcaacgtttttaagttctctattttattatagttttttattttctgtttaaaaattactaaaacaatgataataaatattttcttaataataaaaaattaaaaagatgcagaaaaaaaataatcataggtatattgcatataaacatagattttgtaaataaaaccaatttttacgaaaaactaaaatgaaaaactcatattaatacaataatactaaaataatgatgtagaaaagaaaaaacatagcatatttaaaataataaaaaagaattaaaaaataaatatcacataaatcttctagaaatttggtttccttatgttttagaaaatctactttttattaatcataaatgagtaattattagtttttgatttaatctacgtttttcttaatcataaatgggtaattattagtttttgcaaaatcaaaatccaaaaattgttctaaacactgcaaccatttaaggcctatatcactcagaaaatttctggtgggagaactaatcgtttgtcctttctaaatctcacatattagaatttagaattagtgtgctacataaaaatattagttcagctcggaacaactattttttggtaaaacagagaacttaaacaaatgcattattttatcaacatgcattttgaattgaatataaaatttcataattgtaaagacataaattacataaaattttacatgaaaaaatagatatagaaagaaaatgaaactaactgatgatatgctctctaaattttttaatctcataacaagaattcaaattaattagttcatatttttggttaatataacatttacctgtctaagttggaactttcattttttttctgttttgtttagtcagtattcttaatgtgaaacggaaagttgaatttattcaaacttaaattcaatagcattaattaaaggcgaaagctattatctctacatgtggttcaaactagacatccaatttaattagcttattgacgttgaaatgttttccaaaactactatagtttggcaatttgaaagatgcatcagaactactcagacaggtaaaagtagaacctctagctgtgtgaattgtatgttagtccataaagaacatcttgtaaacttcatacttaagatatatattacaatatatacttgaatggtagataaaaacgattagtctgattgctagcatactcacaactatttggaaatgagtaagatattggcatctagagttactactatggagacaaaagtcgaataaaagagacctcacgtgaaaatgttacgagctagtaactaaagcatttacactaacggtaaaaaaagtatctataaatgtttacacaaggtagtagtcattagcactcaacttaaactcttttagtaacaatggtttcttcttctttaaccaagcttgtgttctttggttgtctcctcctgctcacattcacggacaaccttgtggctggaaaatctggcaaagtgaagctcaatctttactacgaatcactttgtcccggttgtcaggaattcatcgtcgatgacctaggtaaaatctttgactacgatctctacacaatcactgatctcaagctgtttccatttggtaatgccgaactctccgataatctgactgtcacttgccaggttcttttcaatttctccctcttcttgtggataaataaataaatttcctatctatataacttgtatattaatgttatactttctcttattaatcatgtttgggaatgttgtgaagcatggtgaagaggaatgcaaactaaacgcccttgaagcttgcgcattaagaacttggcccgatcaggtatataaagaattgatttatttcctaagttttttattcagggaaaactgaatgttagaattacagtttgacaaatgtgatggttatggaacgcagaaatcacaatactcgttcatacggtgcgtcgaaagcgatacgaaaggctgggaatcatgtgttaaaaactctggacgtgagaaagcaatcaatgattgttacaatggtgatctttctagaaaggtacgtatatattaaaaaaacaaaaaaaaattcataatatacacatataaccaacttttatgtgttatttgtaattgcagctgatacttgggtacgcaaccaaaaccaagaatttgaagccgccacatgaatacgtaccatgggtcacactcaacggcaagccactcgatgacgtataaagtcttataaactctttatttcatgaataatctgacttcattcattacatttttgaatcaatcaaaaaagtatatcactgattgtgttctcttttttggtattgggaatgcagagcgtacaaagtacggatgatctcgtagctcaaatctgcaatgcatacaaaggaaagactactctcccaaaagtttgcaattcatccgcctcaatgtctaagtcgcctgagaggaaatggaagcttcaagtctcttatgccaataaagctaccaattattaagttaactatcaaacttcgtattgaactaagatggatttaagctttatgttataagtggaatgatgaataaaggcctgttctaaacttttatggttacgaattgatgtattaaaaaagaacatgaaaaacgcctgaactgaactacaagtattttatatgacgtcttatcgacgaaagtgttatgtaactcggtttatcaaccacacttttttttttttaacttctttttgggacatgacttgagtcgcaaaaagttaaaatcacggacgaaaacagagaagcataagagcttgaacccagttggagtccaaaagaaaacaccatgaaacgtaaagtgtataatgtaaccaaaaagtcaccagagatgaaatctgaagaccataaacttaatattcaaatctaagaaagaacttaaaatgaaaaaaccaagaaatgtctgtaagcgtatcattgattttactttagactttaaaatttcacttttggaaggggaaaaaatatatcagatcatgaaaattaattcagaaaattttactaacgcgtgtaggttaattacacctagtggttgtggatgctaaggtcatttagatgacgctatgaataagccttttttttgtttcccaaccattccatcttcaagatcgtcaagtttaggtcatgttgtttcaaaatgaaatgtattacaagtattgcaagaaaaaaaaaaaacttaaatagttacatgcttgcttcgttataacctacttgtggattaataatttggcctgaaagcttcactactcgctctaaaccatctgcaattctagaagctcttggacgattctagagagtcttataaagtcgctaatccattatcatttatttttaattaagtttttggttttttaatttctactacaaatatttaaatttataaacatggttataaaagttcatacatatgttgttcgatatgactttagttaatgaacgtttttttctctccctaattctcattatagtcaacttgattgtatttttcatatggatattttttctacttctcatttataatattattttgtgtaatttgagttttaagtctttttcttaaagtttaaactatattagttttattatttatgcatcatgatagttcatatatagattgttttatgcgataaacacttataggttccgcttagactttaatttaaagtctagcgttttctttctaaaacaccgtcaatttattacaataagatttagaacgttttttcgttactaaaaagaaaaaaaaatggatacccatgagagggaggagcatatataacattctggaacactgtaatgatcctaatagatagaacaaatgtctttaatgcatattgtcataatgtgtacgtaacagaacaaaagagggagggctacaattacaaacataacaactctagttccttcatgtgatcctttcttgacttatgtctcaaaattggaccacaggaccatgtgatttttccaaaggattttaaacacatatatgtttatacaacaacccacccaaattttatcatcatctccaccatcattcaccatcatcattaactccaataccaacaccaacacgtaccaacaagagcctaccataataccccatgcacacaagattatgaagcttgataacgctattggcgaataaactagtattttaataatattaacaaaaaaataaaattaagaaaccctaatgaataataaatttgaccaaaacatctcattcaaaaaccaaaatgcaattaagtcgtacaaaaattgcaatgaaagggcaaaaagagaagagatttaacaactattatctatgacaaacacatctataatgataagcactgttgatagggtcatttccttcgactggaacttgctctgctctgcacttgtatctgcatcctctgcactcgttgtacgtacaagttggtgctgtcgaccctatcatatgcctcctccttgaattctgctttgaaatattttcaaattataatatgtattagtacattattatacagccgaattagctataaatccattgtttccttgcagtatttactgaaaaatgggaatttaccaggagatgtacttgtgggagaagggagaccgtattttcgatagaacgaggtcttgaggctggttcaaaaaacaagaacacacacaagcgagcaaattcaacaaaaaaaaatcattgttagtcttattaatgtggaattaatatattgaaattaggaagatagaatacaaaggggaggggtgaaagaatgagaccttgaactacataatttccaagaagcaaagcaaaaagaagaaagaagatggttatgcatcttggcttgatgttcatcatttcatgcttcattctctacttcttcttcttcttgctctaattcttaattcttcttcttgctttatcgtatggaccaaatgttgtggagagagataagtttgcctgtttggctgtaagttttgtcttctacttatcatctaatggtgaggtttgtgcacacgtagagataagagtttgaaaatacagaggatgagttttcacttttaacccacaagattgtaaaagagagaataaaaaacatttaactcttctctttatccttttagcacaacatatttaactctatttttcttcggtcaaacatatatttaactcttctagtatgtttcctacactcttgtctccctatctcatctcctgtcttacatctaataattacaaattattagttactttttgtcggcaactaaatataatattataagcaaaaacatgtccaaactgttttctatagacgatgctagagcttctctagctagagtgttgtctacatgatttgctcctctttgaactcgtatgaacttaaagaaacatgcatttttacataaagagagaattatactgatacaaggagcaacaatctgatgtccctaatccttagaattccacgtagatgttgaaagagctacttcttattgtgagtaaaataagattttgcaatataacccccagtctaagagctagctacctctgcctctaaaggagttaaaatggaactaagagaatgactctatgatttcaaaacttaggatgcatagaccagcttatcccacttgtgttgagcactaatgtccaagaaacatcaacaaagcatcactggttattagctttgccaaaagcttccgtgatagttgtagggaacttgattaggaagtgtatttcttaattgaggattctaataaaaagaatgcaaaagaattaaagagagatagggagagagacatgtgtctagcaggatgtcatggtacaaccttctagagcatcaaaacattgctcaaatgcgcatttgctgagtatgtgaagtcgtacgaacaaggtcatgactttggcatgatactctgtttttgatgaagagttaaacttgagcttgagaagttttttctatgtgcttaaagattgtgatgtaggcacatatcttctctcttgggtttgactgatatgttgatgatgaggatctcttctgatttggaagcagggagcaatcaatgaaaactaatatgtcttcgacaaagctaagtgtaaataagaagatgtataccaatccttccgttttgtgctacgcgattcaagaaatgagacaaaacgttttggaccataacaaataagtatggtgacaaggaacaaccttccccgtgactagcaaagaacccctctaaatcaccctttaccgccatatccgaaaagctaagagggcgatataccgcaataagaaaatgtcattgcttgagtctcaataaaactaccaaaaggaggtcgcaccacctgaatcaaacgcgaacatcgttatgtttgcgaggttgattaaattctagcatgttccaagcaaaaactgacgttatatatcactttcatgataaagtaggtttggtgtttcctaattaatcaagacatctcctaagtagaacgacttttatgtccaatgatcatctgtaactagagtatgctcttttcttacatcaattggcttgatatattgtgtcattgattgaatatgtttcttcggtttggttagcgtgaaaaagagtcattgttccaaatcatgtagtagttttatgactaattcctgaaaagaatttacagctccactttggatgccaacaacatgcttctcctcctgcttgttagcttgattcacatcatatacgattatcaccttcttcgtgcatttcttaccggagggaccccactttcaacagaggttacatttttgtagtaagacacgtccgggtagctaaccaatacatagtcagtgattttttcaccattattgtttaggaagcaaatcttttctatatgaggatttagagttagacgactgaattccaagaaaactcttagccacaactaaccattcaaacatatatgtgtttggatgtaccttcataaataatttggaatgactttatataaatttcagtttcaataacatagaatttggaaaggaattttaaaatcactaattgaataactgatgatgttaacagaaaaccaacactttcataaaaccttgatttaatacaccccgaaaactgctcaatttgtttgaccgtggccccaaatttcggtgtataatatatgagtcaaatcccggatagacaatgtaaacaaccttttaggaaagaaaagtggaaacaacgttgaaaaagtttggaaagagatttccactagaatttgaatttcatatagaaaagaataaacgtaaaaaaggcaacgtaattatagttgattcggtagtagctggacacattaaagttttaaacgctatcatcattcagaatgcccaaaataagaatcttacaagtgttttacatcttacaccacacggacatattttaattttactgtttgttggtcacttcgtagttcgtacttgggtaattacaaatttacgacaaaaaaagattgaaaaattagtttataattccctacaagtattctgaaccacaaaaacacacgaaataaaaggcagagctacaaagaacaaacactaagacatatatgtgtttctcctactatacataaaacacacaagtcataatcatcatcctcaaaacaagcaacgtcaagagatgaatcataatttgtggagaaagacaatgcaatttctaacttcaaaaaaaaaagaaaataaaacaatacaaatcctttgaattaccaacaccattaggccttgagaggctttgtagacttggcagattttctcttgaggacaatgacccaagtaacaacttccaagagtaacgtgatgcctcctaaggtcccaatcacagcgatataagccgtcttgtaagtatgctttggattcaagatgctaagacctttgaaaacattgatgattccaaggatgaggatagagtatccaactccgtggtggtaaatattccaaacgaatctaaacttgtggtccttccttggccgcaacagcatcgcaaacatctttaaacacgcgcaaaaagacacaaagcatcgtttcaataacagaacaaaacatatctttttaaatggccaacttgcaatatccactaatataacaaataacactctttggtcctaatgagtattagcaacggtttaatttacctgaagagtggctatagagaagagacagatgccgatgttccggtgagtgttgtactgaatacctttagattctgaaccaagcttgagtccggtggcccatccggcaacaccgatgacataagcagagaattggcatgacacgtggaggtaaaaccaagcaggatctgctgattcaaagattctcatatacctagctatcattgctccaatgggaaatagaagtccccaactcactgcgttcaatattccatggatctgccaatttacacattcaaatggttgattcttcatgactttcataaacaataacaaatataaaaatcatacttacatttctcttgtggattctagaattaccggcaccaccacctccggagacagggactccgggggtggtcccggttaaatcgagtgatcccactgagttaagattgggaccgctgaaatcatgagcctgtatcctcccattagacactcccggaccaacctgccaaacctggttaaccttcccactcgccgctaaatccgccggaaccttcactttcgcaaagattcgtaaagctccaccgtcattagccgcctcctccgccttaacatcccacacgtcaaaggacagtttcgagggaaccagagagctgtaagagacgatgttaagggtcgtcacggaagcaacgccggtgctagggtccttagaggcaacgagggcttgagatccagccatgccggtggatttagggttaatagcccaagcgatccaaccaccaggttttgacggtggagcagagaaaacaacggcgagagttgtgttagatgcgtcataagagtaatggagaatggctttaagatcagggaggtcgagacagtgagggtaagatttgacgccggaaaatgtctgtgacgaacaagaagatgactgtgacacagccggtgagagtagtaaagcccagaagagaaaagaaagagagattctaaggtaagaagaatccatgatgaatgatgatgatgcaaagaattgtagtaaccgttaagtaatggtcggaaataaataggtgaaactgtgtgataattatagcctgtatctaattctacgatacacacagctaataaaagatttttatttatttgtttcatttttattgttcaatgtgttgttttttcttttctttcttttaattcagaaaaacacatcataacgaacttcttttgattgtctgattctggaaggtcatggaacagaacatatcagattaagtagttgacagttatgtttgacctaagaccaaggatctcagagtatttctggccttgaaaatcataaagatatttatatattctttttattacaataaaatctaaattcacaacattcttaaagtaacacatttttcaagtaatttagaaaagaagataatgcataaatttaattttggttatttttttcattcttatcttcatagtgtagatgcatgtttttagatagggttaaatcatttatttgcaaaattatccaaaatgtgagtatatagagttttgtcgtattgactagaataagaatttatcgcccaagactaaatacttattagaaactaacattatcaacggttgctaagttttttcagttcacatcagaatttatctcccttaattcaacatctagtcatgcacctatccctaaaaattatcctcttctatctcctttgatgtttcaccgaaccgctatatatattaatataagcaaaaaggggaaggcccaaaaggttttgtcgaaagctttaaacatatctctttaaattagaatatccaagtaaggactgcaggagctctagaatctctaagatagttagtttgtctttcaattctctaaacctcagccctcaggtattaatactttttaaggtagtgtgctctagagtaaattggtttatattcaaaaaaaaaaaaaggtttatatacacatatgagtaaaactaaaccttaaatagataaatttaattcaattttggattgatttttataataatgttcaaaatatattggtgtatacaattatgttttggtttcattgagaataagcatctaaacttttttacgttatttatgtatttacaacctaattattaagacgtatgaagtttagtgcgttttaacttgaaaaatgttcaaaacaaatattatttacaaaatatatcgattaattatttgttatgtaatttttgagaataagcatctgatcattttcaacttaaaacgcaccaaacataaattcataaacaaatcacataacaaataattaatagttatattttctagatagaatttgttttgattgattaaaaactaacctgccatctgacgtcgatgttattcatatgaaccagataccactgtctgatgatcattgtcttaggcgcctactacgtctacagttctgtggtcagatagctccgtgggttggctttttattggctcacatatctggattgattgtatcttcgtggagatatattagttgcactgttccatgtctgttcactaatatcagacagtttcttcgattcatgtgggctgaagtatcagcattctggaaaacccactcgaattttattgtgtttgcagttcttttgttgttgacagccacatgcattgaagcatcattactttactttttaatctaagtttcataccagccaagtttggcctaaactgaattcgtcgagtccttctgctttgggtggccacacgtttattatggcttttcttccataattttgtgttgtgctgctcagatatccgatatcatactatattcccaaaacaacatacaaaagttattgttaatatctgaaataacaattagtgtgttcaaaacatcatttttaacaagatttcactaaatctattccatgcttatgttttgcttagcttttgcattttgcttattttttttggattattcaagaaagttaaatgtctatatatgcaatttaaaaatcgactctcatcaaagttaaaagtagagaaatgttccaaaaaaatgtaaaattgtctaaatcttttatctaacaaagtagaatttaactcgcggtacactgcatgaaaatttatttcttaaagttagtatatatcaaagtttccaaattgtatatttaaatattttataattgttattaagttacggtataccatgagtccacggaacaattattaataaagtgagaatttaatccatattaaatgatattttaaaattttataaatattgattcaaaactgtctgatatatatccctgacctgaaatataaccattcccgtaatttcttaactcgttccttgatttcttttctaaaagtattaattttttaaaattaaaaattatttcttatatataaaagtttaccaattttatcattatttaagacatttcaattttatattttacaattgttattaagtaacatgataccacgagacatttttgattttatacaatcttttctaattccgactaatttgatatgtttaatataggtgatgttaaaaataataaattaaagatttaacccgtattaaatcgacaaattaatgatattttatttttttattaatattgattcaaaagaaatattattggtgatcttcattatatgatatgattcctaagcattatctaaatagtttagtccatgtgaaacgttaaacacacacaatttttgtcaattgggtagtgtatgtccttattaaaaattcgaatcacaatataaagtaaaaaaaaaaatcccaatattattgggtttttttttttactttatatattataattattgaaaacagtttggaaaaaaatcaaataaagatgatagaagaattataatttttaatcttattcaaatcttcttaatatagatattcatcttcacaatttgacagggctacaatcttcttcaatttcgaaacccaacaaattgtagtaccaccagaagtgtatagcataatgagaagtgtataacatatgatgtgtgctttatgctatcaataatacttccattgtcaacatatatcccgacaatcttaactaagaccttttaaaatttaactttcaattttgatttttatatacctgaaaaattatttagcaatctcccaacgatttgttccagggttacacatgactcccacatgtgtaatgtttgattttgtacataccattgtgtacatcaagaaccaataggaaaaatatatgaaacgttatccatatacgccttctcatgttcacttattggttatcgatttctgaatagcaaaaattggctcgcatggggagtaataaccagttttgtgttacccatatcagacttctccaatagttttttttcacatactcttcttgtgacatgtacaatataaaccatctccaatggtgagagccctctcatgggctctctccaattctttattattaattgtgaaaatttgtaagaagagagcttgtatatttttttgaaaaaaatttcacaatccaatggtagtatctctcaagtggggttctcttcaaaatgtttcaaattgttttccacaatctctaaatctgaaaaagaaaaatcaataccttgctaaagaaaacaatgttatagaagttgaaaagaacatgtatccaagaacacaaagaacaagtcgaaaagtcaacacaccttcctcgtaagaagtacagaagcacaaatccaagagactcttgatcagctcatcgattttgctctgtggaagtgaaaccaaaatatatgagtaaagacggtttacttcacataaggagataaaaaatggcagtattccttaccaatactagtgcaggaacatataagattcttaatgcagcaccaataaagatcacaatcaattcaggaacatataaaactttccaataagatcattttctcaagttcaaaaacaatgaattcttagctagggaatcatgtgcaggaaagtacataatttcaaatcctcaccaagtccagtattcaagaagaaaacaacacaaccaaatctaatgagtttaaatacaaaacacatagacagaacaagtgaagagttgtgtctctttctctctaaaataaaacaacacagccaaatgtaaaagttacgactcttaacaaacacctttaagtgaagaggtgtgcctcctcgcattgcttctttttccaacactgccacactgaaaaacatacactcttgtccacagttgttgtataccatctgacaattacgtattatgccaattgctcatggacgcatgacctcttgtgaaaattgagcaaagcaagtcactgatttttgaacacccttcaccactaataaccaagacagagcacgatccttacatgctaagttcatgtaacaccactaaatcaataagatcactctctcacaatgttaaattcttccaatacgcactacctgccgcaacaacattcaatttctctttcaattcgatttctctttcttgccactattggtgttcagccaagctaaatagttgtttcccccaatttaagagaacaaaaccgtatgtgaacgattcagtttataaaacgaatcagaaatatcaaaaattgagctgcttaggatacccagaaatcctaattttcaaactaaagcttaaatttagagaattggagaattggtcagaatacaaagtacaactagaggaagaagaagggtagcaaagagagaaaaagagattacatggatgagaaaaggagagagatgcagagccttgagataagaccatcttccttctatgaagatatcgcaaaaatcttcttctatcgcaagactcctcttcttcttctttaactaatcattcgtcttcctttctccagagtagcagaatcgcaggaaaaaagagtcgcacaatcgctagagaagacgacaggaatacataaacgataaaaaaaaaattgttaaataaaccaaccaatcacctagagccacgtgttcggctctctcaactccaaaaatctctcttcagagagacgattctctcaaaattaatcagttttgattattttttaatcaacaaaatcaagagaactctctcaaaataacaagagacccctccattggagatgctctcccttgcttatattgatcttattttcctaggtcttttaccgcaaactgataaaagttttacctttaacttgctaatctcatgtaagtctgctcccactatcaacatatcatctacatacaacaacaatgtcaagtaggactctccacacttcttaagataactacaactcagtctcacacctaaagaaagtcacaaagtacctcttgtactaatctcaaagtatgtttccacccgcacaaactcttgtaaagcttgcaaacaaacttctctttaccattaatcttaaaatcttagatgtcataatgtaaatctcttcaaccatatgattaagaaaaaaaacagcatttacattcatatattacatatgtacactttctttgttgtaaagtatgatttaaagaataaaacctcaataaaataaaatatatcaaaatacataaaattcttgagattcaactatgaagtagtataaaccatttcaaccatagacgtatacaattctggttaggataactatggttgataattgttgtctcctgcacctacgatcatctcagctccttggtcctcccttaatatgagagactttcttttcggctagtttctgaaattggttacaaaccaatctcattattttttctttgtcttcacatttactcatcggttgggctgatttgagaagaatcggtatgtgaattccattgcaacttatatttaatttatttaaacaaaaatctcatcttgaaaaacatgtgaaagacaacagctctcttaaatgccaccgcgaagcaaatcacagcttggtatatggacaaatacaaatactatcaccaaacaatattattcatctcttgtcatctaattactatcatcacatggttcgtgttcgtgtaatcacatctataaagaataaacagttagatagaatcatgtattttacgagtctttatgtgggtgcaactaaaaacaaaatatgtttaatctcttttcctcatatgattgatttaaagaaaacttgtaatgagttacatgatttgttgtcaaataatagtccaatcatttttgtaaatagtttgagccaaacttaagtcaataaataataaaaatttggctcacacatatacaaaagtcatggcttaaactaacaaaagtagtctaaaacgaatcaatgttttgggaagaaaagaaatcaaaaccctcttttttttttccttttcttttagaacactatattcttttgtgaaatttcgaagaacaagagacaggtaatgggtcagcatcataacttcataagaacccgatttaacacgttccaagtttcaacattagtgatttaataacaattcaacatcaaccacctatattggtatcgtcattactgaatagtagagtctaatagtccactattgatgactctaaatcatcttcataattgagtagtgattgaaaaaatagaatagagagaggacaaaagaaagaagtaggtccattatcaaactccgagtgaatattgatgatgccaccgccaaaacagttcactaatacatcttctgttgcttcactttccttcttttaataccttctctaaaccacccaattttctttcttttttcatattccaagatttggatttgagtttctctttttggaaattcctcttaaatcgaatatataataatgtcacaaaattaggactagatacaaaaaaaaaatcattgtgaaaactaaaaaagcaaagcatatcaaatatatctcttgaagctagttggcataatattctctgagttatcgaatattctatatatgtaaatggccagtttgacaattacctaaaatcatatgatagacataaataattctacaaatttttaaaataaatttaaactaaaagacaataaaattaccattatgttcacatttagtaaatatttcatggacgaatttctccacgtcgattttcgaaatctcataattttccggcgccggaatatacggtggtcgtgataccttaagcaccaaatcccaatccaaccctttaaagaaatcatgtcccttgattccttcaacattaatcctacggctaggatctttctccaacagttttcttaccaagtctcttaacgatgtcgtttctccgaccaaactcggcggttcagttaatatctttaaaaaagtctctttacggttggaccccctaaacggcgtcgctccgtacaacatctcatacaaaaccactcccaacgaccaccaatccacggcgaagtcatggccacttccggtgattacctccggcgcaacatattcctctgttccaacaaacgagttcgacttctctcctgaaaactccgactcggaggatctcgaaaccgagtcgtccggggagattccggagttacataaaccggaaaatgcgaagatagacctttctttcttcgtcgccgtcgaaagtctcggtgacgacgaaaaagaagattgtggagttctaggaggtagattcgtcgaaagatcaaaatcaacaagcatcagatgaccattctcttgaatcatcacattatcaggcttcaaatctctgtacacaattccttgattatgcaaatactcaagtgcaatcacaagctccgccgcgtaaaatctaatgatctcatcggaaaacatttcttccgactgttttttccttaaagagttgagatctcttccaggacagtaatcaatcgcgtaaccgataactttatcggtggatataacaccatgaagacgtggaaacagaggatggtcgaatcgagacaacactccttgttcgaaacttatgcgtttgtactcatctttggccttctttgactcgattgattctcttagtatgacttttaaagcaagccatttgttatcggcttttactaagaacacaactcctttagatccacgtccaagggctgagaaaatctctagatggtcgaagttgagagtcgggatcttgttctccggtggtaagaggtggttgctcatcgctcaagagtttatttttgatttttttttatggttcaatattcttttggttgtctttaaagcagtttttataagagagaaggggttaagcttttctaaaggtaggtccgtatagattttgtttccttgccgggaaagacttgaataaacgttttaaccaaaaaagaaaaatgcaaaagatttacgtagtaagacacggattacttttaccattttactccttctcgaatcaccattactaagcatcaaatattttcagtcatttcaaacatcagtttttgcgtttatatttgagtaaaattgaaaattttccatagagatacacaactatttagcgcaacatacaataacattttccaaatagaagaaaaaagaaaaaatttacttgtttcttaacgttcctactcaatacacaaactaacaaacaagttaaaacgagtaaagattcttggcgaaaacaacaacaaataatgattcaatattttaaaataacacataaacagttggtctaaatttataaataatctctaaaaaatatcataaaaatcacatggtttcattctcatatacaaagacagtaagaagattttctttttttccgaagtggtcttcaatgaatatcgagttagaaaatggatttttttttcctactaattacttacaaaattttgatgaaaaaatagagtagacgaaatttggtagaaaatttcttgcgaaaagatacaagaaattcactaccaatttatgtaacatttggtaggcaattcagaagaatcaaactagattcatgacatatggggagaaatgcaagaaacaaaaacaaccgaggatgagtcttatgctcttagctaaaaacatttatttagattttaggtgtggttgcgacaaccaaaaaaaaaaatacattacaaacgattgacgtgctgagcgagaaattaagaagtcgagtccctaaacccgtaggaaccaaccatatatggtgagaccactgtggaatctgccagacaacacccaagcatattaaccataaccacagtggctgagcaggaaactgtttgactggtaatgactcattaacagaaaaattaacattgcagaaaaaaaagttataataaggtaaatggatcgtcccaagatcattattggataattaaaatcactggccagtggaattaaagcccaaacaagcccatgataactcaaaactagatcaaccagtaatggcccatgatgtcgtacttgaggtgacgtggcaaattctgaattcgcgcaccggtagattcttttctttttccgtataacacctttcaatacttgaggtgacgtggcaaattcacaaccactttttatatgatataccgcttttaccccttaagcctctccgcgtaaaaccgagaacaaaatcttaagcaccgttgttccgattcagagatcatcgtcgtcgtcgttcagaaaccttcaaaaatggctggaaaactcatgcacgctcttcagtacaactcttacggtggtggcgccgccggattagaggttttcatctctcttttctatatattcctctaaactactgtgttattgcgatttgattctctgtatttatcgataccgtctcgattttatttgtattcttctctctgccgatgcgttgattttttgataaacttagaagattttgttgcctcagatgttgaaaaatccaatgttttcatcaatttgatttggattgtaaaggctactagattacatgataaaacacaatcatgattgtaaatgattttcttcatttctgatgcttacgtagtcactagcggtttctatatggatctcgttgctctgggaatctatggaaaatttgagtacagagaacacgccttttaagctagataatgtgattgagattatgtacgaaatgagagaatgaagaaaagagacgatggtggtgagagtagctcacaaaagaggaattattagtgatagttttaaattatttctctgtttttgtcgattggattggattgcagagtccactagattgcatgatgcatctcatatgtgaagtgtctctgattaagtgattattttgtgaagttagtgttctcatgtgtgtattttttttctgattaaaaggtaacattatctgtttttgtagtgtttttttcttttttttttcttttgtgatgcattcctgtatgtgtattctgtactcttttgatgataaatacgtggttatctgaatatgttctcagcatgttcaagttccggttccaacaccaaagagtaatgaggtttgcctgaaattagaagctactagtctaaaccctgttgattggaaaattcagaaaggaatgatccgcccatttctgccccgcaagttcccctgcattccaggtattctaatagctttgaagattttagtttctgtatagaagaaagaggttactttgcttagaggtcgttgagtttggaacctttgatatttgttttgaacagctactgatgttgctggagaggtcgttgaggttggatcaggagtaaaaaattttaaggctggtgacaaagttgtagcggttcttagccatctagtaagttttttcagacagacaagtagaaactttaattaccttgaaacatgttaagggaaactgattttgttctttcagggtggaggtggacttgctgagttcgctgttgcaaccgagaagctgactgtcaaaagacctcaagaagtgggagcagctgaagcagcagctttacctgtggcgggtctaaccgctctccaagctcttactaatcctgcggggttgaagctggatggtacaggcaagaaggcgaacatcctggtcacagcagcatctggtggggttggtcactatgcagtccagctggcaaaacttgcaaatgctcacgtaaccgctacatgtggtgcccggaacatagagtttgtcaaatcgttgggagcggatgaggttctcgactacaagactcccgagggagccgccctcaagagtccgtcgggtaaaaaatatgacgctgtggtccattgtgcaaacgggattccattttcggtattcgaaccaaatttgtcggaaaacgggaaggtgatagacatcacaccggggcctaatgcaatgtggacttatgcggttaagaaaataaccatgtcaaagaagcagttagtgccactcttgttgatcccaaaagctgagaatttggagtttatggtgaatctagtgaaagaagggaaagtgaagacagtgattgactcaaagcatcctttgagcaaagcggaggatgcttgggccaaaagtatcgatggtcatgctactgggaagatcattgtcgagccataagagcgttgtagccatctttgactgtctgtgaatgtgataatagatgttaaaagtttgcgtaccgtttacagaatgttttatgttgttttgtttaatatacccgagtatgtcgaaagttacatgaaaagaaaatttggatgaaataaataatacttgttaggtattttagttttaccataccgctgaagttgaaccgaaactgagcatggaatcgaataaaacagacccaacaacatcataaagcccaatagcccattaacgacttcgtcaattcccctatcttaaaaagactttctccagtagaatcttccggtaaataaaacaatagtcgaaggagatttccgtcatttcaaatggtaagaaaaccagaattatttaatatcactctcttaagggaccaccgttgccttccccaccacaaccaaccattttcctccatttttttctttttccttattaatattttaataataatacaaaaatcaataattatcttcttaaatatttaatttaattaattaattatgtatttcgttcttcttcttcttcttcaatttcttctttcttctcccatggcttcctaaacaatctgctattcctctctctcttcttcacctatagtttatctctttttttttgttttggcttctcttaaattcactttctctaaaacataaacgacattgatgtttcttcatcagatcctttaattcttctccaattctcattctccttacatcaatggtgagaatttttttttatagattatgtttttaattcttgtgttcatgtaagatttttttttttttttttttttgtgttttattgttttcttaattccgattggatttgttttttgtttatttttctcaattttatctcaatttcttggacaaattgatctttttttactctacaaataaataaagtttgagactttatagcagaatcttcatatgtagcaattgaagatttttttttcttttctaaaccgatctaaatagattaaatcatcattattgaaaacaaaagattttgtttttattttgattaaatcctttttttttttttttttttttgcagataaactttgtagttggagatttgttgtggatgaagattattgattgcagcttataggaagctgctctttttgttttgaacaatgttgctaacttttcagattcttataattaatcagtcttatgatgagaagttggttcttgattacatactacaatcaagaagtaaacagtttatgcaatcttgtgacggttcttgtgttcaaagagtagatacttgttcttcaaggtggaggttaacagaggacaattgacggggtttttaatcgttgttgtattgctcgaataaacggaatcatggaaaggtttgttcttgttctgttcttgttgttgtttgtatatatattggacatggtgagaaagtgatgatggtgtttgtggtttttgttatgtgtaggtataagattttggaagagcttggtgatggtacttgtggtagtgtatataaagcagtaaatttggaaacatatgaagttgtaagttgttgaaagtttctctctttcgcttatcttctagtgtgtagctgattctatctcaccttgtgttttcctcaggttgctgttaagaagatgaagagaaagttttattattgggaagagtgtgtgaatctgcgagaagttaaggtgcggcgactctgtgtctgttgtttactttctgttatgtctatgtttgtgttcaaggatggtgatgtagttttacgtttgcaggctcttcgtaagctaaatcatcctcatatcataaagttgaaggagattgtgagagaacataatgagctttttttcatctttgagtgcatggtaaaggcgatctccgcttttttatcttctgtaggattttttagtctgatgttagagaatatattctcattgttcttggataatgatttgactaggatcacaatctgtaccatataatgaaagaaagggaacgacctttttctgaaggagaaataagaagttttatgtctcagatgctgcaagggctcgcacacatgcataaaaacggttatttccatcgagacctgaaacctggtatgttttggtactttgtattgtattaattgaaatggttttcgctctttgaatgtcttataaacaagttttgttctgtttctgaagagaatttgctggtgaccaacaatatcctgaaaattgctgactttgggttggctagagaagttgcatctatgcctccttacactgaatatgtgtccacacgttggtaagtgatttctctttgatattgccttcgcattcatgcatgaaagtatgtggtataaggtgatatcgacgtataccttattattggctctgactgcaacaggtatcgagctccagaagttttgctacagtcttcattatacactcctgcagttggtatgtttgcgaaatccttttgtgcctcatcacatttcattagtatcatgtgatcatgtcaaaagtctagctaaaccatggctaatacttcgtggctttgaatagtttaagacattttttctttctgttttgtcatctattggatcgctttgcaaatctttatagactaacatttaaaagaactgcagacatgtgggcagttggagcgatactagctgagctttacgctttaactccgttatttcctggtgaaaggtgaattcatttccctttcaaacgatactagctgagcttaatctgtgtgcacacttaagatagaccatttagtgaaaactgatataatgatttctttatgagtagtgagatagatcaattatacaaaatctgctgtgttcttggcaagccggactggaccacgttccctgaagcgaaaagcatatctcgaattatgagtattagtcacacagaggtaagagttcttaatgaaaagataagaggcttattatattaactgcacttcaatattgactttgttctttgaatatcttgtgacagtttccgcagacacgaattgctgatttacttcccaatgctgctcctgaagctattgatttgatcaatgtgagttcttgtgttcactctttttgcggatatttcttaccattcttaagaatgttgtgatctttcaatatctttatttcgtatatcatctgtttctttttttgaatcaacagcgactttgctcatgggatccattgaaacgaccaactgctgatgaggcactaaatcatccatttttcagtgtaatttgaatattcccttgcttcttttgattttatcacacactcctctctttgtaataatcgaaaatgtaatgatatattcggaacagatggctacgcaggcttcatatcctatccatgaccttgagctgaggcttgataatatgggtgaggctttatttttctttgttaatctgcttcgtatagtatgctttcatgaccataagattaagttcaattatatttgtggtattctgcagcggcgttgcctaatcttgagctaaatctctgggactttaacagagaacctgaagaatgttttcttggcttgacactagctgtgaaaccaagtgctcccaaactaggtaagtatcattccctcgtgtagagttggtcactagatctgacacaaattgacattgacattgagcatggtttcaaatattgtttgcagaaatgctccgcaatgtatctcaggacatgagcgaggtaagctcatacgcaatgaacgtcacttatatagcattgttaaacttttcatgagttgtaataaatctgttgtttacaaaagcagaattttctcttttgccccggggtcaacaatgatcgagaaccatcaggtgatgaaaacttgagcatatgttgataaaactgcagatttctgttatatttctctgtgaaaggttgttgaatatctctctttgaacatttacagttttctggtctctgctctctcctgatgaaaacggcctccacgcgccagttgaatcatctcctttatctttgtctttcaggtgagattacaagttgtctctatggatccattaatgtgtaaacagatttgcctaatgagaaacatttactgtgagcagtccaatgcagcaacacacagttggacctccacagtcgagtggcttcacaatgacatcatcaatgcaaccgaatatgttggaccgcccgtggatggccgtgtctgcgccgtttcaacaaagtcattacctctgatctaataaacccataccctagtaaaaaaagtaaataacacagaggtttgtcagaaagatttgagtttaaagaacaagatagcaaaacaaaacagaggaaaggtgttagaattttcattttttttgtcaccaatttgttcttaatttgtaaaaatttggtttggctgatgcattttcctctcagagcttgagctctatcaatatcgaacaaataatttccttattcttgtctctgtataatatatgataaaaaaagacattgaaatcttgatgtggcattaccataaagaattacgtttcattaatgttggttctgtcgtcttttaatataaaagtctttaacttgtgaatctgtcttatctacaagaaaatttaagactatatttattatgttaattacgatacttattttaatctatatttagtaaagcgaacaagtcctacaaacaaaccaaagatattgaaaaaaagtcactttggagatagaacagaatataaaaaagattctttaaatgatcttttatcaaaacaagattctaacaagtcttagaaatctcaaaacgaagaacaagtaagaagcttgtagccatgggtggtgatactttcaaagatggtaaattttttgatctttttctttgaactgtgtttgcatgtttgatttaacgaaaaataaattatttttaagatgttgtagatgaagaatcttcaagatcatcatcatcatctccttgttcttgttgtttcaggtatattattatttaatctttatcactaatttttgttgagtatgatcataatcataatcaagaaagtgatggtggttttttttttttttttttggtgtagcagtgatgatttagggtttaaggatgatgtttctgaagagaatttcaccaatttctctaatcatgttactgatttgagaaggagagaaaaagcttaccaagagattcttcaaagtcatgatcttttgcttagaaccagcaaacggaaacttagacaagccagaaatgagattttgaggtattttttatatatatttaaattcaattcatttagggaaaagttgtgtttgttctacttggtgatcatacaaactcaattatgtttttgactattattatggttgatatatgcatagctatactcctggatcatggtctgatgtcaagttgagtgattacaatattccaaaaacgacatcgatcatgctagttggtccgaaaggggctgggaagagtagccttgttaataagattacaagagtgatcgaagacgacgcgtttctcctagatagagctcaagaatcatgtaaattaagtatatatgtgtttgctatagtttctattttaaaggtgagattactgatgttttttgcgctctcatatcgcagttggtaccccgtctaaaggaggaacatactttgttcaggagtatatgatctcgagaggaggttccgcttcattttgcctatatgatacgcgtggattgagccgtatatcatcgtctgataacactagtatgattgagcaatggatgacaaggggcgtgcttcacggcgaacctgtcatctggttttgattctatcttgattactctttctttaatcagtttcgttttggttacattactgagtttttatttactcagggcatctgatagctcggatttaaaggatagactcatccgagatggtggtaccggttatgagagaaggaaagtgaattcgattatctttgttgttaatgcggtcgaaatcttgaaatcgatggaatgtgaaacgagctatgcttcgatgataaccacggcctttaactctccgatactattgtttaaaggttggttagtccatttgaataaactttagcctctctttttttcagtctcaaaaaacttgaaaatgtttttcagatgataagccagcagtcgttatgactcatggagatatgctttcacgcgaggaacgtgcccgagtacgagttttccttggagaacttctcggtatccctcctcacaaacagatatttgacattccaggtcaccaaagcctttcaagaacaagtgtttttttcacacggttataatggttatggaaatgaattgcatatgtgtttgttttacagaaagccgggacacagccaccgcgataacaatctgcaacttgctatgctatagtcttcaacatgctgataagaattttgtgtttcttcccaaaaagaacttcactatatccaaggtttctgcttaatctttagttcttacctctttgctttcaaaacatgatcaatttgataggtggttagatgtttttattttaagttttgtttggtttggtttaattgatccggataggaccatatatcgcagtgaaccggtttaaatttggtgaattaattattattatgttaatttgtgggggtgacataattaatttcaggtgggaggaggaggcctcacaaaatggatcagcttattagacataatatcaattgctctggttttattcatggcattggcgtcaatctggtttgttactcataatcccgtaagcggccaaaaattagctaatgagactcagcaaaaactgcttaaattcccaagtccatggttaaataacctcacacataaggcaaagccgatgcgtcgctttgggcctaagcggatcattaaaggtccaaaccttgcatgcgttcaacatcctaagtctgagtttgtgcctgaaagtgagccaataagcattgatttgcatatagctcgacgcttatggttcaacgaagagcaagtggccgaggccgaaccaagctttgattggcgaactactcgacgcttgtggtatgttgagtgaaatgtatgtgagcgtcagcatctttaattataagcttaaataagtttgatagtgtttaaactagtaatataaaacaaggtgtttcttaaaaaatctgttaggtcatggtgtttttttttgttttaattaaattgtataaattgcatatagtaacaaagagtggttgttcttttaacaagccttagacaaaaaattaagagcccaataacgaaagttgaactgtaaagaaacgaaatataactagttgtagaattgtatatataggatagctagtaacaaagagtggttgttctgtaactacaatcatttatttttttgttgacattcgtaatcattgtaacataagaaatggaatttgaaaatagtgacagtagcatacatgttctaaagaacattggtaaagtaaaaaagagtgactgagtgttcagtaattggaacagtagcacacatgttctagatatttaatgttatttataaacttcacgatacaataaaatttaacataatatatttataaacttatatcgatacaatatagttaacacaaaatatttataaaattattgatatatattttgttatcttgttaacataataaatatcagttaattcataatatattattacttatatatttgataaacaatatcatttgaataagataaaagatgtcgataacaattttcttatgttgttaaataatttattatgagcgaaaaagtatttttgtctaacttataaaagttgaaaataattatgcaaaaactataaatatatttttagtttttatgttttttaggtacataaattaatatagcccatcgtaatacactcagaaaattttactttcaatgtaaagagaagtttaggtaactaacaaattactttttccatacgctcattaactagcttgccaatttttttcaataaagtagactcaccttgaccttggattaaagtggacgcagaaccgcgtgaataatctgctgttgagggcaagattaatttacgtacgtgaataggttactgtggtttaacttttaagcaaggtgaagttgaaaagaaaaaacattcgtatacccgaaatggatcttctcgccacgcatagtgctttatgtaagtttacccaatgttttttctaatttaaatagccttcttaattcctcaatcctcattacaacatcatttgcttccatctttattcattgttttttttatcaaacaattcattcaatcattcttcttctgtcttagtattttctccaacaaaaaaggtttttaagattatggaaaacatgtttttttttctgaactcgttcattttttttaccttttctttctctaatagattaggagataaatgaattgataatttagttataatcagcataattgattttaatattaacatcatagtttcacaattgttttttcagatttcataactcaaaattttagagtttagtcagaaaaccaagttgttttctgagtatatatttgggcctctgtcaaaccaaaaacaaatctaaaatttcttaataaaaataagttgtttttaaaatgggccttttatcctttttttttttttgaaaattctaatgaatctatggcatttgcctaatctgccacgggagagagaccggtatgtgtttaccctacaaaacattacagagatatgatcatataataaagaaaatagttaataaattcataataggataatatacatacacgtacttttaaaagagagatagttaaagttcttttgtagctaaatgcagagaaagagagagagtgcctctttcgtttcccccgtttttttaacttgagttattccctattttgctatttttttacttgtgtttttttatgtttttacttttaattttcctatgttttgatgtatatatatagagagagttatgaacgagagagagagttatgaaatttacatgatcacaaaacaaacggttttatgtctatagaatcttgaaaattttaacactttttctaaatgtaacaattaagagagagagataattattaaaattacacgtcacaaatgtttttgtgtctaaggaattttgaaaatttgagactcaccatctaaaattcattagacaacttttttttaatttttttctttgaaattcaggagattctgggccgaatcccgtaatcccccaagtccgaaatcattagacaacttttttattagaaggttgacaatttgaaaatttcctagcttttatctttctaattaagtttacctctttctcatacatacatgcatcaaaaaaaaattcacccgaatgaatttgttaccaaaacacatgacaatgcatagaaagatttgtctttagcttttataaaatatttgtttgtgggatgatcttttctttttagatatttccttctgtttttctttgctgatctttttaaagctttttcaacccactatgatgttgttataatttagtgtagaaaaatatctcgtgaaactctaaaggatgaaaactttagattaacattgatatctctctcttaattagttactcttcttaactccttttataaagacaaattaactactcttccatgaaaagaagagctgtattataggtctatcaaagttctaaacatagcctactagagattttacacgggtttttcgttcactaagagagaatttatacatttttttttgtttttggtaaaaatttatatacattttcttttatagacatttcttctcatatacttcatttttagtgtttttcaaatgtctttagctttttgttcttgcttatgatcttcgttagggcatcacactaaatatgatatgattataatttagtgtatgataaaaactactttgtatggatatagcgtggacaagatattgttgatatatatttaaaacaacttcttatgatcatatggacatagcatggacaagatatttatttgatttaatatttgaaatgtctttatttttttaatcttgttagggtttcacactaaatatgatatggttgtataatttagtgtatgataaaaagaacttcttaacgaatgtgaaaaaacaagaaccagaccaattaaatataggaaaatttacatttttaaccctcaaaatatcatttaaatactatttgggtgttatttgtgttccaaatatatttatgtgtaaaactttttgggtgttatttgtgttccaaaaacttgattaaataaaacaattttctctttaatatttattttttacactttcataagatgtatgtaaatatttttttaactataactaattaatactttttctaaataacaatttatgatgagaaatgtttagtttatgtttttctaaatttaatatacaattaaaaaaaaaactcgcatgttggacaagtataatctattgttatatataatcatgagattttttgttccaccattatcgttgtcaattattattctattattttcgtttttttctagcatttatctgtttttacttattaataaatatattttcaacacattgttttaaatagttttgtcaaaatatttaattttccttctggtcttctcagcgtttaccaaccaaataaatagagggccaaaggtggtagatgcatgaacctctaacaccaccacaacttcaacacaattaaactcgtctctctttatctttctctctctctctcttctgttcattaacaaaatccagaactatatgagaccttgttgtcacttaccaccttcttagaggtacctcaatcgtttccttaattgctcagattttccggtttaactctttaaccggtctctgttttttttaatatcccctaaagctttgattttgatgcaatggattggtttctattgagtttgtgtgcaatgggtatgtttagtttttgtcgttgctgattttgtttctctggagaagactaatccattctcatatttggcttcttgttttttctttcctcttcttgattggatcaaatccatgaacccatcttctgttgactctggtttttagatttagcttaggtttatgagaatccatgaaaaaggtggcggtggtaggttttgttcttattgaggagttgacttgatttggttaaaaagtcttccttgattagttaccaatttcccttttcatcgagtacagattcatatcttcacgtactttgatgggtttgatgagctgtttaatttgacttttggagaaactaaagtagctgttcttgtcggatctacgtgttaacttttacactttatggtctcaaaacactaaacatatggttaatgaggctatattttgtgtaatcttacttaatttagacattttctgttttctgtgagttgtttcttgaagtgagtagtgctttgtttgtggtctataggagaaaagtaaaacattcagaagtcgatatggtgagcttacgaagacgtaggctattgggtctttgttgtggtaaacaatgttcttgactaaatgctactatatagtccaatattaggcataatgatgaattagttttatttctctaggaccaaatggttatgtgacaccacttccatttttaactgctgaggagatgatcactgggattccaaatcctaatgccagagcagcttataatcccgggccagcagaaacggttacaacggttatcgtggaggtacggaaaaatgttttgatttatatggttttgctaattgtttatcgaggttactctaacaaatgtctaagggctagtgcaatatgtaatatgtagtgttacttatgtgatatgtagtgttacttatgtgatacatttcgctttagtgtttcttatttatacggctttagtcattctaacaattgagccttcattcttttggtttgcagaaaaaggctattgaagaaagaagccgaagaactcggtcaaaacatatgcatttcaggtctgattattcagatatctcaccggttaattctgattccatctcaccaaaatgtgagtagtagaacatatgtgagagaggaccaatttctcatttgcttactaattgattgagacgagtgagaattatattatattatctcccatttatagaccagccgccgaaacgaagaaagcagcatagaagaaagcgagtacataaccaagaaccatgtttgatgagaggagtctactacaaaaacatgaaatggcaagccgccattaaagtcgagaagaaacaaatccacttaggcactttctcttctcaagaagaggctgctcgcttatacgataggtaaaactctttcgggttttttttttgcaattcaagtaattcattaccattgacaattatcacctctattagggctgctttcatgtgtgggagggaaccgaactttgagctctcggaagaagttatacgagaactcaaacagcaaagctgggaagagttcttgaattgcacacgccgaacaattacgaacaaaagtaaggttttactaacaacaaactgtagtgtattttgtttgataaccttttgctggactctttggatatgcagaaccaaagagtaggatagaacatgaggatacgaagatcaatgccagcatgccacatcaaccagaagaagaagagcaagattcagacaaaatgtgataagttgtgcaaaagatacaaccagactcatatacaaagataattattattcatcaagaaaatagtaacatatataaagcatagtcgtaaaaaacaaatagcatcactcatagtaagagacaaattagagactcgccattaagaccaaatggttatgtgacaccttcttgacacaaaaaaaaaaaaggttatgtgacacctttttaatggctgaggagatggccagcagaaacggttaaactggctatcgaggaggtacggaaaaatgttttgagttttaagaatcttttaagaaatccgtaccacacttttcctaacataactagttcaatttttgagatcaaatcacttttgtgtatcatgatttaaaactctgaagttctctagaacacatggataattctttacatcatatggaaccaaattcatatatggacgcttcacgtcctctacggttctcatgtgcttgaccatctttgtgatatattcggtgcccgagcaagctacttggttagccaatggttcttttgagtcaactttttattattgtgactcatactatcttctcctgacttctgctcttaattctctatagaaaagttctctgatagataacaagtaattcaaacaaatagatatagaaccatctcgtaaaaacaaaaacattagtatatgaaaattatgttttcttattattttaaacattgaaaaatacaaaaacatatcaaatgagctatttattagaagaaaaaaaaacaatttgactaaagagttagttcttatggcttatgtaggaggtcataagcacattatgaacgccagaacgtacaggcaatgccgcacgtccatccattcgaaaatatatatgatctactctagcaatatacacacgtagttgaccacattgaatataatttggaattgtaggatagtttaaaaacttttggaacatatgcttcaacctcgttataaaacttcatgttaatctcttgcctaaaaagacatttccaaatcgatcgcttggttccgacttccgtcatccttaaatttaatgatttttgtacctttggcgtttaaatattggactcctaaattttggttctctgagcggcaatgatattggagaattctactagaaccgaaattgttcttaatcacaatctcagttttcttgcaagcatcatttaccacaaaataaatcgcactaactaatatgaaaattattagacgactcatttgtttgaatctaaagtaattgtcagagaaacaagagcatcaacatgtaatagtttttttttctgtgtgtggaaacctttttctttatttagcaaataatgtttgctgaagtgttaactatatttagagacaaacatgcatgaacatattagaaatttggtcaaaagagattttagtgtctaaatttatgtttaaccaataagattccaaccaaatgaaataacctaagttattataattgaccttgaaactcaaacaaaaaccttatcaaaaggttattggcaaaatgttgaagtatatcataaatgtgtagtaaatttgaaaactaaaattggaaaaaaaaaattatgcgataggcatgaataaaaatcagcttcacaaccaataagcaaacatcgagattttgaagaaccagttagggagagcaaatagagcttaggtggaggcaattgatctaggaagtatgtgggcttatactatgacataaaatcaaaggagctatcaaaaaaacccctcctccaattgtcttcatacttaaaaagagactcatacaaaatgagactaacatagtttctaatgagtttgtgtacatttgggtgtgtttagttttgtcgttgttgattctgttagtgtttagcgtatgatccattttagaaaagtttttttaggtaaaactcttaataaattatttaaaaaatatgctaccccgagacaactattgtttcttacaatttaattgtgtttggtgtttggatacatagatataaattaatgatattttttgtaaatatttactaaaataaaagctattatctaaaatgaaattcaaaataaataattaataaataaaataataattagtaacctcaaataattgttttgtcgtattgagtcaatctataacatggaagtcataaaggagcggcgagtgaagaggagaggtcacgtgagaaaaaccgaaacataaagctttcttattcaccacacatgcctcctttaaccctttgccaattggccaataacaatcaatggcaatctcgtaaattttccaattttcaatttccactgtcctcggtctcatcgtcgttgacaaatacgaacaccaatccttgattctctcctataaacacaaaaaccctttgattctaatataaccataacccatctctcaattttcgaaatttactcagaaatgttgaagctttcgtgtaatgtaactgaccatatacacaaccttttctccaactctcgccggatttttgttccggtgcatcggcaaaccagacccatctcttgttttcagttaaagaaggaacctttacgggcaattctctctgctgatcatggaaacagcagcgtccgtgttgctgatactgtttccggtacttctccggcggatcgtctccggtttggtcgattgatggaagatgggttttcttataaggagaagttcattgttagaagctatgaagttgggattaacaaaactgccaccattgaaacaattgctaatctcttgcaggtttggggattttgtgtcttgtgtgtactcaatatactaaacactattcttgtgtgttgcaatgtttgtttagttggttatgtctttgtgtgattgatgttttgagtatggatttgtgtaggaagtggcatgtaatcatgttcagaatgttggattttctactgatggatttgctacaacacttaccatgaggaaattgcatcttatttgggttactgcaagaatgcacattgagatttacaagtatccagcttggtaaggctttgagtggtttgaggattttctggtttggagttgaaagttttaagctttcttgttttggttataggagtgatgtggttgagattgagacttggtgtcagagtgaaggaaggattggaactagacgtgattggattttaaaggattgtgctactggtgaagttattggacgtgctacaaggttttgactttttcatcttgtcataccaaactatctgaagtggttgtgtattggtagttttgacattagaagctacagaaactggcatatgtgtgcttgtttagttatatagatttattcgtattcttgaacagttgttgtttgacaaatgtttcagcaagtgggtgatgatgaaccaagacacaaggcggcttcaaagggttacagacgaagttcgggacgagtacttggttttctgtcctccagagcctaggtgaagaatcatggtttacttaaaatagttttttttgaggccacttaaacagtttcttgtctgtatttttgtagactagcgtttccagaggagaacaatagcagcttaaagaaaatcccgaaattggaagatcctgctcagtattctatgcttgggcttaagcctagacgagctgatcttgacatgaaccaacatgtgaataatgttacctacattggatgggtccttgaggtgagttactaagtatattccacaaaaccttacggcatttattgatgagctaactaattaatttgagcttggtccctggtaatggcagagcataccgcaagaaatcatagacacgcacgagcttaaagttataactctagattacagaagagaatgccagcaagatgacattgtagattcacttaccacctctgaaacccccaatgaggtggtctcaaagcttactgggacgaacggatctaccacgtcaagcaaacgagaacacaatgagagtcacttcttgcatatcctgaggttgtcagaaaatggtcaggagatcaatcgtgggagaacccaatggcgaaagaagtcatcaagatgagtttctttacacttctcttgtatcagtgaagttattttgcttcacgtttgtagttgtattgtgtatcctctgatcagatctctttttgggattagatgaaattgaattatcggtgtagtgttgtgttactgtgtttgcatgtgtttttttgttcgttctgtccaaattttgggctttaagccaaaacatttcttaggtctttatctttcgctgcttgtatctatcatcaactctataggtaaaaagagttttgttcatctattcgttattctggtttaagactatagatatattttcttcaagttccttgattcacctagctgattcttaatccgaaaccaaattcacggtagcaatcgacggaggtttgcgccttttgatgagattgacgttcacaaggttacttgcagagataatgttgagttcaagagttagattcaccatggctataactagagctcaacatcaaatctacaagtttagctttataaactatatgacactataacacaccctcaaatgagaggttaataaatataaaaagattacaataaaacctaaaccacatgaaagacataatcacatgatgttcctaagagacatgagactttcaatatgattcggataagatcgaagacaagccatctcatcgttactaaatccataacaacacctaaattcctcataataaagtcctttgacacttgtgatagtctttctcacgggatcgtaataaaaagccgaaatgtctttgaaatgttttcccgatacatagataaactcaccagtactagtggcaccacttaacctagcactcccaagcaaatctctttgaggcaaactaggtaaaacaaattcattttctgaccattcttgttttccagcatccaacaaaacccataatttgataatatttgaattacagcaaacccatgctaattttcctttgtaactcattagagatttataacacattagttcatattggtgcccactactaggtatttgaattgatttgaacttttcagacctcacatcaaaactcataataatatgcttcactctcacacctagctcgaattctttggtaaacgcagggacagtgttatggccacgtcgatgttcttcagatgatatatatgcattatagtacacaactccgttgatgcaataatacctacttgtaggtttatgatcagggctgttttttatcaccctccatgattcttgagatcctaatgtaagaatatgaggcttttgatagtcgtcccatagcgtatttaaatttgccaccgatagaagtttatatgtattctccttaggatcatatcctaaatagatttttaggggcttagagattttaggttgaagcaaggttatatgttctttcatggtggggttccagattacaatctctgtattgttcctgaaagtgaccaaaccattgacagaagcactatagttgtagtaatggcaatcttctgtagggggcatgttatgaaaattgttcacatcagaataacttttaaagttctcatgaaatgacaacatgtacaagacttgcttatgctgatcatccttggccataaaagtaagaaatttttgatgattgtcgaagcgcaaatgaattgatgaaattttgttgggtggttatagacaaccatagttttgatacacaacgaaatcttacgatagattttgcaggtagtctcattagtatctccctcgtcagatcaatgggaatatattcatcagaagatactccattacaagttgatgaagactttgtaattctttgtatttctcttttcttctcttctcttttttccatggctcctaattttgcttctcttttattttgtatcttcacttttaacaatgttaatatattatgtagacagtagatatgtatgttcaccatattcatgtggatatctgtttgtattaaactaaagcacataaggttagatttttttcccttaaaacatttaattagaaaaactattgcataataatgttagattttttttgtcttaaacatttaattagagaaactattgcatactaatctacaaaaaagagttaaaacagtgaagatttgtctatatatgtgagaactcaattttcacatatataaaaccaatctacagatgtccaaattctctaccaatttaaagagaccataagaccatacattggtggttctccactacaaatactgaatggtgatatttattgacaaacgactaaactagtaaaagttgtatatagacttctctattctaattctctaaccggttggtataacttggtttagccaaactgaacccatttacttagacataatgcaatgttcaccgttgctttcagaatccttttgagaattggaatcttgatgctacaaaaactctgaaacgagagaccttacactactttgctcttcgaaaccgcctctttcttcttctctgcttcttcatctttcttcttcttgtgccgagcaacgtacttatggtactcctcaagctccttctccagcttctctatgaactcactcgtatgttcaagcgattgctcataccgatatttctccaaagcctgacgttttcattcacttttgtcaagacaagaaacaaccagccaaaaatcaagtatctagattcaacaatataccttatctttagagagagtatcaacaggagacatcacttctggtctcacatagtttttcccacggtacaacacaatggtgttgttaggtttgacatcaatcacaatgcccttacttaaccgagcaagctcttctgcatactcatgaacctgcccgggtttgttgcagggcttgcaaataactttaacagtctcatgctttttccaatgaaggtgcaaattcaaaaccacacctccaaacactcctcgtcttccgacaagtacaaagttctttctcttctcacctgtacgttttaagtaatgctgctcttcctctgtcaaactctctggatcataaggctccgctggtgatttcggaacatcgtatttcctcagtttctcaatcaaccattcttctttcctcttagcctacacaatcaaccacaccaacagattttaaataaactccaaagctactaacatgttacattgactaatacaatgttaagacgtaaccttttcaagcttgtaacgaattctaacttcagggtttggagaattcatcttctttttagccttcagacgataaaaccttaactcattcactttagcttttcttgacaatttagcccgtttccatttcttctcttttcttgtaggtacaacattgttaccactactagagacattgttgaaagcaaacctaaccacattatcatctgttcttagctctattgtggaattactcaagtaacgtctactaaacaaaccatcatacgcaaatagattccatctctgagcttgtgaaacatcaaaagaagctgatttacattgaacttgtagaaaaggtcttgactttacataactggagtaattagaggattgatagtgaagcaagaagaatctagaggtcctgcaaaaaacacagaaacatatttataagagcacacagaaagaaagacacaaacttgttgaggaaattgtgaaataccattttggatttctgagaaatctttgagcgatttccttggcataacctaaagctaacatgacattctgtgattgacttcaagaggcaataaccggaatagaccgtttggttcaaatcggttggtttaggaaacaagaatctgataagcaagtcctcagaaacagaggatcttcgtctctgagcttgaagctttttgtttttttttcaccagattgaatataactgagaaacaagcgatccacgaaaatttcaacagaggagaaggagagaaatgatgcgttgtcggagacgaatggtaaatcggaaaaccaagaattcacggcgtcggcgaactcacatatagtgacgaggagaaggcgacataaagcgacattatttgtcgagggtttaaagactttttaagacttcaggattatgacaaagtatggtttggtagaaccggttggtttaatgactaaatgccttataataaatttggtttgtttgttttgtattatttcaaaccagatttttgatatctaatatggttttgaattttgtccaatatatatggttttgaagtttttcttttgtttttagttttcattttaaatgtttgccaagaatatgttcattggagaagtttaaaaatacaaattttgtgataccatttttccaaagtactattttttttcttgtaaatttttcaaaaacacatcaaataaagattgataatgttttattaaaaaagttacgaaaatttataaatttttataaaattattataacggaaagtaaatatttataagattttggaatttgttttgttttaactgtaatttttgaattaatattaatatccgtttattctgtagtggaccactagtgatatatatatatatataatataaaattattatgtgtactactagtggtacatatatatatatatatatatttattatttcggtgaagacagaacaagtcgaggttattgcaaaatgaactcatatatatatatatatatatatatatatatatacttttttttttctaaaatgaaatgaactcatattgaaagaatcaatgtgaaccatctgaatttcctcaagaaactattggtttatgcaaggcccatacttggttctagaaatctctgttgtatttttgattaattcttccaataatccaaaataattacaatttttgtgattgttatagtatatatcaatatgaaaaaattatagctttaaaagatctttatttattaaagaaatattccattaatatccatatgtttttagaaattgtttcattcttttagatcacaaataaacactaagcttttttgtttaagtgttatttagtatatttgatgttagtttcgtcaaatgacccaccttcattttttcttagactaccaaactttagaggtaaatttgttttcattaggcaacgaatgttcagttattatctatatgtttttagaaaattgtttcagtcttttacaaatagatcacttcacaaataaagatcaaacttttttgaaagtgatattttaatatctttcatgttagtttcatcaaatgatccattctccgttttttcttagactaatagacattagaggtaaattagttttgcttcgaaaactaggcgatttagaatagatcattgaccatataacgtctatattagtttactggtacaaacatactttgtattatacgccaaatcattgttacaaagcagaataattaggtttctagtcttacaagaagatatattattaaagctggtaaatacatataattttttgtatataccaaattattgttatagttgaaagaagttatgaacatgtttacaatatatgagagatttctcataaaactaataaaataaataatgattatccgacacggtcgcaccgggtaagtttggagcatccaactttatattcattaactcgctctctaggtttcccagctgatcctggggcttgacactctggtggaggattaggacgcaaacacggatcaagcactcctggatttaaaaatttacccccaccagcagctagtgttggctcaatcatcatgaaaatgcttattaccatcaaacatatgacccaagccttcattttgacttgatgtttttttttattcccttctataatttatatgattctgaaaacgacaaagtgaggaattcttaacaaaacaaagaaaatgaatttagctttatatgtattaaaagaggaaactagattaatatagattttaacaccatctaaacaccacacaatctaaatttgttatttcttggataaagagagagaccaaaagcaacctcacatattcgttaaataacctaatctggaatgagtaattagagaggtaaatttttttgtatagcctaatttggtaaaccctatgtttagatcaatattctcaattcgtatatttttgtttgaatttcttttcttaaaaaaatgaatcgatctcactatatatcatttatgacgaatggtattcgttttcaagttttgaaaacgtgatttcggtattttttaccgtgtacaacattcataaaattttcatgttaacaaacgtgattccgctatataaattatatgtcataaaaattctctcgattaaacctcttctagaagataataatttttttgaacataaaaaaaacgaaaaaaggaaaagtgaagatagttcattatctaatagattttttccgttctaaatatgctaaaacatctataaatcttaattgtagtcatgcctactcaagataaattaaccatccaaccattgtacgataagctttgatgatttgttgttcatccttgcaaacttctacttcataatagtcaacactgttgaaaatttgcagttcctcgttcttatatacatgtaccatcttttgatttgaccaaacttttctcaatctcgacactaaaaaggtttcaccttcaaatttttttttgataattttcttttcattttccaacttggctgagatgaagcatctaaatccttggatcttcttcggatgtatattacattgattcatcgctccacacacacgtttgcatagaatgtcttttacagtttatcattatagatattaactttatcaaaatcatgttgtactagtaccatcaaaacatccaatatctcaaggttaagtccgttcaagcagatttcttccatattttcatccaatgatctccttacttgagacaagtcttcgatttcatgtatatatatgtaaagtaaacattaggtacatatgagatcatctaaagctcaccctccgaatggcctttattcatactcccacaattaccactaattttctattgaacagccacgatgatttattgttttctcttttgaattataaatcaaacgttatactagacatcctctaacgttcccaaaatttcaattttttttttgacgaaattactttttttttttttttttctaatcagattcctcatttttttttgctaatatgttaatatgttagtatttttgtcgtggtaacattatcacaaataaagaattgtatttattaatcaattatttgacttcatgataaaagggttttggatatgaaatcagttgttccatttacattcacttggaggaacatggaatctaaccttatcagaacaataatcataattcatgtacttttgtctcacatttgtgtaggctttctgttcggagtcacttagcttactataactcccagtattccaccagtacgctgacgaaccacaagcattcttttcagcattggtgaaacaaccagagttgttaaagccttgaaaattagccttaaagggagccaaagaccaattaatcttgcttttaccaccgtctgtcgcccagttttcaccgttccacaagctaaccacaacttgcataggttttgatgggtagttcatgccttggcttgtggtgttcttgaacacccgtactggaatgttgtccacataaagcctattggtaatcaacacatgctttgtaaaatatatagataagtgatatataaataatttgatttcttaagggtgtagaagttttttttttaatttaaatgtttgattgaaaaaagaaatggttatctgaaaaaatgagctcaaaatttgtttattgggatttggtacgattcatttctgtttatgagatttaaaatattttttaataaaagttttttttttgttaaaaacgataaatcagtataatatttttaataaaaatttattagttatatattttattccttaagatataattttatgtgtatataaacattgaaattggtgaaatgtataaaaattaaattttaaacaaaaaattagtaaattttcacctttagctattcaattcttcttatttattatcaagtattagcatgatataatggaagaaataatatattatgattgcttaaattctgtttaataataaagataaattcgttaaagaataaaggaacgagtgggacgtacacaatttgatacgggttccacagaattgcgtaagtgtggaaatctttagaaggatcgaaccagagagctaacttctgttctctattgcctttaccattagtaaacacatttgtttgcactgctagtttcccttctttgtttcccaagaattcaaaatcaacttcatcatgtgtgtttcccttcgaagtcaactgtttaccaatacacaaatatattatatacaaaagttaaaatataactttatgttatccagattaacatgaaatcaggtcaagactagaacatggtctaaccactaccgacttataccgtttaattaactaccattaagccacacgcaagtttaaaattaaaatatgaacaaacaaatgctagtagacatgttttttttgtaaaagaatttctgttcaaatttatgtaaaatgaaaaataagattgctacaatgcagagataaaattcaaacttacatagaaagcggtgacaacgcctgaggtatcttttggaggcactttgattcttatttggaagaatcctgattcgtaatgattcttagattcaaaaccagaacctgtttttgtagtttacgtagaaatcaatacaaaggatggtctttaattcaaacgatttaaatttattaaaagaaaaattcaatggacctgaagaatgatccaatgaaagctgaacttctttcccttggttaagtttcaagacattattttgtccccacgtaacgacgtagttatcatcgaaacctactttgctttggtcgattccattaacttcataagccctagcatcaaccctaatgatcaaatacaaaactgaaacaaaaccgaagattgaaagatattccatcttattcattttaattgacccgtttgagtattttttatatattttagtcctagagcaaaattctctcttatttatatagttgtgtacttgtgtataaaggatgaattagatagcattctaagtttggtagttgaattgcaatctttacaaaattaatacaatatctaaattgaaaatcatatatatgataggagatttttttcctcaatgcattcatcctcattcagcattgaaatggttgtagaccctacgattaattattttaagtagctaattttgtatttaatatacctaatcccccaaaattcaatttatgtgatttttagattttaattaagttataatttatacattagtaattgggtgatttaaatgtttttactacaaagaaatgaagaagattgaaaaaaagataacaaaagtataagaaagaaaatagaaatctaacaaaatgatttagtactatacataatgtgttattttgttttagagatatctatataaatttgatatcattaagaaacaatttcatgaaaataaatttacaaggaaaggatattaatggaacaaagaaaaaaatttctaagaattacaaaacttagaatgttattatgacataaaatattaaacaatttctttctaattaactgtaaatgtaagatttataagttttagtggaaatgagaaaatcattaataatatttcaaatgtaataaataagaaattaataaacaaaataattattaaaatattctagtctcaagacgggctagtgtaaaaattgataaaattgggtatgataataatttatttagaatacctatgtaaatatatagtcccattattaatataaattaattatcatataaatttacaaacatatataaaagttaatataccattgtatgttttttttaaaacaaactttgatagagcttatctccaacttttattgtaacaaacaaattttcttttgtgttttgaaaacatagtaaatataattttcataaaaatggccaatcaattatgtaatttttcagtttttaaatatgcattatactcattttgatagtattatatgttaaatactgttgggtataattttaattacttttgtccaaacaaaaatgatgatgaggtcattattcataaatttgaatttacgtctatcatttgtataagtgaatttatctatagtttttgtaattttgggtctatttatttttagatactcatttgtataagtgagtttttttcttaaatataaaaattgcaagtctaaaactacgaaaatttatactatccaaaaaaataactttatttagataaaatcatatcttaattcatctttctctaaaattctaagaactgaaactataatttaaaattaatataaaataatatatggtcccaacattattaatttatggtggttttactgtagtttatttatataagtatacctttgactaataaaaaaatataatatgtatattagtatttaaattatatatagtatcatatatgtgtgtaatgctagaaaccaagaagagaaaagaaaaagaataaagaaaaaaaaaatatatatatacagttaaacctctataaattaataatgttgggactgcaaaattttattaatttagagaggttttaatttatcaataaattaatatttattaatttattgagagattttcctaatatagtaactttaaaaaaaaacaagatatttttcattataaaaaatatctttcgaaaatcaattacaaataccaaataatatcatgtctagaaaataacaccaaattcttttgatataataacatattagaactaaatttcaaattataatagatacaaatttaaacaaaaaaaatattacgaatatatttgaaagaaatttctaatatataatgtatatatatagttgtacatttatgcaattattaatttataatattgatgggaccatatatttatataggactctcaaaaaaattattatcttattaatttatcgatttgtgtaactttttacactaatcccaactcgggaccggaaaaatttattaatttatagagattattaatttatcgagtattaatttatagaggttttactgtatatatatatatatgaaacataagcaagaatttgaggtataataactctccgaaaattctcttagatgttttgctcataatcatctctcacattgggtgctcttttgacttgggctgaatacgatttaatgtcttattttcaagcattttacatatgcttgccatcactaccacttcgatcttatgagattagggtagccattgtaatgagctggataacaaaatgcatgcgttctatatgaggttttaaagatattaaatcaaatttgaagcgcataaacaacagaatgaggaagactttgagttgtcaactttgttgcatgatgatgagatttcaaaaaaataattttttttgaaagaggttatactaaatactctaattcttatcatgttcaacaacaattttgttatctaggattggtataacttccatccctgtattttacccctggaaattacacagcttatagtagacacttgataattgattgatttgttaatctagctaagctgggaactaaaaagggcagataataacaattaggttccaatttcttccagattaacatcaaatcaactcaaaatagaaaaggaaaaaatagtcactatggtaagtactcattgtaaaatgaagacatgcttaacccaaccgcttaacccatgcaagaaggtcgtgaaaatgcagatgattaaaaaaagtgatgcaatgatggatattaattcctagccaagaaagaagatgaaaaggcaaatgattttatttttattttgctgaatattgttaatgtgcaattaatattaaaaaaaaatcaaagtttcatttcataaactcataacaatcaaagtttcatttcataaattcatgacgtgtcactcaaatggaaaaaattcggtaactttcatatatatgattatagaaatacattattattttattatatcttttgttatagattaagggaactttgaaacatatataagttatcaaatgtgtatattatttgccttcaataaaagtgtgtatgtatttttactattcatcattgattccatcgacattcactaggaggaacaggatatctaggccgatcagaacaataatcataggtcatgtactttgctctcacattctccattaccttctgctcatttgcacttaactgactatatgtccttgtgttccaccagtaccttgtcgaaccacaaacgttcgcattattgctctgaccatttacgtgacaaccatggtcggagaagccttggtattgagccttaaatggagcataggcccaatttatcttttctttaccaccgcttgttgcccagttctcaccgttccacaaactagccacaagttgcatgggctttgatggatagttcacaccactttttttgatattcttgaatactcttattggaactttgtccacgtaaaacctgttaacaaatcatcccataagtttgacctaaataattgcatgggacttgaaatataaagaagatagatgcatgcagagaaaggaagtagaagaacaaaaaacttacacaatctgatacggattccaaagaatcccataagtgtggaaacttgtagtgggatcgaaccaaggaacaaacttttgttctctacctccttgtccattgctaaatacatttgtttgaattgctatcggttttccttgtctattccccaagaactcaaagtcaacctcatcgtgggtgtctcccttagaagtcaactgtaattacacaaatatataaagaaacaaattcacaatgatggaattctaaaatcaatgtaatgaaatgacaatagaaaaaaatttgcattgaaatggataaatacgaacgtacgtagaaagctgtgacaacaccggcggaatctcttggaggcaatttgattctcatttggaagaatcctgatccgtagtggcttttagactcaaagccagaacctgttatattgtagctagattatgacaaactatgtatttggatgttttgtacaaatttatatatatcgaaaacaattaagctacatagtcatttttgttacaatagtttagtaaaaaactaattagaaacctcaagtatattcatataagaaaaatgatagatgataatacactcataaatttttaaaacgatgtcgtagtttggaaattaaagaagaagaaaaaacattgaacctgaagaataatccatggagagctgaacttcttttccttggttgagtttcaagatatgatcttgtccccatgtaacgacatagttcacatcgaaatctatagctccacgtccacgagctcttgcattagcagtaaacatcaagaacaatactgaaactaattcaaaacaatatcttatcctattcattttatatgttaccttgagtatattctcagggagaagagagagctcccctacttatattcgtgtgtgttaggggattaattagagggttagttaggtgtttttttctaaatggaagtaattttctaaaattctacctcgtcaatgttaacaaaactacatttgaaccaaaactttggtcaacaaaactacatttgaaccaaaattttggtcaagaaattgttaatagaaatgtttccttttaactatttggttacataaaaccaaaatgagaattcttacctataatgacatatcatcatatctaaaaaataataaaaagtagcatgcattctctcttatatcaatgaatttttattttggtcaacatactaaattatcatttggtatattaaaaaatcatgatgaacagagttatcgagaaaactatttttagaaattggttataaaatgactagtttgtcaaaatttataagatatcaatgaattttcattttggtgaacatactaaattattagtattaaatttaataactattatggtataatcaaatcagattaaatatattaaattcatcaatttatactattatttttaatttatacctaatttttcgtaaagaaaaaaatggattgtatcaatgcaagaaaaaaagctaattgctatgtacaaaaggttttttgaagctaataatatgagaatgtttttcacttaaactatcattgattttaaatggaactataattctatccattatcaattttattattatgtttattgtactattaacaatggttgtgaggtcaactatgacgagatattatgcaagtgcatgattaaagtacctcaatataatgaaaggatcaaatccgcaaccaccaattaatgttacatgtcataagttagatatatatatggattggtctaagtagatcacgacttgtgtttgtgacgtgaatcaagcaacaaacacaagtcgtgtacattgggaggaatcaacttgtaaatactaacgattctatttcttgcatttagaatgatgcaaaacacaataattagcaaaattattacttaagtcgctaggtagaacaaggttcaaagcttcaaattaagtcttgtggaaatatgctattattctcatatggaatgcattcattataccagaatcttcttacctgctcttaagatgaacgtacgatatttgatgcttaacttgtatatttgtcataaaagcatactcttattaattatattgacattcaattggcaaaacatgaaatctagcttgatcagaaaaatagtcatagttcatatatttctctccaacattcttgtagaccatctgctcgtagacgcttagccaattatacgtcatggtgttccaccaatacatttatgaaccacaagctttggaattgttactcacttcatcaacgtgacaaacggagtcggaaaaaccttggaaataggccttaaaaagagcctaggttacaaagttccctagcggttacaacaaagttagcttatcataggacccgatgcgatattaattataagaattttgaaatagcagaggaaacatttaatcattttttctttgagtgtccgcgctttcgacaaatctaggaattgtcttcaaattcagatggagtttgctttacggcataaaacagaggtctaggatcactcatatgaagatcaaaattgtcttgagagcacatgatctggttcttggagatgatgatgcttggataattgaagacattcgataattgagagtagaaatctaacaaaggagatatacaggtaagcccataattttcagattatataataaaaaaatttatgatttgaattttttatttatttatttgaattttgttagcataagaatgtttactatatcgattatttgaattaattgttttgactattctcctcatctatgtatttgttatatttggtcaaagtcttcacatttgtattaaaattatttcccaaaagagtatttatatatgtttttcttgtcacttgtaatctataaaaacgttcttctctatcccacattcaatttcaaacagaaataagtattagataaacattatcctcaaactttttgcaagcatggccaaacaattgtgttcttatatgttcatctccatgtttattctctcaggtacaaattcgtatactaaacacgttataaaactcaaatataaactcttgagatcgatgagcagagacggtcattcttcaatctttttagaaaactagtgaaacatataattatctagagttacgaaaatgagtagatgattagttatgggatgatcaattggcatctaaatattgtttttaaaaactatgctttttttgtttatttaatatactcaattttatttgtaagcgttttaaaatattatttgttgttagcttttttggctttgccaagtgcagagggaggagcgactataaaaaaatgtgttgtggacgtgaaacttagcaagccatgcacttttcaagaatgccaaccactttgtcttcaaaagtataacgggaatggcctttgtcccggagatgacaacaatatttgcgcttgtgtttacaattgctaagctaattagagatatctctcgtatgttataaactacacctataactttcaaggatgaatgaaaatatcatttaagaatatactctggtaattcttaaaatcatttcatgagactaaatatcttcccagctccttcacaaattaaaaggctcgtttaaatttaaatctctaaagtaagcctttttttttttgaattggatgtaaaattttattcaaccaaaaagcctctttatctttataataaatgcaacagtttgtttaaagtgttagatgaaaaacagagaatgtacttatgagaagctaatgtttagcagcttgcttatgatggaggatgcttttacttagttatgatctccagtgtctctgattgaactgattctatggcgcacattcttgtcaattagcttaatgacgcgattcgttgttgagctgagttctcggtggcgtcttactatcctctgaagtaagcctggttttgatttatgaatcataagagaggcattcaaggagactacaaaacactcagttctagcgaaagaaatcatccatatttgaaatttagaagatgttgtatttaaaacatatataacttagtcagattaaatgtatgttaattctttcaaccaacgaaaactatagggctaaggatattgaattagcaatacttttcaccaagaaaatcaaatgatggtggttctcaagggttattctggacgttataattggttcatcataatactagctaggtgtttttttttcctcttatcaacctggtaatttcagaactagtgtttttaaaaaaaacttgaacaaaatagataagaaagcaaatcatgatagtcattatgcagattgtaaaatgtcgtcatgatatcggttaatagagtaaccatcatgtctttctttctacgacgatttcgaatgtcaatatgggaacttagtctcatttttgggttttggcctttgattaagcattgttgtgaaggttcattgtttgagattcacaaacaaacaagtgaagaaaagtacactttaaatgatataaaattgcaaaagaagctaacctagaaaatatcaagaacttgtaaaatggcagtgttacatagtggacagtttcctctctgtacccaaagctctctcgaacacaatctacaaaacgtatgtccgcaaggtataaaagccgcacctttactccttaccatacacacgcaacaacccaactccgctgcccccgtcaccgccaccgcctctcctcccccgtcgcagccatctcttccctccacttccacctcgtctcgcgcgctgagttcatacatatgtccatcattatcctccaacaactccattagagacatcctcggtggctgcatttcctaattagataaaaaattataagaaagcttaaacttaattgttctgataccacattagagttttgttaatataatctcattaatagttaattagaaacagaggatatatatgaagtttaaccgtctaactaactaactaactaactaacttactaagtaactaactaatacacactaatacctctctctccgccgccaacacggtgcctagccggagccttccttctcgctccgccgcttcctctgctgcgtcgctgacgtcacgactgctccggtttgtctccgagttagtgaggaggaatccaaggcggttaaatcggtggctgtcgttatccggagtaagaatatgattatccaaggtagggataggattagacgagatccaaccagtagcggtgcgtttaagacggagcttatcccggagagatttccaagcggttttatcacggcgacgctctcttctcatcacgtcaagtaaactactactagagtgattcctcaccggagttgtcggcgtagtaagagatcggaaactgctcgtttcagccatcagaatatcttctaaagtcactgagctccggccattctccactgttgacattcgatctaataacgtcactctcagcctatctccaccgtccatttgaatcatcttgtcaataataaaatgtgacctgaagacaagaaccacaaaatccactaaatcgtagaagagtatttttttttttttttgtttcactgagaaaatagtcagtgagagtaaaacagatctacttgaatatatataaggaacatcggataccttacctttcgccgacaacttcccttctatttgcactagaatccgcaattctatagcagcagagcagatctgtaatcaaataaatattttaatcaatctctcagaaactttactttatacgaaatttgcagtttatatatactgtacaacaatcatttcgtttctcagtttattgaataaaacgattaagaattttgtgggtcaaaaaggaataaaaacaaaaagtaaaagatgatcactttcttttagatattggttttgctcttttattcacttttttttttctgtgactagtgaatctctcttttgaaagagtgggagaggaaagagttttagaacgtatatgagagaacctaatttttgatgttacgtatttacccttttattttaaacattgttaatcattcaagttgggaggtaggggtatattcggtaatcaacattattttttccgtctttatgaatctttggacaagtctttttcctcttacaaagggtatttcaaatgtactttgagtttatttactctgtaataacgtactttgaattttgtttagttatatgtacacttttgtcttatttatcgtatagttttttgtattatccagttccaactttggaatataaaatgttttaagaatatgaatgttcatagttaattaggtacatagtggttagagacgttaaaaaagcaaaatcaggggttaggtcgctgatcaaacctgaatatgaaatggttggagagcatttttaagctaattcactcatcattttttttttaaaaaacagattgatcttgaggtgttccaattttgaaaattgtacaataattcagttgaggattttaaattttatattcaaagtgtttgatgacctaacacattaatgaccataacaatactggtccacaaactttgtttgttgttatctccataatgataatgtgatgtaagagaaacggtcaagtttgttatgagttttttcatttctacttttccaaacggatttggttcaatataagaagattacacaaaaatttggaacaacaacacatcactaaaccagcaccatagaaaatcaaggctgatccagattatttttaaagcagataactcggaaacaaaagaaagaaagatcaacaacacattccattggaaataagacgtataacaaaatgttcataagccaacatcatatgccaagataagaatcacacttgaagacttaacacaactcttgaaaacttctcaccatgatatagaatttgacccacggaggatcaaccaattaataacatttacctacaatatctcaaaaacccctattgcatgatatcgtcttatttcttgattttacctccaacgcgaagggcatggtcatggttccctcctcccattgattgtcctgcctatctagctgccttctcttgcaatgccctcgcgtctctacaccacaagaaaaatgatacgagactatggttagattgattaggccacggttaggacgttttaattaattagttttggtgttatgggtttcttttaatcatgggttttggaagttttacttttagaattaggtttgaggtttctttttacacaatgtattgtggcctatataaggtctcttcttcttaatgaaagaaccaaactccaacagttagcctaattctctaagagagagttgggttaaaaggaaacttttgcttaaaaactttggtccataacaagaaaccaacaatcgtccaatctatctaccaacattaccaatttcacatccttaatcaacaatacgaaacaaaatataattagctcatctaaaactaacaaacacaaataaacctaaattatcaacaaaaatcaacaaatttaaagagcttccaaggcttatgtcgtggtttatccattcagtctaccaatacaaatatcgaaatgaatctaagatgaacgtgttttacaaaatatcgtgataagccgttttttgtattgataataataaactataatactcaacttcttttatatacaacatcaaaccaaggaaacgtatgtcaatctagatttaacatcacaaatcagcttaaaccaaggagatatccctccgaaaccatgttacaatgcttacgattcaaagatgaaggagaaactcagtggacaaaaggatcattgaaaaacatgttcccaaccaaccatgacacaatcttggtcacaaaggtttaagtatcaaacattttcaaagaaaatgttgattggcattcgatacggaaacatgagtggacacaaatttaatatcttgttgagcaaggaaaggagattattaagatatgcgaataaatatcgtgataggcaagtaaaaagtaaacaggaaacaaataaaaaaatatgggtagcggtgcaggaaagaaataccaaataacttactcgattaaaacctaataaactcagaaaatcataaaatttgtctcaaattaaaatctaagatctctgtaaatctaattcattcattcgaattagaagcttctttattcatctattcatcatactctcatcaaaatatgcgaatttgattttaatttctatgtgtttatcaatcgattttgagaaaaaatcacatagacttcttagtttgagagaaattttgaggattttatgagcttattaggttttaatcgagttgtttaacgtttttctatgaattagtaaacattgactaaattttgggtcaaatttgttgagtcaacggcaatttaaagattaaaattgtgcacgcgatagtgcttattttaccgcctttgtggccctgttaattcacgaggcccatatcttgaacagcccataacaatgacattatcacattaagatgaaataagctcaattaagggagttgaaccagcacactctttcgtagacatgtagaaaacgatgctcatcttgtacgatgagattctacgatgctcatcttgtacgatgagagaagaatatttcttccatgatgcaacagagaacaacaaagatgattctgtatcttgtagtggcagtagcaaaccacatctgaagaagcgacataaggatttcttgatcggaaggttatatatcacaggcccatgatcgtaatgaaactcgtctaatttgatcgacaaactatagaaatagatcaaacctgatgcataaccacatgaaaaatgtttgtcactactaggataaatgtccatattaggatccggagggaaatccatatgaaagtaggcatttattacaagagacggcgatgacaacgacttctcttctagactcattagacgttgaggcaatgacagggccgacccaaagtaaacctgaagcaaaaacaattttattccatcattaaatatagtttaaaaaaatatatattcataatgtaataatgaaggttcaaacacatcatctttgtagagagaatccagctattaaccaatctaccacaataaatttctgtaaaatgatactcctaaactttgttatagtcatttgctgcataaaactcatgttttacgggctttagccttggaccagcctgcaacgagaataatctccaccaaccgttttcttcgatggcaaataagcgacgcaagtataaaagaaaaaaaaggcaaaagttctaaaataattcaaccggtttggtacaaatttccaattattactcggttaagtgaaccgtttaatatattttattgttcatacaaaacacatgccaccgacatctgacttttaaaacagaaccagtaatcatcgattcattattatttattatagtttccgtacgaaattaaacttccttaaaaaaaacctagtttccttgtgcttcttcttcatggatcatcaacatagctccgattcacctatgcatgaatccacaacttcttcttcttcttcttcatggagtttcggcaatctaatcaaaaccctatcgacaaaatccgaatctgtaatcggatcctaccgtcgcgatttggtcgaattcggatccgaattgaagaaagaaacctcaataatccgacgagtagcttcaagattacctgattctctcgaaattggcgcctccgtcgcttcggaatctctcgaatcggtaggtcaagttatcgacgatatcggcgccaccgtgtggaaatcaacggctaagattatttctcgtggtaaggaatctttagaaccgaatcgtgaccgtacaaatcaggttttgtcgttgaaaccttatcgtcgttttgagatgatgttacttgcgttacaatctgataaaggcacgtttgttagagaacctgatgatttaagtgattttgagaattggagtttagggttgaagttagaggagaaaaggaatgagattgttgagttgattaatgggaacaaaggtgttaaagagatctatgaggagattgttcctgttgaagttgatgctgagactttttggagaaggtattattataaagtttataagcttgagcaagtagaggaagctagggttaagcttgtgaagagagctatttctggtgaagaagatgaggatttaagctgggatcttgatgatgagaaggagaaggtagagagcagagatgtttcgtctaaggatagtgattattcggtgatttcgacacagccatcgttacttggtagtgaagatcttgggtgggataagatggaagaagatatcagaagcaatgaggagagattggattggcgaagacgggccggtgtagcggtggaggaagaagaggatttatcttgggatattgaagatgaagatgatgactctgttcaacaatagatagagtatacttgtgttacagaaaaggcaaagatttagtgtgatcatagttattaagtgtgatctatacctatacaacaattcttcgatttgtatagtactctgctttggtaaatttaatccaatatgtttaaattacattagatatgctgcaattcaaaagacaatgcagttctaggaaaaattaatttaagttcttaatctttttctctgtatcagtattttgagtaacaagaagagctaatgttaggtgtagtagcgattgctaatgtagaggaacaaagcttgttgttgcaggcttgcagccatcacataggtgaaaattttagaaccaaaacttaaaacttgtgtacacatttgaaaatctgttcacaatagcactgcagttccaatagcaaacatgaagaattctctaaggagaaacacaatcacaagccgaatgtttgttaaaatcaggaccctttagtttagtcaccggattcacattctaacaaagactcaaatcaaatataaagaaaagcatataaacctgaagtggaagagtaatcaaaccaccaaaataaacactctggagaaattccctgtgaagattcatgtaggttgggttcaaccaattagctacatgttgaatcaattccgcaacagacttacaagagtaccggcaaagaatgttgtaggattcctcattcccagagaaagtcatcgttttagtgtctccttcataatctagtttcaaactcaattaaaaaaaaaactacaaatagagctaaatagataagttagcagcagagagtcgagtcttatagcttccatctgaagattgctgagacagagtagtttcctgcaaaatcaccaacaaaactcttaatacatacaatatttgcttctcttgaatggatcaaga

SEQ ID NO: 576 - DNA, 86377 bp, Arabidopsis thaliana
aattctctaaggagaaacacaatcacaagccgaatgtttgttaaaatcaggaccctttagtttagtcaccggattcacattctaacaaagactcaaatcaaatataaagaaaagcatataaacctgaagtggaagagtaatcaaaccaccaaaataaacactctggagaaattccctgtgaagattcatgtaggttgggttcaaccaattagctacatgttgaatcaattccgcaacagacttacaagagtaccggcaaagaatgttgtaggattcctcattcccagagaaagtcatcgttttagtgtctccttcataatctagtttcaaactcaattaaaaaaaaaactacaaatagagctaaatagataagttagcagcagagagtcgagtcttatagcttccatctgaagattgctgagacagagtagtttcctgcaaaatcaccaacaaaactcttaatacatacaatatttgcttctcttgaatggatcaagaaggcaatggaacagtactcaaaagacatcaaatataccaacgtctagcaactcttatgctgtgaccattatggaatatcaatattcaccagatagtgtttcttaagtaagttagtgatattcttgtctatatatatatatatcgatttgaatcttacaagtccgtacaaaataatgaacaagaatccaagagacaaagtgaagacatgaagagagactaaagagctagcaattcataaatacaagaatagagactacgaaaaaaatcatataatgatataatagacactgatctgatccgaaaaggaaaacaaagggtgatccagatcaaaactgtcaaaaactgataatccatcaaatcacaaacaaaaaagattcatcatttttccaaaaagtgcagattgattgggaacacaagaaaatacaaattaccaaaatagaggactaaaaaatagaatcgaagtaaataatacttgaagacagaaacgacgagtcttctagaattatgcaaagactgcagagactacaagcaatgatgcaaaggttgagcatagtgaaatcagtgcaggaactgaaaaaaatgcagaaactaaaaaaaaggaagacatagaaacaccacaatacaaacaagttttctacctctacttgcagctagacctcagtaaccaagaaggttgtttccgaggatctacaccaaaagaaaaataaagttagttagataatattcatcacttatggaaaaagttataaaaataaagaaccggattaccaagtgactcttgaaagtcaagttcttcaaacatttgctctaaattggcaagtggtggttcagactggagagaagttcgcaaccattgttgtgtgcatatcaaagcttcggtagtgtaaggagtcaaagaacttctatacgggtccaagactcgaccactagtgcaaaaagcggactcatgagcaaaagaagacatttgaatagcaagaacatctctagccaattctgacaagattgggtagttcggatattacgcttccaccatgacaaaacatcgtaatctgatcctgaacaccatggctcagctttttccatcaagtaatcatccagctccttacctgcttgttcttttctcatttcattaatcatctctttgtacaagtagtcactacttatatacccatcacactcacctgattgctcagaacccctatgatcgctttgtattgcagcatcatcactttgagactgtttatccagcattatagtatactcttcatatagatgacgcatcacacttgtaatcgacaatgtaagattcttactttccaaactatctttaccatggagcctgtcaaagcaaagtgaagtaaacttcattttctttcttggatcaaacacactagcaacaatcacaagtggatttatattgatcaatccatcccaatacttctcaaacttgtcctttatacttgttgcttctttccttacttcttcatcaacgttgttacttaatttgattagattccagtcaatagtggcaatctcactgtaaccttttgaagaagctgctgctttacgttctgaagattccacagtacaattgaaaaagattccgagaaatgttaccaacctttccacttcatcccaagtagctgaaactggcggtccaacacgtttttctccagtctcctcctctatttcaagaaaatatttaccataaagcttgtcctcacccaacatcttatcgaaagctacccgtaacttaagtgcagctaccaacataagatacgtcgaattccactcagtaacgctatccaatgacaagttgcctttaggaacctttcccgtctctatacgaaactcgaatgactttattcttgataaggatgactgcacatacttcaccgcattccgaacagcaacgatactatcactcacatgctccatactgtcttttacaagcagattcacaatgtgaccacaacaacgcatacgcaagaaatcaccatctttaactaacgcattagctcccttcaacctcatagcatcctggaataaggttagagcctcatgatcattaccctcagcattattaaccgtgactgtgaagactttctcaatcccccattcatctaaacattcaataagacgtcttgcaatcgtttctcctttcttatctaaaacaggcttaaagctaatgattctcttctgcaattcccaatttgcatcaatccagtaagctgttacaaccatgtaactagatgaggtagtaggagcttcccatatatcagtagtcagagagactctcatcttattaacactaaacatcaccttcaaaaaagacttctcttgcaaatagatcacagcaatatctttagcaactgtctgtcgtgatacatcctcgtacatagggattacattatgacagaatctcctaaagccttccgattcaacgaaggaaaacggcagcccactaagaacaatcatctcactgactgttcttataaactcatcttgatcacatttcaaggatgtgggattaccactagtcaaagctttatcttcactactctcttgataagccttaaacagctcacatcttccaatgtcattccttgtacgattagtgctctctttatcatcgtcctttggaacaaagtattgtcgtatatcagaactttgagaaagtttcttccttggttttagttgatgatcagaacttgatctttgtgtttctgtccttttctttcccacactagtctgaactttaacttcttcattaagcaagtcattgttgttggcatgagaagaaggcgaagacatatctacaaaacacacagttctcagtgtcaagtgtcaacatcaagcagattcacaagcacatttatacttgaaggaactgagaaagaacaaaactttgaagcagattgggtttcacgtttagacaaatatagaagaaacatgaaaacaaacaaaccttgtactattacattacgtgaatcaaatcgatggtgaagaaacataacatttggaatcgaataaacatcaacgagaaagcagacctttacctggagatattaatgtcggttggtcagaatccaaggctcggagaactgtcactgtcgaagatagtttcgatggagatggtctcgacggagatgagacgccgccgcaagtttcgaagttagacgagaagaaagaaaacccaagtgtcttaaaatcaggtttagacattttagttgtttcatttcggttagttcggttataaaccgaaccgaaccgaaaactgaactaaaaagtttacagttgcggataagttctcttccagaacccgaagtaaacccgaacttcaacttcgggttcggtccggttcggttcggttaaatttataatgatcattatcaaagtaggagaaaagaaccgaacccgaagtaaataatcactttccttttgcatcaacttgaagtccagtaactcttctagacgtttgtgcatgcatgtcttcttctttttttctttttctttttttttttttgggcagcaacatttgtctctgtttttaaagcagagtattatcacaaacaaaacaagaaatctgtgatcgttccaatggtcttcctcaccggaaccacggtcgtgattatcaatttcaaactaactaaattagtaaattagtccaagtgttactttttaaaaaacactattattagtatagaaagtcgagtagttaattagttagctgtcgtaatattatagtattgttgagatatgtaactctaaatgaatcgttgacttcatatacggacagcctgtaagtttgagattgtctctatgattatctctgctttaaaaaacatattaaggcaagacccggaagctaggggaaaaaatatagaaaatcaaatagctagagaacgtgggagagattacaaatcaatatgtaaagagcactcaaaatctctcatacgactcaaaactacttagaaattatctctctatctctctctcttgctcgctctttttcttggcatctctatggattcggaggtggaggagaatgtcatatcggtcatcactgacacaacctttctcatctccacaaatttaaaggtggatccgagggtaatatcactcttttctcaactattctatgattggcgctctgtttatatggaaataaagtccctttacccgaagatggagttccatttactccttcgtcaaatactcaagttctggacctctacggacatgggtagacagtggaagtttgtatccctcatttgtaaaataatgtttctggttagctctatggatttggattcggagtcagagctcacatctctcatcaagaaaataatttctctcttcaactctaaacccgatacgggttcagagctcgtttccctcattacacagttgatgcgtatcgatacctctgtggattcggattcagagccaacacaagaatctgagcttctatcactcattagccaactagtctctgccaagccggagccggagctcacatcactcaccaggcggatcatctctaccttcatatctatgaattgggagcctatgcagtttatttccgtatgccctcaagttatggtggaacttgtacatggaaaactgacgacagaagttgtccggccgagaaaggctaaagagcgggaatgtgagttgtatgcttacgaaatttggaaatctacaagacaaatccattttcactgtatactatgcaatggcgagaaccatgaagagtatgacaaggttcctatagaggtcaaacaccctcttcacccaagacattctcttcagcttgccgttagacaatggtcggaggaggaaacgatgattgaatgttattgttgtgatgaatatctcatggattattattactattgctcctcttgcgattttgctatgaatgtaagctgtttggagaaaccaccaccagtcttatctatagaccatcccaagtggcatcagcatccccttattttgtttccaagtcaggcttcctttccttgtaacctttgtgccctcacacattcaagttgtcctttctatatttgtcccccctgtgacttcgtggtccatcaaaagtgtctcagcttaccacatgtcataaggatatcccgccaccatcatcgtatctccttcactccttcatttgagaaaggaaattggtattgtggtatttgtcgcaaaaagatggataatgattacggtggttatacttgcctcaaggacggttgttcgtatgtggcacattcaagatgtgcaacacaaaagaatgtgtgggatggtctagaccttgagggagagccagaagaagttgaagaagaagaagttgagccatttgtgataataagtgacggaacaatacaccattttagtcatccacatcatttgagaatggataagaataccggcagagactacgacgagaataagcagtgtcaagcatgcatcacaccaatctattttggtaacatctactcttgtatgcaatgcaacttcattctccatgaagaatgtgcgaatttttctcgcaaaatacataacccgatacatccacataagctcaatctagtgggaggatacgacggtgttaccaagtattataaggatttctgttcagtgtgtcctaggatgtgcaccaatggtttcttctatgagtgcggtaaagaagaatgtgatcgttttaagctacatgtgcagtgtgccacaatttctgagccattagtccatgaaagtcatgtgcatcctttattcttaacatccaaaccaagagaacgaagaagatgtggggtttgcaaaaaaaagccacttagccacacggaaacattcaattgtattgaaggtgagtgtacctttgctttgtgttttggatgtgctactttacctcacgaggtgaggtataagcatgataagcacatgctcactctttcttatggggaggagacaagtaccatgatgtattggtgtgaagcctgcgagaaagagataaattcagaagaacggttttataagtgtgatgaatattgttgtgtcaccctgcacattcaatgtttgattgggaaagaattatacttgaagcccggttcatcgtttgagtacgaccacaggcatgcagatgttcttttaaaaactcaggttatgtctcgacctatttgcttccaatgtaagagtcgttgtccacataacacagttatccagtggtctgagttagtatattgcaccattcattgttttttgtttggtcgactaagatgggacgaagaagaaagaagaagaaagcaagctgaaattgacaataaagatgtttgaatgaaatcccaatttaggagactatagttttgagtagagttatcaaagagactctgatgttcattgtaagttttgaatcttggaaatttctctgatttgaaaagcttgttaatgtgtgattgtgaacattgtcttgtttaattgaatctttgatttgtgaaggagaccgctagacgaactagaacggtacattggtaggaaaccattataataccactcttgtaacaacaaaaacatatggttgcttatataagatattacttcatcaaattacaacaaaaacatatggttgcttatataagatagggcttactctttctactggaacaagtttgtatatatttccaactttgatatgatgtcacatgtggcaaccttagtatcatcacagatctgatgagtctgctaaaatggagttcgaatttttgtaaatactcttaagatgtcccaatcctaaacacaaaacagttgttttaaaaaactcaattgagcaagtttgtatctatattcctttgtacataatactccagtacaacataaagccattaatttggttggctgagtactataattgatctttttatatgatcttacatctttctatgtattgatattgagtagtaacaagaagaactaatctttcgtggagtagcgactgcgaatgtagaggaacaaagccgtagatgcagccaccacatagggaaagattgtccatattccctgcacaaatattggaaccaaaacttcaaacttgtgtgaaaccaaatttacatcagttttctcttactctacttaccactgcagttgctactgctgcaagagcaaacatggggcgttctctaaggagaaacccaatcacaagctgaaacattttttagaatcagtatcctctagttagtcctcggattcacattgtaacaaagaatcgaaatcgaatatataaagaaaagtagataaacctgaagtggaagagtaatcaaaccaccgcaacaaactcctgcaaagaaacactctggagatattccctgtaaagattcatgtatgataggtttggttaaccatatgctacatattgaatcaattccgcaacagacttacaagagccccggcgaagaacgctgtaggattcctcattcccacagaaaatctttccactgcattcaacacaatataaactcattcatcacattctatacgaatgttttcccctgcattcaatttgctacttaccaaaacctgagaggttgccatacttttggactgcctgagtaatgcttaacgctttctctttacctataccgagctttattatcaaaaaatatagaaaacaatcagcttttaggatacacatacatgaatttgaaaatacaagaatagaaagtaacctttgaacaaacatcatctgatgctccactttgtctaaagagcttaccaatgtaaaacggtatcatatcgcttaaacaaactcccctttttcgattttttcgccaacaaaagcacaaaagaagttatgataaccgttaagaaccattggagatatgttgtttttgaccagagatatagcttttaccagtaaacccatgacacagtagacactatataaggagcattccgagaaaaagactcagcaaacgattgccacgtcccatctagagttaacattctagccaatgttatcccaacctgcatttaaacaatcacaagaaactgtcatcaaaatgaaatctgattatgaaatgaagcagaagtactggcatatagcacacaaacccatatatttagagcctcttcgctgataaaaagtccgcatccggctgccattagcaaccaaaagtaaacccatctacaaaaagaatacattggagttcttcataaacatacaaatctggttcataaggaaggtaactagagatagtttaacggctaaccccggtgcatttcctggaatcatgaatctgtttccaaatgcattaaacgtaaagccttctgaagatgatgaaactttggccaaactcttaacctcctcaaaaggtgaaccaccaccaccagagcctttcaaggctacactaataactgtaataatcatagctaatcctaaccctaaacctaactttactatgaatggaactccctttccagatactctttcattctcatcttcatctttgctatctcgagacttctcggaatcattgtctccaacaattcctatttgagagcttcttaccttgatcctgacacattaacaacatcaaattgtcaaccaacagatcaatgaagctaaaggaaacaaacccacaagccaatatcttggcgagccatacttctaagcaaattgataatcaaattccactaagaagagtggcctaaattccgtactcatatctaatcgattctatcaaaactaaattatcaagaagtaaaacctgtaacaagtaagcgagaaggatccatagaaaactctggagccattgaagacaacaaggttaggttttgaaaggtttaaggaaaacccattcaccggaaccaccatggaagacaacattcttgggatttgtgtctccaacgagaccttgttttgactcttgtctgtttattctctctgtgattcaagacaccgtcgttttattggaaaaaatccgtaaataataaaaataaaatgattttttggaaattaacgattatccatctataattttatttttattagatgaaagtttcactatttaaaatatttaaaatttttaaaaattaaagaaaaattttaaaattataaatattaacattttatactccggattgaattttaaaattgatgagttaaatcgatactaatacaagacgatatattacgaatgaaataatataattatctatatatacatttttgcagccattttgtaaaataaatcttggagttagaacttatttacaatggcagccactgacttttaattattgattttcttttagcaataaattgattaacaaacaaaaaatatttcaaatatattccaatctcatatatcacgcagatttcttcaaaatttgaactagatttcggaaattatttaaaacaaaaaatatttgacaaaacaaaatataattgcaatcccttcaaatgagcaaaacgcacataaatacattttttatcagttcactaaattttatttctccaatatttgaattagatttcgacaactatttaaaacaaaaatttgtttgacaaactaaaatataattgcaattccgtaaaaaaaaattttaaattagcggtgtactacagatttttttaacgggacgggtttggaaggatgttacttaataacaattgtaaactataaatattttatagataaatataatttacagacttttatatatactaattttaaaaaataattgtttccgcggtgtaccgcgggttataatctactataatcttaaaagctaaacaaaacaaataaaattaacaaagcaaatacgatttaaaatttatttattttacaaactcatctcgattcttttataaaaaaaatttaaatattataaatattaaaaaaaatatttgctttgcaatgtatatatttcaaatattttatatattacaaattaaataaaatttcaaatttcaaatttttagttaaaagttattgttttacaatatatcatacatttaaattaaagaaataataatatttatttaaatcttgtcttcaaaataaaaatttaattttttaataaaaatatatgtccgtagtatacagcaaattaatatctaatcttataatcttaaaacaaatcaaaatacttattactatatttgctttgtcacgtggatccatcatttttgattatctggagaacttgtgaagtaagcgacaaaattattaccgactcttttttcttttctttcatttcatttaattgaaaaacaaacaaaacaacaaccaagattctctgtcctaaaaactccttcttctttctaatctctccttcgactttcaggtagatgttatactctgacctcaacttcatctctgtccacttctcttccgctttctctctttgtctatttatcttctcaactacacaatttatctttgactttgtattaaggtttttcgttagggtttctttagtctagaagagctaataccactttcttgattttcttgatttaggtttctgtttacagatctccaaattttttggtgtgtgtgtgttcagagtcacaaggtgagattctaggatattcagattcaggcttattgattgagagagaaagagaaatggactaccaagaaagttatagattgacattttatggaattttggttgcttttatggaattagcatttgcttattgtcttctatgcgtatcagctttcgtctttattacatcgaagttgctactgtttatgccatgtatcgggtaccaaaacagtgatctctgcatccaaaaacttctctttgattggccattcagaatcatactcagagttcagaagctagctactactaataggccaagcgttttacatcatcaagaacaagaacaagaacaagaacaagaacaagaagagaagactatggttgataaagataagaactcggaattgatggatagagttaggttgttggaagtagctgttgagcaagagaaagtagctaaagctgctttaatggttgaattggaacaagaaagagcagcttcagcatcagcagctgatgaagctatggctatgattttaaggctacaagcggataaagcttcgcttgagatggaagggaagcaatatgagagaatgattgatgagaaatttgcttatgatgaggaagagatgaatattctcaaggagattctttttaaaagggagagagaaaagcattttcttgagaaagaacttgagacttacaagcacattgatgatgatcaagagacggaagacaacgagaagagagaatgcgatgaggatggagaaccgattgtgtatgatgttcatgtcattgaggataatagtcagactaaagtgagggatgatgatgtagcagaacacaaagagatgaaggaagaagagatagtcaaggatcatgattcagtatcatcacctacttcatcttcaacacatctcccataagtttctaattctgattgttgaactctgtttttgttaatgtatgtgtgtagatttggtgtaatttgtgaatatcaatagacgttttatcttttaagtggtgtcacgcataagatgaaataaaattgttttgattgaaataataaccaacataagttgtatatagcagaacaatgagtaaatgagaagagagaattctcactttgacactaacaaaaccaaatttcagatgcaaaatcaaaatcaaaacaagcttcaaccaaacgggtgtaaaactctgaggtgatagacgtcggttttcttcaatacttgaccggggcaagaacatctagctgtgatccgagcctctcttccgcaaccttctctgccttggtcctgagcttgttgagttgcttcttacgctcatacatcacttgtgatctttcctttctctttgtctcaagttcctgttagaatcaaaaactccaaacatcagtttcagtgacctagttctacaaattctccaagtaaacagatttggtatccataactcgatgtctacacacaaatacgtctagcagaaatacgaaatactcactttaatggtatcataatggttccagccaacctcagaagataaacgtcccaataagcagtacttgtgaccactctgaagtctcaaaaccctgattaaaaaatcaacagatcattaacacatttggacattaactattacagaatcatgaaacaaaacataacaaaaaaacaaaagagaacttacttaagagcatcaggaataaccattctcttaatcttgtcgtaaggaggtgggattccctcaaaaaccttcaagcgagcaagtgcagcagcaccacgcttggtcttgtgtggaatcatcctgcaaccacaaaagccaaaaattcaatttcaccaaaactcaaaaaaaaagaaagacttcatctttattaaaacgctacatcactgaatcttcacaaagaaaacactttcacataaaccgattattgaaactaatcatatgctacatttttattactcaaacagcaaatacagaaccatttatcaaaaacttatcacaacaatttgagagcagtatatccaaaactcaattaaataaaaaaatacatctttgtataaatgctacatttctactactcacacagcaactataaaaactattatcgaaactaatcataacaattccagagtaacatatccacaattctaacattataacacacctactacaattctatcactcacacaacaaatacaaaacacaattacacaattgaactaccaattctcttatacacacagaaaaaaaaaaaaaaaaaaaaacagagtaatcgaaatctatacaaagaaaacgcatttgcactaatcataaagttacaaactttctccaataaaaatgaagaaaattagagtgaacgaacgaacccgcgaacagtgcgccagaagatcttggaaggagcacgaaagtgaataggaccatgagaaggcttagtgttcatacgtttcctaaggaatctcatgtacttcatcttttgtcgaaccaaacctcccgagagacaaatctcttcacatcggacaacaaccacttcctgtccgttaagtaactccttcgcagtgttggaagctagacgaccaagcatgtggtgtcgcccgtcgacgacaacgcgcttcgcgcatatccctgacccagacaccatcttcttcttcttcttcttcccttgcttcggctctgaaaaagtagattatcatatatgacgcacaacacaaggctagggtttaaaatgggtttaaagcccaatattggcccctttacttaagaagcccaaaattggcttacgttggggacaaaacttatgatctgtggatgagatatggaagaaatcattattggatttctaagaatcattatggtacgtatgatacaagagtttaaagtattatagcagtgaaaaactccacttatagaactcgataggctaatgagtattactattggactatccaaagaagattgatgattctgtttcatcgattcaaatataaacattctcataatctttaagttctgcttcagattttgaaccacaaccttagctgctttcgttggaaacggtatatgttgttcgaatgaaacggatcaactaataaggaactactagaaagaataaatccatcagaaaaaacctatttaagttcttttggagaatttgctctaaacaaatttttttcttttttttttgttaattataaacgatttatgttgtaagagaatcctccaaacttcacaataacttcagatgacattgtcgaaagatcttactagaagacaaaacagaggaaggctagcttttggagtgttggttgtctttttattttcaatcaatttttttaagtttgattgaatgtacttttaaaaaacataagtattgtcttgcccaataaacaactcatcatcattgacataaaagtagatcaacacacgaaaagaagaagacaacatcaaattccaatgttagttcttcatttattagacaacaaagcctccattggctctaataacttgaccgttaatccattcaccaccatcaccggccaaaaaccctacaatctcggttatatcctttgactcaccgatcctccccataggacaagcccctgcaagcattttcaccgtttcatcactctttccagcataaaacatctccgtcgcaaccggccctggcgccacgcaattcgcggttatccggcttcccttaagctccttcgccaacactttcaccattgtctcaacggcggcctttgatgctgcgtaaactccataacccggggcgagaccaccaaccattgatgtagacatcataatgattcttccaccacctcctctcataacccttttagctgcttccttgcaacacaagaaagaccctcttgtgtttattgtgaatgtgttatcgaaatcttctagtgtcgtctcggataaagatggatactttggatccaaaacacctgcacaattcacgacgatgtgaactttagatccgaactcttgttctgtttgatcaaacaagttgttgatctggtccgggtctgacacatctgctttaactgcgatcgctgactttaattgagatgagtcgtttagttctgaaaccaagagttcagcttttgatgagctcgagacataattgatggtgactcttgcaccaagagagtggaggtgaatcgcgatttcacggcccatgcctctggtggctccggtcactatagctacacgcccggctagagggagagacgatgagcttcttggattattctccatttctcgatcgtgttttttttcctctgaatttttgattaaaagcagggaaaaatatggaccacatttatagacttatagttgttggatcacttgacatacagccacatggccgtcgagtcaacggtcttattttgagacatgtttttgtttcgtaagcagtgacgtgtgcgcattacactcttttgacatacttgtgtcttcttgtatccaccagagatctctgacaacaacctctatcaggctccaacttgtcccaccatcatactgcttttaggagaacccaacctgcctgaagcgcagccacaaagatcattactaatgttgtcatacccttttgttgacaaaattattatcatcatcattattagcatcatctagttcttctagatcttcatttaactagatcttcaaatgagttcttaagacggttgtgtgtttaaggtcgaagaatcaagttttgaacattaacctacatttgatgacaagtatcggccattagtacaaaaatccaaataatatattaattatttcaattttcaaattgtataatatctatgactgagtgaatgatgacaatataacacacttttatcgtcgaaatgtgatactttcgctaaaatgtattgctaactgaagataatggcaacaatactataaatttaggcataattaggaaaaataaaatcaatacaatcaacacaatctttatattgtaggcacatttttcaaattttggaagttgcgagataactgttataaacttttatgatgttgtgagatttgttcattgacttcatttttctttgaaatccgactgggttaaggttcaggttcaagttcatgtttgccttgtatatagttttgatttacatttggattaatgtctttatcttcatgatttatctgatttagattgtaaaaagagaaataaaaattgaaaaagaatttcatgtatgaaaaactaaaagctagcatgctcttttgtatgttatacgtatatcatctctcaaaatatttgttattattattttagactatggtaattaatacctaaatcttcaattaataattcaaatagaacttactcgttaaatgaaataaagtaagccttaatacccatctacaactgtagagaacccaagtcatttgttaaaaaaaaattcaattttgcaatttcttttgtgaaaatgttaactatacaacattaaatgaataaaatatagctgtgaaaaaacgtatattaattttggaaacgtttggtaaaaatttgttatagtaacgagtacacatctcttggagactcacattgaagccagccctggtcctccacggtcttaggagataaagggttaagagcggttcccgttagaccggaaggtgaaccggtttctgtactcataaaacttaaggcggtgacaacatcactgattaaaggtcgaactattggttcttcttgtagacacattgccgctattgctacagcttggttcaaacttttttccgggaactccccttgaagaagtggatccgctagctcggggaatctatttggttctctgaaaatcggttgtgcctaaaccacaattgtagatggttaagattaatgaactttaagcatgtaaggcttttacggttaggattgaataagaattgttggtttaattccaatttacagtttgattactcttatatgttgattaaaatgaaaatgtatttaaaagttaaagatggtacttacccaagtaaccagattttgttcatgacatggtctcgttgtgtcgataactcgcttaccggttatgagttccaacaacacaaccccaaaactatatacatcagatttaaccgtcagctgaccggttttgtgatactcaggagcgcaataaccataagttcccactactcgggaagatacattttgtgtgtccccaaccgaaccaagttttgccaaaccaaaatctgatagttttgcatcaaaatctacattaagcaatatatttgacgatttgaaatctcgatatatcaccggagggtttgccttttcgtggagatattcgagcccttttgcggctcctaaggcaatccttatccgagagttccaatccaatggttgttgtcctactacaacatctggttcaatcaaataattaaacagttccattactatagtacaaaattctaaattcctaaaaccaaaaaaagttaatagttttaagttttgagtaaaataaaactatccggctcaatccaacaattttgacctaaaaataaaagcggacaaaagaaagtgttaattttaggaatatacctaggagatgatcttcaagggaaccaagaggcatgaactcgtgaacaagaagtctctggtctccatcaaggcaatatccaatgagattggcaaggttgggatgatgaagaagacttaacctgaagatctctaccagaaactctctattcccttgtaatccattacggtcaagttgcttcacagctaccacctaaagtcataatttcaacaaacaaataagaccaaagccattgattaatagagaaactctctctcgttttcttactttatttttacctgtcctgtcttctccatctttcctttgtaaaccctcccaaaccctccttctccgatcaagaactcttgcctgaaactatttgtagcggttgctaattcacgaaatttgaaactctttgccttgatatttttcggtgattctttgttcgttcccaccgcttcccatgttgttatctgcctacgatcattccctgttaacaaagttggaaaatgttaacgaaaaatgaccgatttctcgaagttttatacgactagagagcttacgtggtaggttttgttgttcataaggagcagccatagatgagccttcattctccctacttttgttgtttgtcgatggacccaagaaacaactcatttctaaagaatccaaaaacctaagctaaaatttagttttgtaggatctctcttgttagtttaagaataaattttgaaaattttcttgatggatttcacaagaacaacataaagtatgccagagatcctacaaaccctgtttttatttatttatttatccagactttaatagttgattatgttttgttgttaaattcagatgtttcttaagaaagaagacatgtttgacgatgaaacaagaactaaaaagacaacttcatgatgagatgtgagcaggctgttttttttttttttggttagaaaacaacttagggttgaggatattagtagaacagagaatctttactaacgttttccaataataatttacgattcttaattattaccagatatcctaattaatgttgacttcttcttttagtatgtttttgttatctctattgttttttgtttagcttgtttaagtctaatagatcgctaaaagaaacgaatacctaaaaataattcaatcaattttaccaaaattgggcttcactagttgttcagatcgcaaatgggaataatttcgggttcaaacttttgatgtaaattatattctacatccttggtgcttgaaaagtaaaaatagggaataattttttttatgaattattgttttagttttttttttttttttttacttttttgtcatgagatcatttgtgtataatattcacatcgtaagtctaaactatttttaattttaatgaaatagtttttttctaggttaaaaaaaagaaagagtaaaaataggtcaaataggttaaaaatttgtatgcacaccacttaaacatccacttcacagttttttgacgtgaaactctaataaccgatgacttaacaaaaaccaccttaaaccgagattaataatccatagaatacaacttagtctaaacatgtatttattttgatatataactattcaaaccattttttactcttaaaattgtatcgttaagtataaaagtgtcgttaaaatgaaataatgtatattccacattcttaaattatttaccgtagattttaaattttcttgtgttcaactatttttttttctctgagagtaacccaatagaataagctctaatataataagcagccaattgatttttggcatattatcattcgtatgtccccatttatatatatatatatatatatatatttggtttaaaattatagatatattatatatacatgcatcactaaatatataaaagaaataaaacagaaatgtgagggaattatatacagatggatacatacacatgtgaaaagtatttgtctctccttttctcatacaatgctaacttccaaaacttagaagacgaagatcaaaagatttcaataaacgaagaagggaaattcgtaaaggaaacatagatatataattaagaatccatgacaattctctccatccattacaaaattcaatattaataatatacattaactcatctccaaacaccccaaatatttaattaattaaattaccttacccaaaaaaccggttgctcacctagttggagatagggtttggaccacttggaacctcatgagcttcagctctgaactctctcctcctcttcctcgccgaagaagaagaagtgccactgcgtctagggtgagctgttggacgcattttcatagtagatgaagatggagtggaaggttgtagaaggaacctcttggaaggagccatagtgttcttagatgaggattcatgaaggtgatgattcatggaacttgtagggccaatgagaaataagaaagctaagaagatgattgtgatgatcaaacggatgacttgatggaaatgcaatgacttgatgctggtttgatcaattgtagttgccatgcaattataaagaagaaaaaaacaccccccaaaacttcaagcagggctcaatatccatgaaccagcagagctctaccaaataaaaaggcaaaagagaaatctagtacgaataagaaaatgaaggaggagcttgatgagctaattatgagagagagagatattcaaatttccacacacgcactttaatctaataatggtataataaagatgttgttggaaaacatcgcatcaaagattgttcagcctttgaagaaaaaaatgggacacctgcttataaaaaaagtgtggcagatattgcacgaggtatcaaattactaaagagcccttttatgtgagcatctttgaagagtgtgagacatatacatgggacagagtagggctttgaataagatgcactatcagttcaggttttctttggttaggttacggttttgccccctatgaatgtttctaattttttggtaggactgccactggagaagaggaaaatatcgaggaaaaggccaaagcatgtaatggtcaattggctatggcaaagaatcttgaaagctaaggagaaaaaagcaaaagagactaggtgaaataaagaaggttttcatgcttttttcctccttttgatttatttctcaagactttttgtagctttacttgcttacctaagaaaatgttatgttgactacgcttcgccgattatagatattgcgtgtctaaaataatgtcccattaaaaactagtcaagagactcgaagatagtgagtacaatattaaaaattacaaacacattgcaactttgcaagatcaattgttattgttttactttagttacattattcaatattatcttgtagtaaaaggtttgttttttgaaagcatcattgtcaattaatgttccattttcggtggtataataattagacaacttaagtttttttttataataagagtgtatttttatgtacacaattaaaccccacgagggaggaaggtggattgaatccattacatgtgaccacctcactatattaccaaaaatactgtacaccatatttcctttatgaaaaccccgagagaaaccgtaatagagataaaagcaaacgactatatattttcataaaatatttgcatgctacttagatttgattgaattcgtgaagaccaaatttttgtcatatcaattgctatgacagaacgaatagctaacataggtttttaatgaataatattaaaggaaaaaggaatcatatactcatgatatcccctagtacaagcaatggctttttttatttaatatggttgaggatatatcttcacgttatcacctatgtctatattctcatgtatgtgcttatcaacctatatactcgacgattagggaacctaattaagatgaaaaaacaaagaatataaggtggtggaagcattcaagcatgcagctgcaatatccagtgatacctttaaatttgtctttgcatgaacaagaatattaataaatgaacttattatattactcgattttggaatagtatagagtgcatgattgtttccatacgtttacgtgtattatatgggtcccaaaattttctcggtatcgtgcacccgagaacgatagtacttcgtgctcattatcgtcattttttcatctcttttccttttaatttttcttttttatatatcatttccttttttgtttaagttaagttttttttttctgccattaattggcccattccccatcgatgacgttcatggtatatacgtagttcataacagagtttttaaaaattgatacatatagcaaatagcaatttaccattgtgggattgatattttattgaccctgatgacaataactcatacctgctactgctagtctgttacctcttgtctcccttcaacctttttccaaactttcacgtacataaatattaataccaaaattatagattatgaaggtccatgattttctatgataacagagccgtatattttgtatcgttttgtttttgtcgtggagtttttgtatctggttacataattcgtattagtattttttggtgacgtagtaatttgtgttgatgttcaaattacgatagaagattacaatatttaacgtataagtttaaagcgcaatgatatcttatttcacatttaaaataacgatgattttatttcctttagattttaattattttattaaactatcatttagaaaatattacttttatgtatatattatccagataattggatgtacatatctggattaggatgcaatcagacgtaaattagacgtcattactaccaaagcatcatccaatattacatttaatttaatttttgtactcgatcttgtaacaatttaaacgacagaagaaacctaacacatggacattgcctccttgatgttttgttttgattatctttgtttagattttttgacgccatatatgttacgtttcaaacttttcctacaattttgggttcgaaaggtcaaaatggtggacctataaatcttatacaatatggatctcatataaagttgttaaacatacataactaaaataatctaatttttgtttacatttgtataacaaagttatatatatatataaatatatttcttaaaatataatagttacattatgttaagttttcataaataactcagcaaatgtgaaagagaataaaaagaaaaagaaaacaatacttgtattgtgttccttatcgttttctattgtagattaggtggattgtaccctctaaacttatagtagtcgatttgtttttttttaaaactaaaataaaaaggatgcatgcattgtaacttatatatgtatttcacatttaataaattttctcgtcgaagtgattaatgattaatctagagagtgaacatgtttttttgtaggaagtttttaacaatctcatcacagataaaacatttgaatagaaattcataatgtataaagatgaatgtttgcacacagttgaatcaaatgtgaatttgtagtaagcttatgatgtcggtttcatagtcaagatcactataccaccatcaccatgcccgaattacaaaaatctaattataaacaaggaaaggatttcaaattcttggcaacgcttatttcaatcttacattttaaccaaaatgagaaaataaataaattataaggtgtatgaggaccccatccactacacacacaaccacgcaaaaaagtctttatgataataattttacaatgatctagactaaatcctcagtaaacatatccaatgacaattttcaccaatctgtttctccagattttggattcctggctttgttcttgacagtgatgcttcatcaaacttttcgtttctttttctttcttgttttccatatattttgttttgccatgttacagattaaaaaaaaatgtaaaacaaagacgaagaatatagacttaattagaaaacaaaaagcgctgttctatatatatttattattgtacgcatgtaaatggtgtaggagattaccacaagtcaaatacaagatacaaaattataaaggaaatgagaatggtcaatgagatgtatcaaaaatcattctttagtttttactgcattctttccgagcattatattctttattgctttatgtttgtgtaaggcttcacatccaaaagaaaaaagaaaaaaaaagagtctatgaataacaagggtaatttcataaaaaatgttacaaattatcatagcagattagtggtaagttatagtacattagtggtaaattaccataaattaaacataagaaaatcaaaaccatgtacttggttgatttttccttctttttttttaaatgtttattagttttggttattagttaaaagtgaaaattaatttaaaataggtgaaataaaataagatattccaattaaaatgttgttaaaataactaatgatcaatgaaattgaagaaaaattgtatgtaaattttgtaaatttatgaaatattgtcttaaactaagtgaatattttgaattatttttggtttacagttatgataaattatttcatttaatttttaaataattaagcattaatatttttggtgcaaaagaaaaaagcattaatatttttaacaatgtgtaataactcttgaaaatctattatttagaaacagaatgtgtaaaaataatggcaacttttaaaaactgagcaattgtagggaaaaatgtcttatatgaaattggctagaaaacatatttctaattaaaaataaattgctagtcccttgtaaaacataaataaatttaatgcaatgtgaagggcaagtgatcggaagtgtctagggagaatcgtcaaatagcctactagagacctatataatgcaatgtgaagagttttcccgaagactaccaagactaccaactctcactctctctatctcatattttcagttctctgttgtatataaatgcataaacatgagtcacactgattaggaagttaagagggttattaaaatgacaacttctatggtctcttccatgcctatttctccttcttcttcttgtatttccgcatataaataatgcccttggctcacaaatggacctccaagcactaagtgagtctttttcgtttttatacgtttactagttaagtttatttagtgttgtttagtcctgattttggttttggttttttcgagttaacaattttcaaaatgcaacaacaaaagtaaaacttaacctaacctaaatcttttggtacaaaagagacaaaccttcctgatcaagtaacggacaaactcggaagacttccggatgcttattgatcttattgacgatccttcagatgcagcgcaagtcacaagttcaaatgggtttaggttttggtgctctgttttagttagtcgatgagcgtttgtgtttccttatggacttacgattccattttactcgttttcttccaaaggtcacactcctctcgctttagtttccaatgagtcaattacatatatcacttttttttttccttatcttacgttgtggtttttcgttttcttcttaactttcttctcgcaaattcaagtcttgttgatttgcggcttgtgtcttcttcaactaatgtcaagacagcctgagagatataaccatgtatagtcatgtatcaatgctggtttaaccttgatttatatcaacttacattgtttacatcgttttttcaagtacatatatcttaacccttttagacaagtctctgctgctattaccaaatcttcaacttaaacccttgaaaccatcgttcagtcttcatcactggaactcgagctttcctctacatcaaccattatagtcttgctctcaacggtcgatgtagaagttacagaggcaacaacaacagcatccggatttcgagtaatggctactggtttggaagcaacaagtccttgttcctccatagtttctcgagctgctctttccttagctttcttagctctttcaagaacctcttcctatattcaatcaatcaatcattcaatcaagacgctttcgacttaactagtagcagtaatctccgcggttttcaagtgccgttctacaaagctcacaaacctaatcagcttatcagctcaatactaactaactttttaagtatcttctatggtgaatagagtttccaaacctaacaacaatgcttcttcattgacaaaaaagcaagaagagagttgaaaaagtaacctgaatctcttgaacttgtttctgttgctcagcttgaaactttccaatagtactcaacacttctccaacagtagactcaattctctcattgataacctcagctaatgctttccccaaaaagaaagcatctaacacacttttgttctcattttcaccttcccaaacaaatttctatcaaattgattctcaaaccctagaaatttaaaacttgaacctcaggaaacaaaaattgaaagagattctcacctgaatctgtacctttggtggagcaattggaccgtaaagaagtgcttcttcttcgagactccacatctaatcgtaaccggtggaactcaaaattggaacgagaattgcggagagtgaaggaatgaggagaggtttgattatatgaattggaaagagagaaggaggaaggagatggaatcgtgaagctactcatctctctctctgtctctcttactctgaactgaaaccgtctcaggaaggtgaacgagttttgggttttggagccgtcgatatggattataaattatatttgggctttaaaaggcccatatatatgaattatatatttgggctttaaaaggccgaaacaataacctctttcagtcaaaatagataacaaaaagaaaatatgaaaataaaaagcgggtatgcggaaacgaagcgtttagaaatgtgaaaaatttcgttaattttattaaacctatgtaaatatttaaaatctttgtaaatgcatgtattaaatatttcactataaaatttatttattttaaaataattatgtaatactttatttatggggtttaaatcattaattatattttaaatatatattttattaatttttgatattttataatttttatgttatccattacacatattttgatcattttttatttagctgttgccgcaccaactggttactaaaaaaaaaatttctgcaaaacacaataattttcaaccgctaaacaagtcgtgcaaaacgtttaataagcttgaaaccgcaattgcccgcttctaacaaacttccacagtcgcaactgttcctattgcgtttattccattcagatccaaaaatcaatagttggttcaatcgaaattcaagataatatttatatagaattacaagaaaacttactaaactttctaaaaaaccattataacataatatagtatatgtagtatatataaaccctctcgtcacctctcacatcctctttcttttactctctagatcactcacatagttacattctctctctctatcacataggagaggaaattaaaactctaacaacaaccaacaatggtggtcgctagaacattgttctcaatctcagcaactctaatcatttttctagcactctttctccatgtaaatgcgtaagttcaaagattcacaatgtgatctccgtttttttctatcgttcgaacagagtttcttatattgatgtgtattaaaatgcagagttcaagaaacaagggaaccgaaacatgagagctcaagaaatacatcaacggtagataagtgagttctcacaacagcttttagtgtagatttaatctcagccgttcagattctttaactttgataataaaacgatttttttttgcatgttctgttttctcagtttatcagacggtgaatggcatgaacacgccgttaaagacccagaagaaatagcagcaatggtcgatatgtgagtctctcactattattatacatatataaaataaggaaaacaactttattagatatatttcgtattagtaacgttttagttagtcaaactagatgatgctttaactttactaaacctatgtgtagaccaagaaaaacattttctacatctatgtaaaaagttagttttgttcttctctatcagaactttttttaataagcattgtgatccacaaaatttaaagttatcaatatatatgactgaaatgtacttttatttcctcgttcttgttctgccaggaaacaaataaataaacatgtgaaaacacttctgacataaaaacagtagttttattgaataaaaccacaaaccgtgattcccatttatacctcactattttctgcttaagatccaccgacgacgcatttgtattaatatttacatacatcctctctgaagactgataattaaaaacattttttttcatttccggaattttttaatatcttctatatattaatttatatataacacttactttacaattacaattttcaattgtataaagtattatataaaaaatctgaatctggtacccatagtttttgcatttaattacggaattatggagaaatatgaccccaaattcctatatggatcgtatcccatgaacatgaaatatataattccttatacaagaaaaaattaaattacccacgtggggccacctcaccttgtcaaattaaattcagtgctttcttctatttgcattttcctgtctcctatattttgacttcttaaacagttgaagttgatatctacaatatcacaaacctcacgggttaattttatataatctataaactatgttctctttttgtaatatcattttattaactggaacatgcatgcaggagcatacgtaacagtacgtatcgtagaaagctagggttcttctcctcatgctcaacaggaaacccaatagatgattgttggcgatgcgataaaaaatggcatcgccgaagaaagcgattagcggattgcgcgatcggtttcggacgtaacgcagtcggaggccgtgatggacgttactacattgttactgatccatctgatcatgatccggttacaccaaaacccggtacactccggtacgctgttatacaagacgaaccgctatggatcgtctttaaacgtgacatggtcattactttaagccaagaactaatcatgaatagcttcaaaactatcgatggtcgtggtgtcaacgtgcatatagctggtggtgcatgtctcacggttcagtacgttacgaatattatcatccatgggataaatattcatgattgtaagcgaactggtaacgctatggttaggagttcggagagtcattatggttggagaacgatggcggatggtgatggtatttcgatttttggatctagtcatatttggattgatcataattctctttcgagttgtgctgatggattgatagacgcaattatgggatctactgctattaccatctctaataattatctcactcaccacaacgaggttagatatttttttcattgattctattctagtaatttatgtttaccaaatttggtaactagttaggtcatataccaaaagatattagtagtatcggtgcagaagttggtgatgatttaggagtgcacatttactatgtttagaagtaggacgggaaatagagggtaaaagtcagaaaccgataattcggttgtaagaatttattagccgaaatataaccaattataaaataaaaggggacatgaaattcaggtaacatgtgagatttgtgaaatttctattaattgattgccctaatgatggtagtgtgttacttcatctggggtctttggttcatcttttgatcaagattaagtttccgaaatgcaaaccggattgattagctcagtacttaacaaaagcagtgttttgtttcttggtctaaacatcaaaagctgacaatagatgataatgcaggctattttgttggggcataccgattcatacaccagagacaaaatgatgcaagtaaccattgcatacaaccattttggagaaggtcttatacagagaatgccaaggtttttcatctaaatttcatatcattttttctgtgacaatacttgtatattgatttttccttagagaaccagtcagttttcgaatgttatagagtttggtgttatttcaggtgcaggcatggatactttcacgtagtaaacaatgattacactcactgggaaatgtatgcaattggtggaagtgctaaccctaccatcaatagtcaaggaaaccggttccttgccccgggaaaccgtttcgccaaggaggtatttgatcaaacccgtaacaccggttgcgagattgctcaaagatgcatctaagttagaagatataatctgatagttctaatcaagaaaattgaacataatgactaatttgaatatatttttcgacaggtgacgaaacgggtaggtgcagggaaaggagaatggaacaattggaattggagatcccaaggagacttaatgctaaatggtgcctactttacttcatctggagctggagcttctgcaaattacgccagagcctctagtttggctgctaaatcatcttcccttgtaggtatgcttacctctagctcgggtgctttgaaatgcaggatcggtacactttgttaattatttgtatttgtataaccaaagccgaacacatatggaaaatatatgaaaactgcgagaacgaagaaaaaagaactcattcttcgttgttcccatgttttgatttcaagttgtagtatagtgcattgctctactagtgtatatctacaatatcttcttcttacaaatcatcttcactctatatactattatttctcttcttgttctgcatatacctgattaataacgaggccatgactacaatactggtcattaaacctatcacaagaccagcaacagcagttgctcgcaaactagaggaacctagaccgggttttatagctaacccacaaagacttggactgttcccttcaaagacaagttttaatccaccaaaacttggtaatactccagtgaagttattgtcagaaaggtttatgtttttcgagttttaacagagtcaatcccctcaggaacaacaccctcaaacatgttacttgacaaatcaagctcctttaaacttgggtataaactcagggaaaccaccagatatgtttttaccaccaaaatcaagaactacaagtagaatctggcgaagcaggctcaggaaaatccccaaacaacaaactttcatgaaccctgaaggctaacatgggaagtgagaacaaagagcaaaaaccaaagtttggaaaagagaaagagtaacaacgtttcttggcatataaacatgttccttcacattgctacacatccaaatgaaaaaacgagtacacactaacaagagtatcacaagagacatacaccacaaactcaaaaaaccatttattttgttatactgtttaccaagaggaaagtgatgctttgtgtttttgtttatctataaagtaatccctcaaaggtaaagaatatacataggacttgttaacaacatgtgaagcatccgataagagagaacattgcaggataaaagaaccagaagaaaaaaaggtaaaagagagattaagcaatgagaaatgagaaactacgctacgacttaaaccacatctgaaaatgtttcactcctatcaaattagtctcaatgatcattcaaaatcctgagagaggacttgctagttgcagcaaaattttcaatgattgctaatgctacaaccgtttcccccaatatattccaatgtcgaaactaataaagttttggtattagaggtaacaatttcttaaagaacatataacattcctaagtattgtatctgtatacattggagttctgtctcatgagcaaaatcttaagcttaagttacatgtaaagaagacaacgcttacttgtacttgtccatgattttctttgcttcttcaagtggatcatccattgacttagaaccagagctattatcatctcctcttagtttaggagcttcatctttgtttaaagctatgaataagaaatatgcaaatcccattgtaccctgcaacactcacagagaattagctttgcaaacacctaaaaaaaaatcctagaaaaaagaaaggggacacacacaacacaacataccaatacaaagaaagctgtcgatagaaacgacttgacaacaaacaacgaaaccgccaatgctgcaattgtcacagagattctcgctactggtctaggcacagaaaccttataacaaaaaagtatactggtaaacataaccaagtatgactaaaaccatttagagtagagtttgattagtgaagacaagactaaagagagctcacaggtacaagattggttccagcttcaattccatctttcccaatattccacgcagttctaagaactgttcaacaaaatcacacaaacattattactaaactctgttgcaacaatttcttcatcaatcaatgacccttttgctcaatttcatagacatagctatcaaaagaacaaagtgagggtaaagaacaaacctttcaagaaactggactgagcagacaaaacaagggttttggaccgaagtcgttgtggttgaagaggagcaattcgagttctcaagttgagtaaagatgcgttttttaacttcaaaacagagcatggagagaggaatggagaattggggaattgggttagggtttgtaagaatcttggagcgagaggcgaaggattcaaagatagagaagaagccatgacatgtgattgctaaagccgcttgatttactactcagattctctacaagaaaagacaaaaattggcctgttttagataagaaattgagattgaattgaagctgagaaactaatcggtttgagttcggtttgagttgagtttcggatcgctttcggttattgatagattcgtcggctaaccgactgtataaccgaataggaaccgatcatttttttttttaatatctcgacctttacatttctgagagacagtgaattcatctcttttggagaagagatcccttctaacatgcctcgaactaatcatctccatctggaagatttatgactggaccaataactcgttgaccactcacaaaagttttcaatcaagatttacaaatatatcaaattatttttattaaaacaaacacatgagtttctatatgatcatatcataacccgatttattcttacctaataatgcaatatgttttctcgatacaaaccagaagtgtaaaacagattaaaacaaactcattaggtaaataacatcttatttaatatagtcaaatttagcgtgttattatttgaggttcttggtgttcatgcttctctcaacggtcttggctgtggctttaatagactccttagtttcctcagtttttccggtgaccgtatctttgatcttctccgtagtgtccttcaccttatcccaggcctcctctgcagtgttctttgccttatccttcaagttacccgccgcatcggagatcgtctgtgccccttcgtctgccttcttggccacctacaccaatcatgtttagtttggataacggaagcataaaaccaaatgtaaagacaattacaaataaagaaacaaaacagattttttcttttaatattgtttgttacaaatttacaatctatatattataactaactatttcaaaaattaaaacaaaatctatgtggtagttataaatgtaaaagtcaaatacaaactatacttaaaatattcaaacacaaatttgacatgtaaacgcaaatgcacattgcaaaaaatgatgtttaaaacattaaggccacagttcttcttcttcttcttttaaactttaggaaaatagctaggataccttttgttgagcctctgtggctttgtcacagacggagtctttcctcgtagaagtagtccccttaaatcatttaaaaaaaaatgaaggataactaaaatttgttacaaatattaaataaatatgtatgataaattcatacgaaaagtaaaagagattacatggacgagtcttgtcgggacggaagcacgaactctaggagctcttgtaatgagtcttgcaacgaccgcgaagcttgtcatgtcttaggcctcttctttctgttgattagtaatgtgattagtttgttaattagttgagtttgaaggatttaagtatatataagagaattgagaaaatgtataggagatgaggtgcatgtgaagaagacacatggtttgatttggatggcatagtggggaggttgactcgggacatccgatggttcaagttttaatttgctatttagagatgtgttagtgtgtgacacaatccttggcgtctgtttttccttatttgatgcttgttcattgaccaattgagaataaaaaaatgtttgcattacggaattttagtatcattctggaataaagtatgtttgagttaagacaaattttttttgtatgtaatgaatataaagatggtaaaagtaacgttcacaattttttgtgaaattaactagacgagaggatcaatttatggcacatgttttgatagtggtttttagagattagtttagtaaaatctgttttactgaaattttcattttgcagtgttttttttttgtttaaaagatactgtattatatttttaacgtaaaatttcaaaaggaagctcactaattctgtttgaatttaattcattataatcattgatatattaaaataagcatatttgtataagattttataatatattgtgaatgtgtaaaacggagaattcttgagtaggtggggttagtgaacacattctcatcagaattcttttgacgaattcgaataattcaagatatcataagctgggatccgaaaaattcaaataattcaactaatcatatattggaaatccaatggcaatatcacagtactactatactaacgttcttcttctttcataaaattaataatatttataaccaaaaatatttaaaagatctactatgatatgtttcccctaaaaaacatttctaaatccgccactaagtatttgatcggatgatcatgcacaacaagataatatgaaaattgaatcaacaagataagtaagtcacaagtcattatcacatctgtacaacaaattcaaagtttcttattaattttgagataaaactttaaaggatagtgcttcttttttttatgaaacaaacaaagatatacaaggcttacaagtccaaaccattataagtagaatggaccaacaagtcaagtctagaattctgaacaacactttattatctctcccaacaccaagaaagaggaaataggtgagtttgatgaaacctaagtatatttacagacacaagaaagataagaagcttgaggagacaatttctcacaaaacccaccaagatgaaacccattagagacgcaatatttgttgcaacgtggtaatttcgcacattctccggctacgtacagccattccgtccgaccactcttcccatcccgtcttcccgcggttgtgctcatagtccggcctggagtagtagccatcccttctgcatcatcatatccaaaagatttggtatttttccaaaagaaaagaaaaagatcttaaccggagataaagtaatatattccatggatcatacaatttatatatacctgaaattagaagagcaatgtataagaagagaaagaggtaaatgagcttcacggccattcttgtcttagtcaagtgctctctcttcactctttaatttgccttcgtttgtaatcttaatgttcttctaattatagcaaaacgcattattttatatcgatatgtgtatgtccctagattactttatctagttttatatacctaaacatcgtctacttttgctgccaaataatttcgacccgtaaatagtgcggaaccatactttattttaataaatacatagcactatcaacaaaaatatatattttgtcgattacaaatatttagaaagatgactatggactctaaaggttagggtcactaataaagtgtaaaaattttaaagaagggaaaatgggttagttgagtcttttacataagttattctactattggtattgcacacaaagtcaaaagtatgagaggagaccaaaaaaaaaaagaagaagtcaaaagtatgaaaggggagacaataaaaagatcaaaagtatgaaaaatgatattttaattttctaattattatgtttatatattgtccacgtttcctatgggttctaaatattcgggtggttttttcggtccgtttgatttgacaaatcaatatcaagaaaagttgtttaatagaacaaaacagattcggagcgcacagaacgaaaacatattacatgattcgtgaggaaataaaaacaaaaacaaggttgaacaaatatgagaacaagtcttccaggtaagaacattcagcgaccttttatgaaatatataaactccaaaaaaggagaatcgataaatttaagaaggaaaatgaaatattttcgataaaaatcttaatcgatgtataaaaatataatttaaaatatgaacataaatttgataaatacttatatataatgcatcaagaaccgtccataaatatagtatatcattaaacacacgatgaatcatatacagaaaagatattcgaaagaggataaggccgaaatgacgatgtaaaataaatagaactactaataaaaagaagaaggatcggctgaaaagaagaagaatcggacttgtcttcgaagtcagtgtgtaccgactaaaaataaagagctctcaaagaatgagcagcaagtggcgtacgtactcctcgaagaatgaaaagcaaaatacaacgagtcccacaacctgaagttttccataagaagaattagattatgatacttatataaaaatatttcattgtttgcaattatttatttacacaggtaataaaaaaaaagcataaagagaaatatagttcacctttttttaatataaaaattcactctttcaaagctcatccaaattcatcgaaatttatataacaattagtccatgccatgtaattaaaagcatccaaattcatttcactcattcagacaaattttgagaaaattagaaatacattggcaataatattttctttaaaagttatttctgcgaaaattttgttggtggataactataagaacctaacatagttttgttttatgaatggcctagtctttgtttattgttgaaatagttgccaagtttatcgtctctcccgggctttacggaagcacaaaccactgatttacctttgaacaccaaagagaaaaaaaaaaaacttaaataaggtttctgcctatctattgatttactattttggtatagaacaaatttcaaatccttaaatctgtgacactttctcgattcttcctcattttcgtgcatcccacgtttccttgatttgtcataattaaggcttccacagatttagaaaaatttgtagttgcatactataataatctgtcgaacaatttactttgattctccgtacaattaaattctctctcgttcttgggaatattaaaagtaaaaagtttgtatttgtagagaagaaaacaaaagaaaggttttggtaccatggttccatcgttggaacgaggaataagcatcacgagttcattcaatcttgatagaatgtttgattcctcaccgggaaaagaacaacaacaacctcatctcgcggaaacaaccatgccggagagtcaaactcaagacagcctcggtggaagtcccgtggagactagccgcccgatgacttctcgtctgatttcccgtagacaggacaagcaacaatccggtgattaaagaagaagtttcattatttctgttcgtttaagaactaagaactctagagatatatatcaaaaagcttacaattttgcgggtttaaacattgtagagacggagatgatgaaagatagattcacgaaattacttcttggagaagatatgtctggtggtggtaaaggtgtatcttctgctttggcactatcaaatgccatcacgaatctagccggtaaaaaagtaactctaatagtttttttttttttagttttcttcctccacaagttacatagaatcaatctatggtttggtttaatttttatgtgtagcgtcaatattcggggaacagacaaagttgcagccgatggcaccggatagacgagcgaggtggaagaaagagatcgattggttgttgtccgtgactgatcacatcgtcgagtttgttccatctcaacagattagtaaggaaggagtctgcaccgaggttccatttcttgaaacttataactatcaatttcatattcatcaacatcagagataatattctgattcaatgactatgtctagattatggtgacaagacaaagaggtgatctcctcatgaacatccctgcccttcgcaaactcgacgccatgctcattgtaagtgtgtcccttatatattatatacatgtatgttatgcaataactttgatagaacgatattgaaacatgttaggatacattggacaattttagaggacacaatgagttttggtatgtatcgagagattcagaagaagggaaacaagcacggaatgagaggacaaaggacaagtggtggcttcctccggttaaagtccctcctaatggcttgtccgaatcagcccgaagaatgcttcattttcaaaaagattcagtctcacaagtccaaaaagccgccatggctattaacgcgcaagttctgtcagaaatggctatccctgatagctatatcgagtctcttccaaaggtgatcttccttttttgtcttaaaaccggtatatagtttggatgatttgcttgcatttattttaaaatatcatatactattttaagcaaatcaataatggttattaagaagacttagattattttcagaatggaagagtaagccttggggattcgttatacaagagcataacagaagagtggtttgatccagagcagttcttgtcaacacttgacttatctacagagcacaaagtgttggatgtgaagaataggattgaggcctcaatcgttatatggaaaagaaaacttcatctaaaagacaacaaatcttcttggggatcagctgtgagcttggagaaacgagagttgttcgaagagagagccgagacgatcttggtcttgcttaaacaaaagttccctggtcttccccaatcttcccttgacatttccaaaattcagtataacaaggtaatgctcaaatgttattgctttattttgttattccgatatgatcggacaaatcatcatctaggaaagattctgaaaatattggtggtcatgaatcatatataaatttttgatataacattttttagtaaattttaaataagattaacaacactaactaaccgtactttggttgtatattatatggtggttcatttgtcactttatgtgttctaactataggatgtgggacatgcggttttggagagctactcaaggatattagagagcttagggtacacggaaatgtcgagaatcgacgatgtactttatgcggattctttagcccggaagcaatgcacaggtgaagaaacatcagatggtgggaaaatagcaacggaaacggactcagcgtctgctggatcttcgaactactcaggagaggaaatagagaagcttgaatcacaaaactcatcaaagacgacattgcttgattttattggttggagtgacaatagttcaaaagggcagtcagagaaacctccaaaatctccgagaatgacgccaaagaaactctcatatttggagaagcttgagaacttaaatggttttaggagccctaaagataggcattgaagatgaatcaaaagacatgtgaacaactaaaatgatacaattgaagaagccatataagtgtgtatatttaggcaaaagaatgaaacaattagcaattaactattatcttccttccagttttgtttcttggacagagaagtaaaacaacatgttacccccacatcaattctcaataattttgttttgataaaaacaaatcatttactataaaataaaataaaaaattcagttactaattcattttattgtataaaaatcatattgagaaaataaaaacaaactacaaacagcagccacatttgactacttaattaacagttaattagtaatatgtttgagtactatgcagaatatgtaaactaaaaaagaaatgtcatcataattttttctttttgtgtgtgtgcacatgaagtcgtttgctccgataagaaaaaaattgagtagcaaagatacgattttcttttaatttttggaaaaatccaaaaacaaatccaaaataattttaattggacgattattatccgttatttttatattagaataaaaataccccaactaattatttgtgattttaaaatacttcataaattaataatttgtggaattaaactcgtaattatttatatacaaaatatattaaaattactaataattagatgaggtatttttattttaatacaaaaatatcagataataatcgtctaaagataaatctcacttttttctctttattatttaatattctgatctttgcggatgtaatattttctttattatttatagtatttatatccaccataaaataaaacatttatttataacactttggacttttttttgttgaaattttcgttttttttttcgtttttttatcatagaattgataaataaaaatagaaatgtaactttggaaaatagagtttgcattaagagtttgtataactaattttgactactcaaaaccatatttacttaaaagattatgattttaaattttgtgaatccaaagtttcggccggttttaacggtttaacccaaatccagtttttaacttaaatccaaactcggctacatgaacgatttctaatttgatagtaagccctggtaaagcccaaactatgataagcccaacaacgtccgtagcggtgtgtgatgttgagcaccgtcagatgtaacagtggacacgtgtcagaatcttaacgagtgagaaaaccctagcgctccatatttattttctgtataaaaacccaaagagagagagaagcttatcatctctcaagctacaaattgctctcgtaatcaaatccttatactttctccaacccttacttttgttattgtcgtattacaaaattgtttttttttttcttccggacagtgacgattgatatttaaggtctcgttcgtcgtaaaaacggccgtaaaaagcctatttgccgaccattctgttatatcaccacccatattctgagtcctactttttgacttttgtttttcaatctttcttctaatcgatttttttggccaatgatttaatcaaaaaaatagacaagcatatgtctgaattaatccttgttgataaaatctaatcttctctatgaggccaaacaatctttggtttgtttttgtttatttggaaaaaagggtcaagtgatgattaataatgcatagttcaaatgatctccatgattactattcagtagcacagtctttcgctcctatctgatggccctccactttttttattgatgcaatgttattggagctgtgtttttttaactccgcttaatgggcctttaaaggcccaactagtgaaaactagaaaatactacaatctgataaaagtttattacaatctattttttcattgttttcaacaacgacacattctacaactataagaagtgtttacatgaacaaatcggttctgttatatatatgttttttatacataacatgtacgtttacaattttcttaaaacacatccgaggaagatgtttgttatgtgcctggaaaagagctaggtgttgtgctttgtaagatgatgaaagcgcaaacaacagaaagagagaaaacagagacccaagtattctctgtatacatctccatcgcgtctgttaacgacaacctcgtcctgttctctgcccagttccttagtctatctgcttctgctgcatataacgcccgtccctgcaaacacgtacacatctttgcgtcagctcaggcttaaccaagtgaaggatttgtcaaaaaacttgaactagaactcaagtgtaacacttacttggtcatcaaaccatcggcctctccttagccaggaagtgacaatagctaacaatatccgaggaggagttaggtaattgacggcttttcccgaacctttcacaactcgcattcgtggtaccaaagttctagctactgtctcaggaagctcacagattatgttaaacatctgcttgtttttaatgctcgaaccactgccaaataaatggttgcttcaataaaactccggagcattctgttctaggccttagtgacaaagtgtatgcatacctgagaagaagttctgtcagaaccatgccaggggatgcagtgtgaaggccaacgtttgttttttggctttctttcactatagacccatgaaactgcctaagtccacattttgttgaaccatatctgcgaaagctcacagactcagaaatgtgttctaattcattagagactagtaacgaatgatttgagttcttacacggcagtgagaggagtacttgaacctccagagccagcaccatccatgttaaagatgtgtccaccactgtgctgtctgctcatcacatccatagcccctcgtgtacatagaattgatccaatcaaatttgtggagacaatctacaaaataatagttacaattagactaatgaacttcaccataagctcaagctgaaattaagctttaggttcaaaaaggattttacctgtgtgatatcttcttccgtgaactcgagtagcggtctaaaacctttgttagtaccagcattgtttatctatccaaatgaatatagacagtgagcaaacatatgactaaagatacaaaaaaagttacaaactgtacaaaaagaaatatgtttctttacccatatgttgatggaaccaagctcttttacagcgaaattcgacagcttctcaacgtcttcgggtttgcaaacatcacaggcaataccaactaccttagcatcactcagtttctttctagctgactcgctagcgttactcataatctctttgagattttgctctagctctttgacagtcatatcaacagattcagaactgatttcacaaacaaaaaccaaaaaacaaatcatattaagacttcattgcttgataaaaactaatccataattccatatatacaatttatcaacctgcgagatgtgacaatgactctgtctccagagagaagaaactctctagcaagagctttccctagtcccctagtgctaaaacacagcataaaaacatacatcagcatcaaaccaaaacacaaagaaacaaaaatcaaaaaatgcaaaaacaaaagtaaagaaggtaccttccggttataacaacattccgtggaccggctcgataatgatcttccaaaaccatgttagcaccagtcatggttccaatgataattccaccaagccaactataccaaaccaatgagttcatcgaactatctccacctttcatcacaaatacatacactcaaaatctcagtcaaacaaaattaccaataaaaaaactcttctacaatagtttttgcactaacctgataattgaaacccaatcaaaagaatagctccagtacttgtcatcgtcacaatgtatctcgcaatttgaacagcaacctacaaaatcacaaacacataaaaattaagctaatcaaagcaaaaagattgaaaatttcattaagaaaaaaagaggaaactttaagactaaccgaagagaaaaccatctccaagttttcaactttctgattatactcatctttagacaagaaccctaatttactaaaccctaaaaacccagatttcaaagaatcccacgacccatttcccttaaatttctcaacttttctctttctttcaacttttttctcacaccgatgcacataaaccctattactacgttctctacaagtcaatcttgacccgacccgtatcggatctctgaagaagagacggtgctccaagacttgtgggtacacttgaatcttcgttaaagtagtcatagctatggaagaagagtgagataatgataagctttgaaactcatacaaaaagataacttagaaaacaagataaacgaaggagcttttttagggacccaaaagatagattgttagatatttttcagcttcggattcgtcgaagacgttaaatagagtgatcggaggaagaagaaggagattaggacgaagaaagaaagaggtgagggaaagaaagaaggaagagaagtgtgatggccacacgttacagcaacctcatctcgttagcctaacattgacacgtgtcattttgtgtttcttttgtcccttcgcatgttttcaagatatttttttctctctttgggagctactttagattttggttcacatgaacaaaattttgattcagttttgcttctagaaagccaaaatttgatttcaaattacattttactcagacttcgtcattacttatgtacctgagtaaattattgtagtatccattgtcacatttgagtagatgatagagattattgtcaaactaccacttacttatttatattattttagaacaataaaaaattataaattaaaaatttaatatcaaacaaagaaaagttgataatgtttgtgtttatgataattttctcctttgtgtaaactttaagctttttgtctctaccaactcaataaatttatagtccctgtacaaattttaaaaattaatctttttctaaactataaaacaaaaatttggaccctttttatgctaattttttaaaaacacattaaaattgacattttcatactaaaaaaaaaaaaattgtaggtcttttccatactaatcagatccttaaatttaccaaaaaaaatttggatctagaacaaatgcgcctcatgcacctccaaagagccggtctgctttacgtgagacccaaatatcagtaaacctattaaaagtccaacttccctaataacgaaaacctaaacgtgaaagtatgtggacgtgtacatatgtatatatgcgtttatatatttttcctcagtagctgaattttatgtgttttatatgctcgaaaacatggaaataaacatgattagatcatgaagatcattgaacccctacgatcccttgaatgtccaacttttgtctcttattgatcacttactatttacttgcttcacttacttacaactgtgacacaataacaaccctttccccctcttttattgatttgtcctagttttactctcttctgacagacttgtttgaattacttctcttccaatggaattcgatccataaatactatgttggatacaaaccaaaggtcccacatcgaaagtttagaaaaagagtttctaatatataagccaagtccaactccaactagtatgaggccttttgggaaggaacccaataacaaatctttgtgggcttgagcatataagcccaaagaggacaatatcatactaaatgagagttggaatgggctttgaaagcccattaaatggtatcagagccaggttgaaacactggacctagggcttgggctatgatcgatgtgggaaaatctctcaaacatgacacgataagaaggtgcctcaagaaggaggtccaagttcgtggtctttggtttgaaggggagattgttgggtacaaaccaaaggtcccacatcgaaagtttagaaaaagagtttctaatatataagccaagtccaactccaactagtatgagaccttttgggaaggaacccaataacaaatccttgcgggcttgagcatataagcccaaagaggacaatatcatactaaatgagagttggaatgggtttagaaagcccattatactacagacgattaactgtgcacttccagtagtcgtgttgtcaaaatttgactaaagcaaaataaaacatgcatgttggtgtgtccttaccagatatgttacactcctatttccctttaaccatacatctaaccagtgttcctaaggcaagataatcactaatagcccacaacaatatagttctaagtgtgcaattctccttcatataagaatcataaacctctatacattctttccacacaccatttagatcatctataataggtgcaagatacacatctatgttgttgtgtggtgcagttggtctagggaagagcatagtcatcatgatgttcccagccttcatacacatagtcggcaacatgttgtagttgactaacaacatcgatcatgtacaatacttttttctgcatagagaacgagttcatcctatctgtaaaaaagccgagtcgaaggttccttggtttagtagaatactttgaaaacttatcttttatttgagaccaagtcaatgaatcaactgggtgtcgcattggaccgtctacactagcattgttgaaatgccaacacaactcctaagcaatcctttttaatctaaatatcctcctaaatctatccttagatcgaaaaatacctctgaacctttgcgggaaccccttcttttcctctctagtatgcttatcttacttccatctcgaagcactatatcttggacagctaacaaactcctcaaacatctttcgataaaggatgcaatcatgtgtaaatcaaatcataactaaaaccaaaaagcttcaagagcttcttcatctcatgaacagattttggaagaacattatccacatgtaacatgtcgtgaactaatttcatgaactgatcaaattagttcttggatataccacttttaacttttatgtggtagagagccatgattgtagacactttagtatagttgggacacgtcgagtagagtagagttcaacatccatcaacttctacctaaactcagattcttctttactttcatcatcatcaccctaatctcctctttcagtctaaaaaagtggcgtttgatgagaaaaaggaaaagtattaaaaaagaatttttttccctcttatcatatgtattcaattacatggatatcaaatgacatatatattagaaaaacaattgacatgaattataacttttgttcatgtcataagcagctgaagaattacataaatttaaacagttttacaaaaatattagaacccgttttcaatacttccaacctcgtatatatcttccagatggattattataacttattttaaaccatatcccactcattctggcagtccatacacgtacttgaccacattgaggagcctctgtattttgactgtatgcttctacgtaattacgatacctcatgttaagcccttgcttaaagagacaatgccattttgttatattttttccctcgtcctgaagatgaatggttttaatagcatggaagtttaggtgttggactcctaagtctttttttgtgtagcgacaatgatattggagaattctaccaggaccgagatcgtttatgattactattgcatttttctcgcaagcttcagttttcgtagaacaaatagcagtaactaatataaaaaatattaaacgtaacatttctcggatctaaattaattattggagaaacaagggcattaacaagtagtatttataattttttttctctgtgtgtgtaagaagctttttctttatataatattaactaagtttagacaaaaacatgaacaaattaagcctttggttagaagagattttagggtcgaaatgtatgcttaaccatgaagaataaatcaaatgaactaaccttagacattaaaattgaccacaaaacccaaacttaaccatattataagtttaagaagtttatctagtttgactaaaaactttgaaaaaataactagattgattgtcaatcgaaatagataactagagtaaactaaattttctgttaaaacactaattaaccttcaatcaaacttattataaccattatgccatacctataaaaaattatatacaaatttgattctttaattaaataaataaaaaacacaaaattaagaaacaaaaaccaaaaaacataataagtctcgatttaggtttttcgtttcttaagtttttttctctctcacatattttccaattcatgttttatctttttcgatctttctactaaaccctagccatctctctttgaatctaatgctcccacaaaagatggcgaccatttagactagatttatttaactgcgaaatacttacatctatgtgtgtatcaacttcaagtcgcatttaaggttccatgatcttctctccttatcatgtatacgtatatgggtattttctcatatccattctctggacttccccttaccaattctctctctggattactaaaacctttgtggaacataccaagtatatcatcagttgcttgtcgaacacctgcataaaggtctgtcattgaacatgtatgttccaagacaaacacacacacatggaattttggagagtcgcttaatggtgtagctcatatcctccacattcactttttaacacaagacttgaaaaacaatataaatggtgacgatttatgaacataaaatcaaaattttataccataattgttgtcttcaatcgtgtctccaaatgatattttgtttcataacattgcaaccaaccaaatccaaagaagacatttctaactttgaataatgatcatcttctttttcttcaataaaaatacctaaacttatcttcttcattggtaaattaggtttttcttcttcttgtggtggaaacccgtacaagctaaaattcccgtcatcagaatctgttccatcagaatcgtcacaataatcaaaggtagattctcatcatcattgtcttcatcagtcctggtcttcatcttcaacggcttcaacttcctgaaacaactcagtatcttccttcatcaaattatttttgttacctttgtatcttgatgtcaatgacaccatccttgtcatttttataagattcaatgcaactttcttcttcacttcaacacaagtcaaattgtatcgttcttcaattaccccaaaaaagtgtgaaagtgtcttgaattacatataataatgggtggtgtatcacgcggtcttcgaaatcttgtagctaaacacaatattacatactctgttctccagcctgtaaccctctaatagcatttgttaagtgatatatttacacaatttatagttttttttcgttaccagatatgttacactcctatttccctttgtccttaccagatatgttatactcttatttccctttaaccatacatctaaccagtgtccctaaggcaagataatcactaatagcccacaacaatatagttctaagtgtgcaattctccttcatataagaatcataaacctctatacattctttccacagaccatttagatcatctataataggtgcaagatacacatctatgttgttgtgtggtgcagttggtctagggaagagcatagtcatcatgatgttcccagccttcatacacatagtcggcaacatgttgtagttgactaacaacatcgatcatgtacaatacttttttctgcatagagaacgagttcatcctatctgtagaaaagtcgagtcgaaggttccttggtttagtagaatactttgaaaacttatcttttatttgagaccaagtcaatgaatcaactgagtgtcgtattggaccgtctacactagcattgttgaaatgccaacacaactcctaagcaatcctttttaatctaaatatcctcctaaatctatccttagatcgaaaaatacctctgaacctttgcgggaaccccttcttttcctctctagtatgcttatcttacttccatctcgaagcactatatcttgggaagctaacaaactcctcaaacatctttcgataaaggatgcaatcatgtgtaaatcaaatcataactaaaaccaaaaagcttcaagagcttctacatctcatgaacagattttggaagaacattatccgcatgtaacatgtcgtgaaccaatttcatgaactgatcaaattagttcttggatataccacttttaacttttatgtagtagagagccatgattgtagacactttagtatagttgggacacgtcgagtagagtagagttcaacatccatcaacttctacctaaactcagattcttctttactttcatcatcatcaccctgatctccactttcagtctaaaaaagtggcgtttgatgagaaaaaggaaaagtgttaaaaaagattttttttccctcttatcatatgtattcaattacatggatatcaaatgacatatatattaggaaaacaattgacatgaattataacttttgttcatgtcataagcagctgaagaattatataaatttaaacagttttacaaaaatattagaacgcgttttcaatacttccaacctcgtatatatcttccagatggattattataacttattttaaaccatatcccactcattctggcagtccatacacgtacttgaccacattgaggagcctctgtattttgactgtatgcttctacgtaattacgatacctcatgttaagcccttgcttaaagagacaatgccattttgttatattttttccctcgtcctgaagatgaatggttttaatagcatggaagtttaggtgttggactcctaagtctttttttgtgtagcgacaatgatattggagaattctaccaggaccgagatcgtttatgattactattgtatttttctcgcaagcttcagttttcgtagaacaaatagcagtaactaatatgaaaaatattaaacgtaacatttctcggatctaaattaattattggagaaacaagggcattaacaagtagtatttataatttttttttctctgtgtgtgtaagaagatttttctttatataatattaactaagtttagacaaaaacatgaacaaattaagcctttggttagaagagattttagggtcgaaatgtatgcttaaccatgaagaataaatcaaatgaactaaccttagacattaaaattgaccacaaaacccaaacttaaccatattataagtttaaaaagtttatctagtttgactgaaaactttgaaaaaataactagaatgattgtcaatcgaaatagataactagagtaaactaaattttctgttaaaacactaattaaccttccatcaaacttattataaccattatgccatacctataaaaaattatatacaaatttgattctttaattaaataaataaaaaacacaaaattaagaaacaaaaaccaaaaaacataataagtctcgatttaggtttttcgtttcttaagtttttttctctctcacatattttccaattcatgtcctatctttttcgatctttctactaaaccctagccatctctctttgaatctaatgctcctacaaaagatggcgacgattcaaactagatttatttaactgcgaaatacttacatctatgtgtttatcaacttcaagtcgcatttaaggttccatgatcttctctccttatcatgtatacgtatatgggtattttctcatatccattctctggacttccccttaccaattctctctctggattactaaaacctttgtggaacataccaagtatatcatcagttgcttgtcgaacacgtgcataaaggtctgtcattgaaaatgtatgttccaagacaaacacacacacatggaattttggagagtcgcttaatggtgtagctcatatcctccacattcactttttaacacaagacttgaaaaacaatataaatggtgacgatttatgaacataaaatcaaaattttataccataattgttgtcttcaatcgtgtctccaaatgatattttgtttcataacatttcaaccaaccaaatccaaagaagacatttctaactttgaataatgatcatcttctttttcttcaataaaaatacctaaactcatcttcttcattggtaaattaagtttttcttcttcttgtggtggaaacccgtacaagctaaaattcccgtcatcagaatctgttccatcagaatcgtcacaataatcaaaggtagattctcatcatcattgtcttcatcttcaacggcttcaacttcctgaaacaactcagtatcttccttcatcaaattattttcgttacctttgtatcttgatgtcaatgacaccatccttgtcatttttataagattcaatgcaactttcttcttcacttcaacacaagtcaaattgtatcgctcttcaataacaccaaaaaagtgtgaaagtgtcttgaattacatataataacgggtgttgtatcacgcggtcttcgaaatcttgtagctaaacacaatattacatactctgttctccggcctgtaaccctctaatagcatttgttaagtgatatatttacacaatttatagttttttttcgttaccagatatgttacactcctatttccctttgtccttaccagatatgttacactcctatttccctttaaccatacatctaaccagtgtccctaaggcaagataatcactaatagcccacaacaatatagttctaagtgtgcaattctccttcatataagaatcataaacctttatacattctttccacagaccatttagatcatctataataggtgcaagatacacatctatgttgttgtgtggtgcagttggtctagggaagagcaaagtcatcatgatgttcccagccttcatacacatagtcggaacatgttgtagttgactaacaacatcgatcatgtacaatacttttttctgcatagagaacgagttcatcctatctgtagaaaagtcgagtcgaaggttccttggtttagtagaatactttgaaaacttatcttttatttgagaccaagtcaatgaatcaactgggtgtctcattggaccggttacactagcattgttgaaatgccaacacaactcctaagcaatcctttttaatctaaatatcctcctaaatctatccttagatcgaaaaatacctctgaacctttgcgggaaccccttctttttctctctagtatgcttatcttacttccatctcgaagcactatatcttgggcagctaacaaactcctcaaacatctttcgataaaggatgcaatcatgtgtaaatcaaatcataactaaaaccaaaaagcttcaagagcttcttcatctcatgaacagattttggaagaacattatccgcatgtaacatgtcgtgaaccaatttcatgaactgatcaaattagttcttggatataccacttttaacttttatgtggtagagagccatgattgtagacactttagtatagttgggacacgtcgagtagagtagagttcaacatccatcaacttctacctaaactcagattcttctttactttcatcatcatcaccctgatctccactttcagtctaaaaaagtggcgtttgatgagaaaaaggaaaagtgttaaaaaagattttttttccctcttatcatatgtattcaattacatggatatcaaatgacatatatattaggaaaacaattgacatgaattataacttttgttcatgtcataagcagctgaagaattatataaatttaaacagttttacaaaaatattagaacgcgttttcaatacttccaacctcgtatatatcttccagatggattattataacttattttaaaccatatcccactcattctggcagtccatacacgtacttgaccacattgaggagcctctgtattttgactgtatgcttctacgtaattacgatacctcatgttaagcccttgcttaaagagacaatgccattttgttatattttttccctcgtcctgaagatgaatggttttaatagcatggaagtttaggtgttggactcctaagtctttttttgtgtagcgacaatgatattggagaattctaccaggaccgagatcgtttatgattactattgcatttttctcgcaagcttcagttttcgtagaacaaatagcagtagctaatatgaaaaatattaaacgtaacatttctcgggtctaaattaattattggagaaacaagggcattaacaagtagtatttataatttttttttctctttgtgtgtaagaagctttttctttatataatattaactaagtttagacaaaaacatgaacaaattaagcctttggttagaagagattttagggtcgaaatgtatgcttaaccatgaagaataaatcaaatgaactaaccttagacattaaaattgaccacaaaacccaaacttaaccatattataagtttaagaagtttatctagtttgactgaaaactttgaaaaaataactagaatgattgtcaatcgaaatagataactagagtaaactaaattttctgttaaaacactaattaaccttcaatcaaacttattataaccattatgccatacctataaaaaattatatacaaatttgattctttaattaaataaataaaaaacacaaaattaagaaacaaaaaccaaaaaacataataagtctcgatttaggtttttcgtttcttaagtttttttctctctcacatattttccaattcatgtcctatctttttcgatctttctactaaaccctagccatctctctttgaatctaatgctcccacaaaagatggcgacgattcagactagatttatttaactgcgaaatacttacatctatgtgtttatcaacttcaagtcgcatttaaggttccatgatcttctctccttatcatgtatacgtatatgggtattttctcatatccattctctggacttccccttaccaattctctctctggattactaaaacctttgtggaacataccaagtatatcatcagttgcttgtcgaacacgtgcataaaggtttgtcattgaacatgtatgttccaagacaaacacacacacatggaattttggagagtcgcttaatggtgtagctcatatcctccacattcactttttaacacaagacttgaaaaacaatataaatggtgacgatttatgaacataaaatcaaaattttataccataattgttgtcttcaatcgtgtctccaaatgatattttgtttcataacatttcaaccaaccaaatccaaagaagacatttctaactttgaataatgatcatcttctttttcttcaataaaaatacctaaactcatcttcttcattggtaaattaagtttttcttcttcttgtggtggaaacccgtacaagctaaaattcccgtcatcagaatctgttccatcagaatcgtcacaataatcaaaggtagattctcatcatcattgtcttcatcttcaacggcttcaacttcctgaaacaactcagtatcttccttcatcaaattattttcgttacctttgtatcttgatgtcaatgacaccatccttgtcatttttataagattcaatgcaactttcttcttcacttcaacacaagtcaaattgtatcgctcttcaataacaccaaaaaagtgtgaaagtgtcttgaattacatataataacgggtgttgtatcacgcggtcttcgaaatcttgtagctaaacacaatattacatactctgttctccggcctgtaaccctctaatagcatttgttaagtgatatatttacacaatttatagttttttttcgttaccagatatgttacactcctatttccctttgtccttaccagatatgttacactcctatttccctttaaccatacatctaaccagtgtccctaaggcaagataatcactaatagcccacaacaatatagttctaagtgtgcaattctccttcatataagaatcataaacctttatacattctttccacagaccatttagatcatctataataggtgcaagatacacatctatgttgttgtgtggtgcagttggtctagggaagagcaaactcatcatgatgttcccagccttcatacacatagtcggaacatgttgtagttgactaacaacatcgatcatgtacaatacttttttctgcatagagaacgagttcatcctatctgtagaaaagtcgagtcgaaggttccttggtttagtagaatactttgaaaacttatcttttatttgagaccaagtcaatgaatcaactgggtgtctcattggaccggttacactagcattgttgaaatgccaacacaactcctaagcaatcctttttaatctaaatatcctcctaaatctatccttagatcgaaaaatacctctgaacctttgcgggaaccccttcttttcctctctagtatgcttatcttacttctatctcgaagcactatatcttgggcagctaacaaactcctcaaacatctttcgataaaggatgcaatcatgtgtaaatcaaatcataactaaaaccaaaaagcttcaagagcttcttcatctcatgaacagattttggaagaacattatccacatgtaacatgttgtgaactaatttcatgaactgatcaaattagttcttagatataccacttttaacttttatgtggtagagagccatgattgtagacactttagtatagttgggacacgtcgagtagagtagagttcaacatccatcaacttctacctaaactcagattcttctttactttcatcatcatcaccctgatctctactttcagtctaaaaaagtggcgtttgatgagaaaaaggaaaagtgttaaaaaaatttttttttccctcttatcatatgtattcaattacatggatatcaaatgacatatatattaggaaaacaattgacatgaattataacttttgttcatgtcataagcagctgaagaattacataaatttaaacagttttacaaaaatattagaacgcgttttcaatacttccaacctcgtatatatcttccagatggattattataacttattttaaaccatatcccactcattctggcagtccatacacgtacttgaccacattgaggagcctctgtattttgactgtatgcttctacgtaattacgatacctcatgttaagcccttgcttaaagagacaatgccattttgttatattttttccctcgtcctgaagatgaatggttttaatagcatggaagtttaggtgttggactcctaagtctttttttgtgtagcgacaatgatattggagaattctaccaggaccgagatcgtttatgattactattgcatttttctcgcaagcttcagttttcgtagaacaaatagcagtagctaatatgaaaaatattaaacgtaacatttctcggatctaaattaattattggagaaacaagggcattaacaagtagtatttataatttttttttctctttgtgtgtaagaagctttttctttatataatattaactaagtttagacaaaaacatgaacaaattaagcctttggttagaagagattttagggtcaaaatgtatgcttaaccatgaagaataaatcaaatgaactaaccttagacattaaaattgaccacaaaacccaaacttaaccatattataagtttaagaagtttatctagtttgactgaaaactttgaaaaaataactagaatgattgtcaatcgaaatagataactagagtaaactaaattttctgttaaaacactaattaaccttcagtcaaacttattataaccattatgccatacctataaaaaataatatacaaatttgattctttaattaaataaataaaaaacacaaaattaagaaacaaaaaccaaaaaacataataagtctcgatttaggtttttcgtttcttaagtttttttctctctcacatattttccaattcatgtcttatcttttttgatctttctactaaaccctagccatctctctttgaatctaatgctcccacaaaagatggcgaccattcagactagatttatttaactgcgaaatacttacatctatgtgtttatcaacttcaagtcgcatttaaggttccatgatcttctctccttatcatgtatacgtatatgggtattttctcatatccattctctggacttccccttaccaattctctctctggattactaaaacctttgtggaacataccaagtatatcattagttgcttgtcgaacacgtgcagaaaggtctgtcattgaacatgtatgttccaagacaaacacacacacatggaattttggagagtcgcttaatggtgtagctcatatcctccacattcactttttaacacaagacttgaaaaacaatataaatggtgacgatttatgaacataaaatcaaaattttataccataattgttgtcttcaatcgtgtctccaaatgatattttgtttcataacattgcaaccaaccaaatccaaagaagacatttctaactttgaataatgatcatcttctttttcttcaataaaaatacctaaactcatcttcttcattggtaaattaggtttttcttcttcttgtggtggaaacccgtacaagctaaaattcccgtcatcagaatctgttccatcagaatcgtcacaataatcaaaggtagattctcatcatcattgtcttcatcagtcctggtcttcatcttcaacggcttcaacttcctgaaacaactcagtatcttccttcatcaaattatttttgttacctttgtatcttgatgtcaatgacaccatccttgtcatttttataagattcaatgcaactttcttcttcacttcaacacaagtcaaattgtatcgttcttcaattaccccaaaaaagtgtgaaagtgtcttgaattacatataataacgggtggtgtatcacgcggtctttgaaatcttgtagctaaacacaatattacatactctgttctccagcctgtaaccctctaatagcatttgttaagtgatatatttacacaatttatagttttttttcgttaccagatatgttacactcctatttcctttgtccttaccagatatgttacactcctatttccctttaaccatacatctaaccagtgtccctaaggcaagataatcactaatagcccacaacaatatagttctaagtgtgcaattctccttcatataagaatcataaacctctatacattctttccacagaccatttagatcatctataataggtgcaagatacacatctatgttgttgtgtggtgcagttggtctagggaagagcatagtcatcatgatgttcccagccttcatacacatagtcggcaacatgttgtagttgactaacaacatcgatcatgtacaatacttttttctgcatagagaacgagttcatcctatctgtagaaaagtcgagtcgaaggttccttggtttagtagaatactttgaaaacttatcttttatttgagaccaagtcaatgaatcaactgggtgtcgcattggaccgtctacactagcattgttgaaatgccaacacaactcctaagcaatcctttttaatctaaatatcctcctaaatctatccttagatcgaaaaatacctctgaacctttgcgggaaccccttcttttcctctctagtatgcttatcttacttccatctcgaagcactatatcttgggcagctaacaaactcctcaaacatcttttgataaaggatgcaatcatgtgtaaatcaaatcataactaaaaccaaaaagtttcaagagcttcttcatctcatgaacagattttggaagaacattatccacatgtaacatgtcgtgaactaatttcatgaactgatcaaattagttcttggatataccattttaacttttatgtggtagagagccatgattgtagacactttagtatagttgggacacgtcgagtagagtagagttcaacatccatcaacttctacctaaactcagattcttctttactttcatcatcatcaccctgatctccacttccagtctaaaaaagtagcatttgatgagaaaaaggaaaagtgttaaaaaagaatttttttccctcttatcatatgtattcaattacatgaatatcaaatgacatatatattaggaaaacaattgacatgaattataacttttgttcatgtcataagcagctgaagaattacataaatttaaacagttttacaaaaatattagaacgcgttttcaatacttccaacctcgtatatatcttccagatggattattataacttattttaaaccatatcccactcattctggcagtccatacacgtacttgaccacattgaggagcctctgtattttgactgtatgcttctacgtaattacgatacctcatgttaagcccttgcttaaagagacaatgccattttgttatattttttccctcgtcctgaagatgaatggttttaatagcatggaagtttaggtgttggactcctaagtctttttttgtgtagcgacaatgatattggagaattctaccaggaccgagatcgtttatgattactattgcatttttctcgcaagcttcagttttcgtagaacaaatagcagtaactaatatgaaaaatattaaacgtaacatttctcggatctaaattaattattggagaaacaagggcattaacaagtagtatttataattttttttctctgtgtgtgtaagaagctttttctttatataatattaactaagtttagacaaaaacatgaacaaattaagcctttggttagaagagattttacggtcgaaatgtatgcttaaccatgaagaataaatcaaatgaactaaccttagacattaaaattgaccacaaaacccaaacttaaccatattataagtttaagaagtttatctagtttgactgaaaactttgaaaaaataactagaatgattgtcaatcgaaatagataactagagtaaactaaattttctgttaaaacactaattaaccttcgatcaaacttattataaccattatgccatacctataaaaaattatatacaaatttgattctttaattaaataaataaaaaacacaaaattaagaaacaaaaaccaaaaaacataataagtctcgatttaggtttttcgtttcttaagtttttttctctctcacatattttccaattcatgtcttatctttttcgatctttctactaaaccctagccatctctctttgaatctaatgctcccacaaaagatggcgacgatttagactagatttatttaactgcgaaatacttacatctatgtgtgtatcaacttcaagtcgcatttaaggttccatgatcttctctccttatcatgtatacgtatatgggtattttctcatatccattctctggacttccccttaccaattctctctctggattactaaaacctttgtggaacataccaagtatatcatcagttgcttgtcgaacacgtgcataaaggtctgtcattgaacatgtatgttccaagacaaacacacacacatggaattttggagagtcgcttaatggtgtagctcatatcttccacattcactttttaacacaagacttgaaaaacaatataaatggtgacgatttatgaacataaaatcaaaattttataccataattgttgtcttcaatcgtgtctccaaatgatattttgtttcataacattgcaaccaaccaaatccaaagaagacatttctaactttgaataatgatcatcttctttttcttcaataaaaatacctaaacttatcttcttcattggtaaattaggtttttcttcttcttgtggtggaaacccgtacaagctaaaattcccgtcatcagaatctgttccatcagaatcgtcacaataatcaaaggtagattctcatcatcattgtcttcatcagtcctggtcttcatcttcaacggcttcaatttcctgaaacaactcagtatcttccttcatcaaattattttcgttacctttgtatcttgatgtcaatgacaccatccttgtcatgtttataagattcaatgcaactttcttcttcacttcaacacaagtcaaattgtatcgttcttcaattaccccaaaaaagtgtgaaagtgtcttgaattacatataataacgggtggtgtatcacgcggtcttcgaaatcttgtagctaaacacaatattacatactctgttctccagcctgtaaccctctaatagcatttgttaagtgatatatttacacaatttatagttttatttcgtttgttttataggtttaattaagtctttttaggaatatggacctgtaaagcaaaagtgagcataacaaagaggaattgggtcaaaaagcattagaaaaagagaggatccatcaagaggcccgtttgctagagtttagtacctagtgaaaaaatgcttgagccaccgattggttaggccaatccactgatcggtgaacttttggttaaatcacttctttctttcaattagaactctgtcctatttcctatatatgctcattttgtagccgcatagatacaatttgactttgtatttttatataattttaagttgttattcctgtttttaatctattccttattcttttagtttttgccgcgtaataatttatgataaatgtcatcggtatttagtttggttgtatttggctatttgcctatgttattaagtagctaatatttaacctaatcgaattatgcatgataggtttaagtgtcatacattgagtaagtgtctgtatttacaacacaccctttccttatgtgtcacgagaacaaaacttccacctctttagtccacaacccgtaatgtggctacctaaatttctttcgattgttttttttataattattattatcataaaatttgtttatatttactttacataacttttaatggattatataatttatatttataataaatttataacgtggctctgttcgatcagataaatttaaatcaacaaaataaaataaaatactgataagaaagatatttataaaacagcaatagatgatattttagttgattttataaatgtactgacctagtatgtcgtattttgtctatcttcaaataaaatgatttatatgattatatctatagttttttcatagaactaagttatgtttataaggaattcacatttatttagatggtttctagtataagatatttttcagtaaatgagggacacattttaaagtcttacattaggcccattgagagctagtgacgactccgtaaacaataagatcacacatacaatagaaatctttttaaaatgatcaacatgggagagctttattctacttatcacattgctgacagtatttccatttaacacgtcggttcgagccatgggtcctcctcttcgtcaacggacaggtggcagagccaaaggcagcaaccgtggagtagaccgtggtcgacgtccacaaccacaacatatgaacctaataacccaccataaaaaccgcactaattggatcaggattactaaaacaggaagcaaaacccaaaatcccaaataaatttgaagaatcttctcgatgaaatcatcctcgtgttgaaccaaccccgcagcaaagaagaaggctgccgatatacatagaaccgccaccaccataaacatgaccatgatcgtcattattaaccggttcctacagatagtcagatagatataatattagttcactaattagtaaacaggtctcactatttatttcgactatttgcaaggaaatgtttaagaagaaaacacattatataattatggtttatgaatggatctagtacctgaatcggaagccaatgatgacgaggaaaatgatacccattgaggcggaaaacgataccaaattgctaatgaccatgccaagatagaagatacgctttgaaggattgtgctctagtatcgaagtcccaagcttcccctcacaagttctggtttgaaaagtagtttggcctttggaggaacaatcttcactctgccaaacaccgcctggagggttcaccattaccccaaagctcattgcagctatgactgttgcagcaacgaccaggtttcccctagttttttcaagccagtcgccttggtggtcaaggtaccgtagaaaccatgcagatgaatcttggaatggatgttcttctcgagtcagtcgagtgttcacctccatgatgatgatcggaagaaatgatggatagatagctttccttttttcaaattgtagtttttggtttagattatatatgatttatacatctcatgttattgtttggtttttgtaattttttagttttggttttatttcttgcgttcgttactaatgggagtttaaattttcttccgatcaataaatacgacatctcatgttattgtttcggaatatcaataaatacgacatctcaattttctttctctgggtattagtgaatatgtatagatttgtctttttgatcatgtctttctttggagaatttagtaaagatgtatagagttaacgggtttcaaactaggcttggttcattaaaaaaaaattaggaaaggtttttaataagaattaggcaagaacaaaaaaaaaggagaaaacgagaaaatgaaaaagagagacatgactgactcttttgaacttgcatgtgcttaacttgaaggaaccttcaaatggtacccaatacaatcttattttatcacaatattgtagaagaaacttcctgaataaatcccaaacctaatttgtttctatctacacaattatctaattatatttgctaccaaatagagaaacatgcgcagtgaaaatgaactttaccgagacgtaatgcaaggggataatgatttttgaaatagatttctagggtaaaattttcaattccaacaaaatatgcggtgcatttttataagtatctcgattttatgcaaaatataaaaaataagtcttttttatacggtgtcaataaaatataatagatctgtatctataatgcaaaataagtagatagtttgttaaacaaaagcgaaataactattggtaaaagtaaaaagcaaacgacgacgatttgatttccttttggtaatagttactaaactaggttaattttgtttatgggtcttttatttcaaacgccatctcaatgatgacacgtttttttgtcttagtttttttgttcaaattctacaacaaaaacatataactatggccttttgatttttggatttttagagcatcaccatcggttaactaccgataaatgtgtttttaaaatttaataataatatatttatttagtttaattatttaaaatatagaaataaataaagagtatttaaatgtctcttgctagaccctctgtaacagaagatctatactgtttttttttaaaatctttttctaaattaaagacttctattttcttaaccccgtatggttttaaaaccagtaaaagataagaatgtgtataaatatttgaggttataagggtcaataaacaaatctgatctatcccgtccttgaatctttactctccccaaaaatattcaaattacaaaaaacactcgttgtaattaccgtctaaggatcatatacttcccaagaatattactcgctgtatttcggattgaaagtctccatgcggttgtcctcattacaattctttctttcatttttttgtataatcgtgtaattatgttgtatctaatgtatcactttgatttgtaaaaacattaagaaaaaaagagttttcacacattgtaagttatgacttgtagagaagtttataagtctatagtctctactgcaaacgtcttctaaacaaaactagtaaatgaagaagtttatgaagtcagtaacataaactattaataaataaacaatttattaattaaatatccttactgattgtcctatataacatctcttgttttttttttatatcagcaatcttacatccaaaaccaaaagtaaatatggcaaagtctcttctcatggtcatgcttgtatccattgtaatgttttacatggcttgtccaattttctcccaggagatacatgaagatgtagccatatctccaactccattcgaagaagctaattcacccgcaatggaatatgacatgaagcttccccattactcgcaaaaacagtatgattttctagaggcttgcgttgaaaagccgagctccatatgcggaggtgagattttccagaacgtgctggatgcaacaactttagtgacagataaatgttgtcgtgatatattgaagattggcaaagattgtcatcttggattgattaaaatcttcttctcatcgtatgaatataaaaatattgcatctattccaagaaacaaacagacatggaacgattgtcttcgtagagttggaagcaagattggtgttccggtctcttctgaatagtaaactagtattccatcgttgtgatgtaactgtgcgtttatataatttgaaatgttacccttataaaacagctgtcatattatttttaataataagctaaagccatacaatatattacatttttattcatattcaaattagttcaacattaactacttaattcaaatagagagacctttgtttctacgtaacaaccatgtctaaacctccatcaatataaacaaccgacttttctgtcaaatcgagtttttgtaccataattcaaaactcatagttctccacggaataaacatgaaatcaataacaaattcttctagagcaaacaaatacatataaagtcatttcttataaaagtaaacattagcatatataaaaagatgtcttcttattattcaaaacatttattcaataaacataaacatcaaatgagctgtatatatatattaaaaagaaacaaaacaaattgactaatgaattagtcttatgtcttaggtcataagccgcaaacgaattgcataaatgttaaatagaattagaaaaaagaatagaaaactaggaagtactccaacgatatttgggtcctgaaggtcgacggtcatcatatgtaaaccctatcgcactctttgtgaaactccattgacgtagttgatcacattgaggagcaaatgtattttgactgtatacttgtatataactatgccattccactcaagaaacatgagcagtaacttcatggagacgaaacaaatcagtactccacaactaataaaacagaaggctaagaacagagacgttgctcttgatttctccaattcaacaaacttttcaatatctttccttgtgtagccacatctcccgacacgatgaggaccatcctccctgagaccccaagcaacctatcataccttttctttagacatcatcagattttgcgcttggaaacgcatcaaactcctcgtcaattgggcaaaggtgaatcagctttagacagctttatatccatgtgtggaggatgtctcggtttcaagccaaacctatatataacctaaataagaagcggtatcaaagcaacgagaaaacgaagtactgatggagaaaaacaacgaacaagatcacgatatggatcaaaactatcgtcatgaggctctccatttgaaagcttatgaacgtaccatatccaagtattaacccagccatcaaaaaacgagataagactttcaaagttcacgcttcctcttcttagactccaaatgtttgatcccacatatatcgagcatctacaccacaacatcccttctgagtgctggcttgttgcagagaatgtgagttgcttggtctctaaggctgactaattggtaaatataaagtgcaaaatgtagcgtatttgcggaagcaatggatctatgtatttctgaagcatctttatcatggatgtagcgtaaacctaaccgctagctgaatcacatccattttcttaaccctgtatggttttaaaaccactaaaggttaagaatgtgtgtaaatctttgaggttataagggtcgataaacgtatcctgatctaccccgtccttgaatctttactctccccaaaaaaattcaaattaccgataacactcgttgttatcatcgtctaaagatcatatacttcccaaaaatactacttgctgtattttggattgaaagtttccatgcggtcgtcctcgttacaattctttcttttatctttttttctatttgtgttgtatctaatgtatcactttgatttgtaataacattaagaaaaaaaggagttttcacaccttgtaagttacaacttgtagagaagctctagtctctaccgtcaacgtcttctagacaaaactagtaaatgaagaagtttatgaagtcagtaacataaactattaataaataaacaatttattaataaaataccttcaccgattgtcctatataacatctcttgtttttcttttgtttcacatcaccaatcttacatccaaaaccaaaaataaatatggcaaagtctcttctcatggtcatgcttgtatccattgtaatgttttacatggcttgtccaattttctcccaggagatacatgaagatgtagccatatctccaactccattcgaagaagctaattcacccgcaatggaatatgacatgaagcttccccattactcgcaaaaagtgttcgattttcttgagacttgcgctgaaaagccgagctccatatgcggaggtgagattttccagaacgtgttggatgcaacaaccttagtgacagataaatgttgtcgtgatatattgaagattggcaaagattgccatcttggtttgattaaaatcttcttctcatcgtatgaatataaaaatattgcatctattccaagaagcaaacagacatggaacgattgtttccgtagagttggaagcaagattggtgttccggtctctattgaataataaacttatattccatcgttctgatgtaactgtacgtttttgtaatttaaatgttacccttataaaacagctatcatatcatttttaataataagctaaagccatacaatattttatatttttattcatcattcgaattagttcaacattaactacttaatttaaatagagagacctttgtttcgacgtaacattacaaccatgtctaaacctccatcaatataaaaaaaaaaacttttcagtcaaattagtttgtgtaccataattcagaactcatagttctttacggaataaacatgaactaactttctctaaccaataacaaattcttgtagagcaaaaatttcagttaaacaaaacattgaaacgtatgttctttctttggtttcaaaattttcatcttcctcttaattaaccacatggatcaaaaaattattcatctccacaatagtaaatccagatttagataagatgttatatatgtttataaaggaattttggttggatgttttacagtatttttatgaagtttttttcagaaaaaaaaatatttagttaagatttgaccctggttaaaaatctttctgggtctgccactggagcagagtgaaccctgaagtgacctgtcttggttatcttgcaccgaaatatccttatttcttttgaaattttaatgagttttatgcgtgtgattgtatatctattattggtctttccttcaatgcattagttgtatacacagtatgatgcaacgtaaaactaggatgttgcagcgtcaattttagttgtttgttattaataattttttctttattttgatagtcattttatcagtattttttttttctttaacatccagtattttaataatgtttaagattatcgagggctttccaagctttagttttagggtgattttgtgcatagacaaaattggggttaagtatttaggtaatagacactagggagttttcttttcaacgagaggtaaataaagttattctaatgttattcggattatgaaaacatctggtttctcgaatgttattcggattctgattatgatgacaccgacagggatgacgacgactatgccacaattatgttgactatagtctatattggactcttcttaacaatgcagtggcaggttttattttctgttcttgtcaagttcaatggcttgtggcgctgtgaaatgatattatggtgatccgttggatttagtaaaaaagttaatgggctcggttaaggaatgttctctaaaggcccttgaggaactcacaaaggccagcaaagttttggtaacgatcgagggtttgtttcttgaggttacaaacttaccgcacaaattgttaacaaattatagttaattttgtttttttaaacaaattgtaattcaatgcaatggtacatatatgttgtaatatatttagtaactttcagagtggaatttagactagttgttattatttgttttgtgattattttctttattttaatacttatgttatcagtattttaattatgtttaagcttttctagggctttgcaagcttttgtgtcgagtcgaagctattttcatattatgaacacaagaatatatatctaccctgatttttctttaattccagggacagttgattttatcatttctatttcctatcatttttaccaacatttttctactctttcgaactttagtgggattctgtctgtattttcaaaatgctagtaaaagtataaaccaagttgatatttttagctaaagttgcaaaagattatttcctattggtcaagactcaagaatatatatcagatagattctttctttatatatatatactgtttgtttccgatttgattgctccactataatcatgttgttgaacatcgtccgtttatgtcccaaattgtttcgtcgaaaacatgaatggtttgttgggggtgcgaaaacacatttacggccatgattgttcctctctctctccaagtgtggcatgtactcgcaatcggtgacccaatcaaaatgattctgatattagagcaagctagaaattaaagcccattagcataatctatgactagtccaaaagcctatgtaattaggattcttagcaagatgagaactcatatatatatatataccaaggcgtattttgtcatcttaaatcatacatgttaattttaacatcgataaagattagcatttctataaaagtaaacgatgaaatgtgtatactacattatttaaattttaaacctactgtccacttagatctagcaaaatatgagggagagagagagagagagagtgagtgagagaaagctggcccctaagatcttggaatccttttgacatgcatgttgtcattaatgatgttatctaatcattgagacagtcaagttgcaaatggcgtggcccatctcctgcttcgtcaatgagtaaacctagcagcaagacaaatctattaagattttgttcccacaatagatgtttatatatctcgtgatttcatctcataccatagattcttttgcaaaactctgctataggttgcatcaaaaggtaaagtatattcatgatctcttaccttttcttaatgggatcacatttctgatacaatataccattacggttgatgactaaattcagaaaaatttggtgtcaccaacttacgtgaatattctcaaatgtatggtgaaaattgttagcacgatcatgtttcctctatctcacataggcaacatgttttaagattctagagatcagtcggaccaatggttgttaaagattgtgtctttcttacacgaaggggacgtgacattgtgttggaaaaaagtgaacatatactctaagcaagcgtgccatggagagtgcttcttatgtgtgtgctctttttcactcttatgtattaaagcgcatgcattttcctaaagcaaataaagtgtctctctttttcttacacatgttaacttcttcatgatactgatcgggtccaagatctagcatacatctaatatgccgttagttggtttcttatacatggcaatacggttagtttcgtgaaagttattaaaatgcacttttgggatgaacgtggcctggttcttaagtgaggggtttcttccttttttagttaaatctaagttatatactttggaagtaatcctaccaactatgtataattaactcgttgggttttagttgaatggttctttctaaaagttgagggattagtgttggagtcttttactgtaattttaatcatggttcacgattgtgaaaatactgaatactttaaatgacagatgttataaaaaatcaaaatgatagtttacattcatgttgatatgatataagctatgagtataagagtattattaaacaatgaacgaaaatcccattactacatgattagaaaagaagaaaaaaaaagtctgtccaaaacaaaatcctaatatgttggacatccaactatatataaatccgaacgaactagggtcagctaatctccactttcatgtatatcatttggaaaacctttattactctgagtccatgcatgtttttttttatacaggcatgttaaggccaattactataagctttaggtagcaggagcgacacaaataaaagtatgatgaaaacaattgggatagatgtaccataaattataaatctctatattagaaaaaaatgtgtataaaatcggttagatagtaaatatagtaagtcagtttaaattttatatcatttatcatcatgttatcatgtataaagcttctaaggcttacatttcttatattaaaaaaacatataaaaaaaaatctgagaaaacataattgattaaaaatgtacttttatgagatcgcatgtcgactccctaatttagtagcagaagaataacaaataagaattggtcttttaaaaattgttgttttaagatgatcggcccactagaagcctggaactaaataaaatttgtaatcagtttggaaatgagttaaatagcgaggttttggcacacatatacaattgtttatgcacgaggaaaactaagctcggaaaactataactgatttttttttttaataactgaagtgcttttaaagagttttcttcttccaaagattaattctaaaatttgaggagatcatgttagaatttgaactttggtgggcaatgttactgaagtggaccaatggaatgttaattatgaaccaagtcagcattggtccgtaagattttttcttaattgtttttcgtgattatttttttacttgaacatctcgttacttttgtttgtatgtgcatcagtatatgtatatataaatacatctatttataactaactggacggcctaataaccgagacaaatttggaaatggaccacgaacaataaaagctgttaaaaaaaattaaagattattttatttctaagagaaaaagaaaagaatagtaaacataatgcgaatggtccatatgcatgtgaggcagtacggactagggatgccatgcaagccataacacaacccctaaacatacaccacccttctctctggaccattttaaacctcatctctctcgatcattcttttactttgcgttgttttatgcattttctcttaaaacaaaacctatccaatgacaatagtcccttgacattttcattgactccgacgttaaaaggttgctcttgggagtcgtttagccttctttatgatttgatgatgatttaacctattttgaacattaataagtttcacctaggattatcaaaagtattgcattattatatataagctatgagcctatgattgatattagtattctaaaatacaattgcatatacgatatatgtaccaagagaatctttccaaatttattttttttacatatgggaattaaaattaaaaatatgaaattaaaggaaaaataagtataatcttctatggtgttagaaataaaattaaaattagaaataataatagatttatgtaatactttataaaataaatttagaataagattcttacaatgatgatttctttgattttcaacccatataacaacataagatatatatatatatatatatatatatatatatatatatatacatgaatatagtggaagaggatgagagaatgattatttataagatggtaataaaaatagataatggagatgtatttaaagaaaaaaaaaatgtaatgttcataatctaaaattaaaatatagaactaagctgttacaataatattttttaaactcatactacaacaacaacaacaacaaaaaaacaaacttaaaactaaacaaaaaatatatttgagatttgagatattgtgaaaggggatgacttgatgagagaatgagtgaataagagaatgggtatttataggatgagaagtgatggaagttacaatttgaaaataaattgtgggagttaatttttaatttatcgtgtgttgataaaatggagtggagaaatataattaatacatatttttttataatttcagttttgtaaataaattctaggagttaatttttattttattttgtgttgaataactatggaatggaaaaatgtaattaatacatattttaatgatttcagttttgtatcaaaatgtgagttaaatgtgttatttattatttaattagaaatatttttttttttaaaaacttgtattgccaagtggactaataaggaaagagtgaaatcttactgttcttattttgttttaccaaaagaaaagaaatagcaagcttttaatataagtaattgttaagaaccaagtgtatatagcaaacttaaccattggagatgcttttatatagcatgtaagtgtatgtctattcgtaaccgccgacctcatattgatgcgactgttaaaatatcgtaatcggatgagatttacttagaacaagggatcaagttaaggtgatccatgcacttcatgaaataaaattagtacttgagaatgcatgcaagttgatgtcacaaaaaaaagaaatgcaacttgacagaataaaatagtgtcaaccaaaaaggaaaataaaaacattccgatatattcttcgtatttacaacaaaaagaacaaaatgagcaatcaatacgagagcaacgtttagaagaggagttaatgcgactagatgcattttggcgtattatatagtatgtgattttatgggccacccttttatttcaatttttaactctttattgcttatttagttaaaccaaatagataattgtgtatacaatttttttacctaagaagatgaaaagatacaaacttcagtcacttgtctaaaaggaacgtagctagtaatgttggagctcgaacaatatagaaggaagcctacagtgtcgtgccgtgaagcaattctgttttttgtggaaaactcaaaaatttggtaaaataacaagtacatgttaattttaccagcgaatacagttatttaaaatcattttcaccactcaaaatactaaaaacataatcaaagtttgacatttgtttattgctaaacaaaatgcttatttttttataaaaaaaattatcatacacaaatacactatattatggttcccgtttaatatttcttcgaacccaatggttttactacactttgtgcacttaatctcgtttagtttacactaactgcacttatttatacactttctcgttttaaagtcatcatataaatatatatatatatatatatatatacatattaacattctcataatatatcgcaagttcaaaatggttacatgatatgaacttaatctcttccacatgattaatagtttctgaatggcagtctagtggcaagggaaaattggaaaaatgttaaaagaaattaacccatattcgatccacttggtaaagaaaaattacatttgtgtggaaaatttgggtttggactttagtctaagcaattcatatggtattcgagattagactaacgtgattccgagtatcagtcgaaacacattccaaatttggaacagacggtatggtgatccttcggagaaaagttcacaatgaagtatttcggtgtattcgatagggtatattaaaagaaaaaattagcctttgaatgcttaggatctatataatctgatattggtgatattttctacttgctatatatatacataaacagttccgcaactgtttctttgtaatgtagttcgccaaatagcatattgattttcctcaaccaaatgataaaacggtggaaatacatcaaagggcgatctcatcttatgattttagtgataacttaggaacatagcatgcattaataggggaaaaaacatagttcttgaagcatcctaattggatattaacttaggttctaaattttatattagggttcttgagtttctaaccaaaaatcaagttggatatgtgttgagtgactcgtctactttatatactactctaaatcccaacgtattttactaggtggagtctctactctctagtcaaaatatcaacgtattgttgcatgagactatggattatgttttctacatgcttctgtatatttcattgaaaatatccaactacaagaaatttgtcagccctaacaatccctttgaatctagacatctatagctctttcgtttttgcgattttcttcatttacatatttgtacatctgtagaaattctgtttgtccatgctacgattattctattaaaattattgttatcggatacacaaaaagtctaatgtcaaaaaatatattaaatgcttagaggtgacaccttattttggagagtataagatctttaagagttatgttcgattagtctaagttgacactcaagagaattagagataagaacaagctagaaaattgaagaaacctgcgaaacaaaatttacttcaaatctcaaacgtgagaatgacttcaagttgagttacattcacaacaagaagcttaaatatattagaccccatccaaagatagctatggccggaaatgcatggactataaaattgtggtccagtcgagtgaattagatgttcacgtatatactttaaatttttggatgtattatgtacatttacattgatttcaagtcaaacatgaacaatgaatgcattagatatactaaacaaatcatctagctatttacgccgtttaacatgtctttcacgtattatcacactatctagttacacaaattaatgtgttatatgaaaaagagtaatgatattaatacctttattatcttgtatcaacaacatatattatacgagtttatatacatgcttacatacgtacggtaaaacattagtatcaatagactatatgtgctccaggttaataatacggttgatttgttaaaataaaattatttgatatataattagctaaatgaaacaaaaaagagagcaatgttacgatccacatacttcaagtaataataaaaaaaataagaatatcacctagttacagaaatttagatttcttgtaccaaaatcatctatcgtcttgatacaatttatataatctatttcatattttaatgttgtgaataaattcttcttgtcgatatattttgtcgtatggtattggtatcgactcgatctctggagtaaaatacttttggctttatcttcaatatagttgagttttatattgttttttttttttgtgtgtgttaattatagttgggttgatcttaaagaaaagtgatatgaaagtattgggttcgtttagattagtgtatcataaatctttcttataggacaaattatatgacgcgtatcacatatcaatacaacttttgtttacatgtaattttacattttaatttttgattggttattattattaaaataaataaataagctcttaacaaaataaaatattgtattgtgcaaatcgggttaaactaatgataaaaatccatatttttgttcatataccggagtctctaatgatggaacgatcactagcagaatagcaaaagaaaacttgataagaaaatttggcacatgtcaataattcgtttaagtaggataatttattttaattaaagtgattgttggtccatattcaaccataaaataagtgttggtccatagcgaagggcccaatcgaatcttcggcaaataaggaaaggaaagcatgcatttctttgatatttattcatatttttcagcatttctttccaaagctatgtttcaaatcaatttggtattttgatgtatacacaaattttggttaataatgagtttctcgatcttagctcaattcttgttcctttttttgttgagcttaattctttctatccctcacatagattttatgaactcatgcatagcataatcaacatttatcactattacttctttcactgagattatctgaataaattttggttactaaatttatagtacctaatatcaaaaaccaataacatcatagaaaataatatggttgaattacatgacattcaaatatatatttatatagagaaaacacacagcgcaataaaatattcttttttgcacatttttgttattattataaaatactcatatatatatatatatatatatatatatataaatataataggaccggatcaggcctctgagtagaatcgtattaggcttttgactatgaactttattaagtttaatatttatgtgattagggttaatgtcttctaactaattatatatatgtatgtagttatttcatatcagtaacacagaattttcagtatcatcttgtgtatttcggacattcggacaatacatatattaataaaatgtaaagcgaaagaacttcaaatttaaaatatatgtatacgagagctccccacctccacaacaccaccaccaccacccactaacattaatcacatgaactttaaaacatgcacaataagataaagctaaattcctaatctaaagactcaaccaaactcctcctctctcctccattcaactaattaagcaaaaagaagcagttgaattaaggctttcattacttcaacttcaattatcatatttaaatatttttcccatttacaaaaagaaagaaaggaaaacgtacacaaaaccaaataaatatatacaaatgtggaccatgatctaatatttccttcccaaaaatacaaaaatctttgacctaacattgatctaaccctgctttctaactctcatatgtcacaattaaagagttaggaaccttacataaatgcatccactactacctttctacttcttagataacccaatccaaacttgccaaatcgaaacccgaatctcaggttaattaacaatgttgaggacgagccaatggtaagaaatgtcgttgaacctcaatatcctcagcgatcttcttggcatcaatggctgcaccaagcaatccaagctttgtgaaaccgactgcatacaatccgctttcgcctttccaaccgttaggaaatggtttatgcggaaatccatctttctcagaaaacatgttcactccctaaaaaaaaacagttcaaagtcaaaccaagttaattcaactattgaaacgtaaaatgggttgtgatgtgtcaatatcaaggaattaagaataatgaagatgtagacgcatcatcgctcatggtacacacctttagccacatgggtacgttgcttttgtaacccgtggcgagtataatggcgtcgaagttatctactctcccatcaacaaactctgccgaataatgcattacccgtttcaactccggatacacctaaaagtcaagaaaaaacaaaaaaaaacaaatcaatataccataagctcacggttttgtaatcaagattgtattaaaaatacttaattataattaatgaaccttgatgtgtccacttcggattttggcaagagtgccaacgtccaaaacaggagtctttccgcatttgatcttgcgttcaagagggccaagttttggtcgaactaaccctaaccgatccgtgtcaccaagaaccaaccgagacatacgtaacaagaaccggtccaccacgtgcactggaaaccacttgagcaggctcgtggatatcccgaaagtcgatatacctagcatttcttgaggtaatacgtgtacctatagcattagacaaaaactttaattagccaaaactgtaatcatggaattggaatatataatccataaaattacaagagatctgaatcaatataatcacatgcgtggatttttttgaaagcgaaagaagaaaagagtaaacatttggttacttgatcacaaagagaccaatgatgttagtgttaaacctttaagagtgacaaattacgtagagcgagaaaatgcaagaactatactaattaaacatctatcattgttcttgcatatattaacgagaagagttttgttcatcctcaccgagtcacgaaccacaagagaaggaagagcattgaagttgcaaaggtctaaacaaacttccatcccggagtttccacatcctacaaccaaaatcttcttctcactaaatatttcaccgctcttataggagcttgtgtggaggataggtccaccaaaatccgggattccatcaatctccggcatcacctcctcggcattctccccggtcgccacaacaagccaccgtgatacatactccattgtctcatccttcttccctccggttgtcctcaccctccataacccacaccgcctatcgaacttggcttcctccacggtctggttaaaaacgggctttaggtcaaaatgttcggcgtaagactcaaggtattggacgaactgttgctttgtagggtaagtagggtagcttgaaggaaaaggcatcaatggaagctcacagaaatctttagggagatgaagtcgaagacgatcatatgttttgtgctgccatagtgacgctatgcaagtggaacgttctagaatcaaactagggatgtctctcgactttaaacatgccgctgtggccagtcccgacggcccggaaccgacaatgattggtccgggaatcattaagcacctagtttcctccacgtacggatcatggattctcttgcctaacgtttctgtaacaaactccatgaaagagagaaagagaagaaaaaagagagaaatagatctaaaaatatgcaagaagtgaagtaggggactgatatcagattaggtttttaaacccgtgtggtaaacaaagattatactctcttttgtgactcgtggataattatgtcccgagaatagaggtgaaaagagagaatgagtttcattgatcttatctacaaaaagaactaagaagaaaataaaccaaatagataagaagaaagatcggatattccctataaaccagggtaaatctaatgatgaaatattattttttcaaactcaaaagatttttgtagtatttgttataagaaaatctctcaagaattgagatttgaaacaaagatttcggattttgaagaagaggttttgcggttctgaaacaaatacttggggagagagaagcaactctttataagagttggaaaaaaaagatgagatggcgatggacacatgacataattggggagagatacatgtctctatttgtatatatacatatatatatatataggtggataggtagtgggatgggcatgttatgtttaattctatttaattactatactttatatcgtaattatggctattgggatttgataacgaaccattaactaaacgattatacttttctttccattttaggtataaaaatatctcacctatttttatatattctttttttttgcagtattatcaaaagagaccaaatttagccaacccgattgatacaaaaagtcccatgttagaaaatatttgaaaacaatgaacccactaaagaatccaacttgaagaagaaaaaaaaatagatttcataaagtcctcggtgtatagctagttgaacttttgtcttttatacaccgaggactttatgaaatgtattttaaagatgttatagctcctggcggccttttaagatgttcaactagtcatgagcattagtgtgatattctcggtatgatccaagaattagctaatcagtaaaatgattacatgaaaatcatgcagggtcacgttttagttggatagttgtggaacatgctattttggaaatggaagttaattaggacggatcaaagtaaggtacaatgatcaaaagaaaccaagctgaaaacgaatatcctcagaatcaccacaatgaggaaacaactacaacaaagtattgtgagacatgatggagaacatgaaactaaaagtgttttcgtgtgcccccacaaagtttggagaatcttttgccactgatggattttgcatttctcgagtgtcgtcgtctataaaatcaaagctgcaattaagatgttctacagctccttcaaagttacatttccactggtgcgcatttcaagttgtaacatccaattgtaaactccaagagtggtcaatacttttgtttctccttttatagccttactatcatttatttttggctaataaagagaaaccggtaaaattataactactttaccaaaattcaaccatttcaagtttatttttccttttcgttaaagaaaagttggtttctagtttgaaactaaatataccttagcttaaggcgaaaaggacattgtatattaaaaacaaaatgacctatgaacttacattttaatggatttatgattggtcaaggaatatatgtaaaactatatttgtgccttatgtttcattatatatatcatgagtgatgataggacacatcatatgatatgaactataacctatcattgatcatattgaaaagagaatatatatatgttatcactgtgcagtcaacttggtgtactatgattaccatctcttaccactcatatctcacaatgagttactgttataaattcaacttttgcttgtatcgcatgtcatggtcacagtgtataacattacgatactattcaaatcctatgataatcacttcccaaatatatatgcgtacgttacatatgattctttgcatcattagttatatattcttttggcttctgtattttccattggtgcaactcttaccttggtagaagcaagaataataccaaagactatattaattgtatttaatcgattatttattattttactaagttaatcatttttacatcatgcttctataatagtataatactacgattaaccttttttgttcatttttgaattttgagaaactatatagtatgtgtattatacgttggcaaacttttgttgcttgcccgtaacgtatacaaacttttgaaatctatagccgcaaagcacacgaacttcatgatctacacggactataattaattatatataagaaaatatttaggtttaagtaatgtatgatactatgagtctatgacgatcttgtatgaaaattgtctattatatatatagtcgaaacattggaacctaatggtagaagagtattgaattttgggcattaaggataagatcttgccgaatttgggtgatcttcaagtgaataccttccggaggtacgtagaagagtgctgaattgttgtattacctctttactgaaataataacccattttccggtcttatcatcacaaaataaaaatacgaactttagtagtctacctccttgctaataaaagttatcactttcgaatcgtttttttttcttttgagaaaaatatcgagagagaataggaatatgtactacatgactacttctacaattttagctccgcatctttcgctttctcctccatgcattgtataagtcagtcttcacacatataattcataagatttgatggccccttaatcaacccgattttgatgtgagctatgtgacttcacaattccagcttcccattgaaaagcatatgtattttgtcgaataaatatcacattaaaaaaaaaaaatccttaatgtcaacttaactgtgatacgtacgaagaatccttaatgtcaacttaatcacccattatatctactaattgttttcaaaatatatgtctagtaactaaaatttgattatgctaatttttccatatgccaaagagtgtaattccctccaaaaacatgactaagatttttcaccaattctcattttgtgaaggttcatcgaacaatgcgtgtatgcatatttcccgccggaaaacaatattttcatacgttacgttctcaccataaaattctaccatttcccaaaaaaactgacgccaaatttttcttttcgaatacgagtcagaacatcgtttttggctagaaattgagaaaataaatttttgttggcaaagtgcataatcagtaggttgtgcggcaatgcgtttcaaagtagttggaagaacatgttatataacgcttccaaaattatggccactgtctttgaacaaattaatagaagccacaatccttgagccgctatcgtaaagattgtggaagactcttatctcaaaattttgcccattcctagctcatttcacttcatagttgattttctctaatctcatcttggcttattaaattcttttggccaaagaatgtcaaaacctctaaagcttttgtaattgactcggttccttttttggcaatttaaattcacactatatcaaattcctttgcatatccatgaattcggcatgcaaaaaagtatattgcatcattttcacaaaaatcgtaaaatcacgtttattccatgatatagtatatttactagataataataacaaagataatataacaagtgtatatatatattagtacccatttttccaacttgcttccaaagcgttttaacattaagaacatatatagtgatcactaaccacatcacgtagaaatcatattatatcatttcatgatattaaccagtcgcatcgctaccaaaaatcacatctctgacatactcaaattactatcaaacttgaattatattgccatttgggacctaagagtcagaggaccatctctcccaattacatttattaatggtccaaagaggtccatatgagtaattcgcaagtccaaccattttcaactaagcttgcagaaaacgtagttcatgacctcagtaaatgcttacatatattacattgccaacaaacaaattgtaccacaattttgttacctaaagataaaacttattttccaagcaacaaccataatattgctataaacaagaaaaaactagtctgattttacgaaaacgagtcagaaaaagaaatccaatagcttgatcagttacaacgctatattttagaagcgaagtttatattttttttttgtaattctttttaggctaatcgtaacttcgtaattccttagtattgattcacatcactattatttgataagcagtatcaaaatacatgaagtagcgttgaaagattgattgacattcacaaaagataacaaaaatgcttatcatgggctttaagggaatgggttttttgtaagcgtattaatccatagaaagattgtggagatgattgatacgcttacatagtacttgatggagtttgcctctgtttttgaggattctgtcttaaatattttaaattctttttcacttttgaattcttctatttttacaaggagttatgtttttatataattttaatttgagcatgatgatcttcttttctatacaattttatggctttaactacgttcccttgacagatacgttcatgaggaaaccttgtctgacaagaaagcatcaagtttttactccacaggttctgttgttcaagtgtagttttcaaacccattagtatagctatgaaagtatttgttaggaattagacggacaatgctaatatggtttgtagttggaatctgtgcaaattcatgttttccagttcctattatcctaacagcaagcagctatgtcttcaaatatattaacaagaacatgtgaaagaattttgtattagttgatctgaattggtgtcggatgatctggtttccactccaataaacgcattctccacatttcattgttgaaagaagtttgtcacaccccaaacccaacttctagggccaccctatttgatttcctaaaaagaaaagcccatgtgtttttatcttcgcctttctcacagccaccatttacgtctccatcttaagcccgaaactaaagtcaccggccatcatcgtttttaagtccgtgaggcattgttgtcactgattctgtagtggtgatcgtatgttggtgagagataggaagagatcaccaagagtgaaagagagtttcggaggtcacgtccaccaaagctaccgctcaccatcgttcatcactggtttgattaggtaaggaaaagctagcatgattatgtcttctcctcctgcaaatctctgtactggtcttttgaatatgcggcttaaatctgaatctttggtgaaaaataataagaagaggacgattgcgagtagcggttttggtgagcagttcccgtcagatctgaaggagtcaaatcgagaatttggtatcgttggatagatcttgctgcaagaaatgagcagaaacttacggttccttgatactaggtaaactccatccgcaaatcaagttacaacttgaccaaaagtcattgttttttgaatatagaaaataagtaagttaaaataaaagtttcagattcgagttggggttttgtgaagctt

SEQ ID NO: 577 - DNA, 95432 bp, Arabidopsis thaliana
cttcttatcatcgaaccaatagaagtaagaccatgattacggcgtcgatggaaagataatcaagccaagagtccatagcagctgacggatctggatttgagattatattcgttaagttatgtgcgttgttttccgcgcaagaaactagtgaatctgtcaaaaactggaagaacggaaccctataaaacagatctgacgcatcatattcaggagaacgtgggagtttcatttgacgaccgatctggcaggaaaatggtggggttcttcatgatactacatactccatactccattttcaactgtgcgattccgattctagtattgtaatcattcatctgtttgtgaagcacatttatttagagtaaatggtacgagtttgtgttctagtttgggtaaacgagtttggtttgagcccaaattctgacaagcattacaaggtcattaaccgcagacgaacagtacaaggtccaaacattgaaaaagatgattggtacgtgggtttattattgcagaagcaagcatcaacgcaccaagtatagtaatttattctaaaatattttccaaattgatgtgttgaaaatgctcaagaactatagaccataaagatgaaaagttaacacataataaatagaccattaaaaatcgttttaccaaaaaaaaaaaaaaatcaaacaaaaatcacaatctgctccaaaaaactatacaaaagttcaaaacctcaactaaaaattcctagattggaaaatcaaaaatccaatggtgcatgtataaggaagagaacatataaattacatgaaggtatatatgcaattctgaccataaaagtcatttacaaagagtgcttatcaaataatacaaaagagtttattaataaatcaaagaattttatatatgtcagacatatgttctttttactagttaccacgtttagaagatttatgtttatcttcttcgtcttctagatccattcattgtatatatgttcaaactttaaagatttccattacacaaattctcatataagtattttaataaaacaaagagaattaacctttattacattttgataagttatcaaccaaatctgcattggatgtaaaaattgtgattttagtaatttagattgctcaaatctggattaaaaaaagaagaagatgaaagtaatagatcttctgattgtatttttgcaagatcataagtgaaagtagaaatttgtgaatctctaagaacttacaaattgagattacttcttccatctaccatttttgttgtttcaaaataaaaatattaaagaatgaacaaatgctcgtgttcaaaataaaaatgaaaaaaaataaaaaagaaaactccacttgattctaaaccctaaactctaaaccctccgaaaatagaaaattattgatttctaatcttttttagactgaaaatagtttttataaatttaaattgcgagaaagttgagaaaaaacaacttaatcatgagaatatcgtatatttcaaatatgataattttttacattttagatatatactagaaaaatattttaaaagggaatcttaactttaataacttataaattaatgtctaagtttacgaaatcgaactctaagttttggctcgtatcattcttcccaaaaatgtctcatgaatttttatcacaaaaaaaaaagtttaggtcaaaatatattatagataaaacaacgttgcaaggagtacaaaatgttgatatggccgagttggtctaaggcgccagattaaggttctggtccgaaagggcgtgggttcaaatcccactgtcaacattactcttttttagtttttgactacaacgaagtaaatcttacgccgtcgatctcatcactcttttgcaaatcatccaacggtctttaccaatccacgtataaaccacttggtcctttataaaaatcatcaatatacaatttaagaatctaattctcacgaaaaagccccataacttccaaaatcaacttttcacccccaaaaaactcatcttcttcgttgaaacgatcgaaatcgataatggcgtcgtcgaagcacgaagactatggcatcccttacacacctcttccatcatcacaaccatctcaatccgtaatccttctaactccttatcgccgtcaccgtcgtccttcacttctccgtaacctccgttgttctctcctcttcaccgccgtaatcctcctcctctccgccgccgtttacttactctacccttcagatccagacatcactgtctcacgaatcaatctcaaccacataagcgtcgttgattctcataaaatcgctttagatctctcgttttcgctcacaatcaaagttcgaaaccgagatttcttctcacttgattacgattcgcttgttgtttcgattgggtatagaggaagagagttaggtcttgttaagtctaaaggtggacatcttaaagctcgtgatagctcttatattgatgctacgcttgagcttgatggtcttgaggttgttcatgatgttatttatttgattggtgatttggctaaaggtgttattccttttgatactattgctcaagttcaaggtgatcttggtgttctcttgttcaatatcccaattcaggtatagtgactttcccattggaacatttagggtttagtgaagagaaagtttggaactttgatttggttttcactaagaaagtttgttgattgaatttgtagcacagatttttacttagggttgtggtagttttaacaatgaacaaacattggtgtgtttttaggaattcgacttttcatgacttcaatcaatagttctcgtcttatcgttgtcgtcgtagggtctccatttgatggaaaggttttgttgtagtgtctttcatcgtctggattatgtttgctctgttgtgattcactttgttatgagctgattgggttttcttgaccttgtgagataaaagacttagatttgtaggggatatgtgtgttgttgtgtagggtggttcttggtgctctctaaatgaaattttgatcatgagcattgttttgatatttgtgtgacatgatcaataggttgttctatgtcatagtaatagtagtttccgaacatctgttgttttaatactgaaactatgtcaatatcattcaaaaaattgatgtttttatacataagtgaaattgttttctgcagggtaaagtgtcgtgtgaggtgtatgttaatgttaacaaccagaaaatttcacaccaagattgtcatcgtaaggtaacgtgtttcttttgaaccaatgtgattatagtgtctataagaatatacttaagattggtaaacatgatcaagttgtagaaaacttaatttgagtaagaagtagaacttctcttagttgaatgcaatttgtacgaaaaaaataggccatatacagcaaggtttagagaagcaattatagtggtagatgattcgaccctagccataactcaggactggagtggtggtattgtttgacaatagcattattgtcaaaactgtggagccgacactttagaccattgcatagttttcttacctttgcatttgagcagaggccaaatgtttttaatagtgattaaagtcacactcatgactcatgaggttattgtgaaagctaatcaaatgtgggtttcaaatgtgcagtgaagtgcaatcctgagctggatgagagatgaagaaaccagataacatacgttgacatgttttgagttctggagaaatgatttgtgagtttttgtatagataaaatactcttaatgttaaaactgaaagatagaatgagaaagatgaaccactactttctgtaattaaagttctttcttaattcctcagatgtgtacaagtgtttgcttttatgttgtagacatgaataaaccactcaataaaccatgtaattcgaagtcttcaaagacgtatgggatctatgagcagagttactatatactccttcagttttccttcactacaattgtatatatcatcggacttggtgtagaggagttccaataagcgtccaaaattaagtgcttgcttgagtactcgacctggtacgctggttgtcttcagtagctcctcatttatggtcttattgatgtccacgatcattctttgacactcgagaatagcctcttccttggtaactacaaattgcttcatataatagttgatcgcatttgcagcaaacccattactcatgtcgctctgacaatacaaaaacacctaagataaaggaaagatcaaaccaaatcaaagtaaacaaagaaaatatcatttcgtcttacgtcaaaatcagtaatatcgtccattagacggccctttgcagctagagatttgattagtcttggtctcgatcttacccactcgtaagcttccttcccggcagtctctcccattccgacaaaagaatacattaacgttgcatatgatgtaagtgctattccaccaacctctacatgttcttcaaagctaggcacctgaattcctcgtgcccatttgacaagatcaagatttgctctcacgagtgtattgagctgttttactcaaacatataagtatatataagaaaatataagtagctttccatgataaaagatatataaccttacaagctatatctacttaatttgttatatcaataccgaagtattttatatgaattgtaagaaaactggtttatgttaatcacctcttctaacatctccttcaagtggtaggagcttccttcagacctcactccttttccgatatcgtcgaaaacatccaacataagtttaaagacacttcgcgatatatcttcaagtgtgtcaatgccatcaggactccatctacatatatttcattttaacaaatcatttatttgtttgtcaagaaaatcccacaaaactgtttttcaaaaaatgaatttgtgtacatatttatgtggataaaatactgatacagcaaaatgataattcaccaagcatcaagaaacgagttcaaaaatagtagaggttaaaagttaggtgatgtacctttccacacaagctacgagtcttgtaagctcatgaatagagaaataatgatcgcacgcgtcatctaaaatggtaaggaggtagttaaacttagctgcaataacccttccacccgaaaattgtggttcgaaatacatcatcaatccagctagccaagcctccacgatcctctctctaaattgactaggccacttagatgtaaggcctagctccatccaccatcttcaaaaaaaaaaagaaaaaaaaacaagaaatgaaaagtaccatacaatattaatagagttatgaaatttcataaaaatcaacaatgagtagaccgtgaccctacttgataaaagatttcagttctttaatgtaatgcagctgcaataacttgaaattgagcttggctaatctgagtagcatcttatcgtgatcttcttcttgttcatagaacgaaatgtattcccttgcaattactgcttccatattccaacgttgaggtaaataaagtgtgtttcttataagccttaagatatgaggccggcacgtccctcctgccaataaagacttcaagtggctcgatgtaaacttcaacgcttcgtccaatatataatctgtcgttgttcccaagtgtgccgcttcatacaagctaagtattcctttagcatcttccgtaagagattgctgaaacttcccatcatcccctgtaaatctcttgaatacaccttacacgagaaagagatctatgcattactattagaagatgcgaaagattacaaatcaattttggtaattaatatttttgttacaaaattttattatatacatataatttgtagctacatcagctcattaactagttcgtagttttaaagtctgctttttcaaaattttaatatagacctaattacaaaagttgaaattttagttttctcctatttgtgttttaatgaaactttctatatatgtaagaaaaattcaaacagcgagtaaactttgttttcttgttataatgaaatgttgtacttcataatttatatgtttaaggtttttttttcctacatggcgagtaaactgtcggtgaaatagtcgatagtaattgagaaattgcactatgtatacatagaagattacaaaattaagtatcagaaaaaattaatgttggaccttctctctatcataaaaatacccttataccctatttgctcttgacgttaaatattttgttaccttttaataataatgttatcatcttcccataattatacaatctttgaaatcaaatcattggttcaatagctggtaatttgtttatatcgtaaataagtatgataatatataagttatcggtaaaacaataaattatcggagtaaataaaaaggttactttataagttagctgataacagttttttaacacgatagatttaaatatacattgtataaattacacgttaatatatatattatccatttatcaaatattttaccatgttaatacaaatattattccgacttttgtaaacttatcgcgatattatattgtttaggatgtgtaatcggcatattaacgtatcaaaatgaacagtattatccgtataataaccatattgtagctatggcaattttgtaattaatccaaatatgaaggatacttttggtttatattttctttctctttcatacttacctaatttttaaattatctctcctactttcttaatttctacttcttcttagtatataaatttaattcacccatagtaattaagaaggacgaattataatattaaaaaaaacctatgaacgttacataacaagaaaaaaaagtcctttagtcgaaatctattgctaattgtgatggtattgcaggtaatctgttacaaaataaaatgataaaaacattcttagatttgttgccaccgactaaacaattgtcttacttgatggtaaattgtgtccgtatgttctaaagacacggaacatgatggagattgtagacaagtccttttcatcaccagttatatcatctatctttcgaaaagcatgttctagtatatttttgatctcattttcaaaatgaaatgcgagaccaagactaagaagcaattgaatcaaaagcactttcctcttcgatgtctcatcgtcaccctgggaagataggagctccataacttccggcttgagtatgtcaatctctcttgtaataacatctagttcctattaggtttatacatatatagtcaatgatttgtttcatgtaaagttcatcatttattgctattacctttttgcccggaaactttatatataaagaaatacataacaaatctttgtgtatatattcatgtcaatatcctatagagaatatatataagtagtataaatgtcttaccgattcatcgatgggaacagagaggaagtaatcagtccattgacagtgagacaactttgtgaacgcaagactttcatacttaaacgttgtttgggattccatagtgtttgagagagggagagaaagagagttagagagttgaaggtgaggagaagtgtgggtaaacctaaaatataaaataaataaatgaataatatatagagataataattagaatattataatatggaatcattactataataatacggaatgattaataattgacagaatgcttttcgtatctatgatttttcataagcttattagagttaatttgaatatttctttgttcataaagataccaaccactacaaattgtttttctggtttttgaatacattgaaattagtcggaaagaataacgttttcgtataacagtttagtttttgaaattttgaaaaatctatatttatattataacttctagaagcaaaccaaaattgtaggccaaaagatttctagtgaatctagaaaatgagaaactgctaagacaatagcttggacacaatagattcctggctagtttgcaaatggcagcgattcatcactatatatagttgcttaacaatgcgactaacatcagttaatttacgaggaagcatatatatgctgccaggtaagtttaccacaatcataagtaggaaactgtccgccttacccacctgcttggtcgagcgaggcagctttctagccattaaatgcggatgaaccaaccataaaatgcggataaaccagcaagacagcttacatgaagcgatggaccaacctctcagcgattgatcagacagcttactcgagaatttctcggccacattttgcatacttcatggtaaatgatcgtagcgtacaaaatcaacgttgatgtctcgataaaatgtagttttcctcggccaatccctcgtgttatgtcccaaattcaaattccatcgagtaaattctaattattgtgatgaccaacttcctttatcctttcttatctcattctgacttttccagctcaaggttgattagtcagatcactttttattttagtaatgactaatatatatcgttggcatgcaataagtctctccttacaaaatttcactaccttgataactcttttcttttggcctttttttttttgtgaatgactaataggttgtagatctatgcccacattaggtcaggactataacattttatatcgaccttctcaagtatcactcgaactggtgagagtcttaccaattgagttatcgatatttgtgtattatagtacactttaaaatgattccctacaatagctctgcttgatctttcttccgttttcttttagttctcgtaccaacggttcggtcattcattagttgttcttcacaaagtttctgatttttgatagatgatcctcactaatctaaatctttatctttagtacctactctaactaacggtatgctgtattgacatccttcgctttgatatttagatcagagtcaggattattacaagattagtgaaaacgatattattaatgatccaatccataaagcgaaaatttgtatgttcgaccacaattaaataaatgaaatgtatgtatatgtgaacaaaataaagatgaaagataataataaataaattaaaaagtaaaaataataaaaaaaaatataaaagtaagaataagaaagaagaacaaggaacataatatatatctcgataaaccaatacgttaccaaatggcgttaactaagaaaaaaaaaaagacaaaggttcactgaccgactcacgatatgaagacatcaaagagaatagatgtcacaaaacagaagattattaaacaaaaaaagacagattctaccacttcaaaatgatgaaaataataaagagatcactcaacatgtcctgtttgatatgatcaacactgaagagataaaatctgcgcaaaaagacaagaccttcattacaatctcaagaaaaatatatcatcatggattaagcacgagtacatgttcttaataactttgtttatacgcccgaaaattagcattctattgctgtaattttatatgtatatgattataaatatttacgttcgcaatgtgtctatgatgtggcacatggttggtctcttagccaaaacgtgtatcatcttacgagaatagtatgtagtgttaatcaagtgaaagaagtttccataaaaatgccatctttttttttttgtaggagttaaaaatataaaataaaaaacttttgcagttttgtgagaaaactttccatgctacaaatcttgtatactctctttgatatttttgattaatgcaaagaagcaaaaggagtaaagcaaattttgatcatatcaactttctttatacgtttaatacatttgtgattttgaaaattttaattgttttatttataacctagttttataacctaggatttgtttaaaccatagatattatttctgtgataaaaaaaaaggcatattttgtcacttcgaatttcctcaaaatacatttaagatgataacgtacaaaactatcatattcttgtaaacttatcacttctttttcatgaatcatacacgaaatatcgatatcccgaataaattgagtcatgtgtaatatctcaaactctaattcgagtttctaaatctaaaaatcatatgatttctaatataaaattcgacttagctaactgctacatttgtgcgttatttgccgctaagcacagtacttctagtgggtctatatccacgttttcgtagatcctgttatttcttgctttgcaaatcactttaaaatgaaaatagtttttccacatacaaatctctttgacagatagttaactataccaaatggtgtcgaatcatacactttaatacttccaccaaaaacttattattaccctttttgtcataaaatattaatactatataattcaatcattgaatttcaatctaataatacaaacctgcaacatctcagctaaattatagcatggtttacgtggtaaaggtcacaatacatcaagcacatagtggttttctatctctttaacaaacacgtgcattacgattaatggatatatatctgagttattggttgattgtacctgcctccacttccatttctacctgataattgaatattagtggattcttttgaaaattcagtgatacgcatagggtagaaaccaatcaaagtcatcttttgctagagtgttccgtgttagctagagacttaacacgagatatacttatcatcaactatttttaagaatcaaataaacatgttatttcatagttgaatattgtgaagatatccaacccggattttggttgggtttggattcacattttcgagttttaggacttgtcggtttatgtataaaagtatccaatacaaaacgtacttaaatatgcatgttttggtataatgtcggttttatttcatagttgagagttcttcgtcaaatttatcgttagttcatatttggcatgtatctttagattgttattctcctcacacttggaacaaataaataattaccgttgcaagacttttaacacattttgaatcatgtttatcaaaatcttaattcaaaacatatgacactgtgaaaactggatcaaaaagacttctcatcagggaggttattggcgacggcgacgtcaacaatcgacctaatggcttgctcgccgactttggataatatgtaatcatcagtgaacgattcttgatctagtaatagtaaacccttttggtgatttatttatctatgctatcaatttttatgcaagtctttctatagaatatttctctctcgtcatgattaatgctaattttcagtttttcacctccacaaacaaaagacggttctactcgcacgtgttaaaagacggttctgctcataagcatacaaaaatagaaggctaggatcataaatcttataagttacaaatcaaaataacatatatattcactaaatactttacatgagagattgaattagaaatggaaataatattagtcactttgtgcttaacaacgctccttgcacttcttctccttaaatccatcctcaaaagaaccaccacgaacaatcttaacctaccaccatctccatggcgacttcccgtgatcggaaacctccaccagctcagcctcaatactcaccgttctctccgttccctaagtctccgatatggaccactcatgctccttcatttcggccgcacaccagtccttatagtctcctcagccgacgttgctcatgacatcttgaagacgtacgatgttatttgtgccaaccgcccaaaaacaaaagtgattgataaaattttgagaggtggcagagatgtggcttttgccccttacggagaatattggaaacaaatgaaggtacttcaaaagttcaactagtttttgttttctccttttttcttttcttttttgacttataatattttcctacaagaacattttattgataactattttcctataaactattagttattttcctcaattttccttatcgtgatttggtaaattcaattaattttgatcattaatatgggatggggttatgacttatgaggagtattttatgatctaaacatatatgttggatgcagagtatttgcattcagaatctactcagcaacaaaatggtccggtcttacaagaagataagagaagacgagataaaactaatgatagaaaaagtggaaaatgcgagttcttgttctcctccctcaccagtaaatctaagccaactctttatgactttgacaaacgatataatatgtagagctgccttgggaagaaaatatagcagcaaggaagatggaattgatgttgagaacatagttagggcattttccgcactcgtgggtgaatttcctatcggcgaatacattcctagtttgtcgtggatcgataaaatccgcggtcaggatcataaaatggaggaagtagataaaagatttgatgagtttttggaaagagtcgtaaaagaacatgaagatgccaataaagacaccagatcggacttggttgatacgttactaacgatccaaagtgataagagtgccttaaaacttataatatgggtaagtataaaaactagttatatgttaggcatgcttctataattttctattgacgtttacttttttttttctttcctttttaggatatgtttttagcgggaacggcaacaagtctctcgtttcttgaatgggcaatgacagagcttatgagaaatcctaaggtcatgaagaaactccaagaagagattcgttcgagttcacgacaaggtttatttgtaacggagaaagaagctgagaagatggattatttgcaagcagttattaaggaggctttacggttgcgtcctcctgctccactaatggttccacgagtatttagtgaagatgtcacgttaaagggatacaatattcctgcaggaacacaggttaaatctttatcaaatctttagttacatatatactttataatttataacatatttaattatcaaatgcaattataggagcaatcttatacttacttttaaaattataaatagttttataatgtaaataaataatatgcatatatgtgttatggtcatttcttagatattagtgacaaacctatcatgggaacacaggttataatcaatgcttgggcaatccaacgagatactacaacatgggggatagatgcagaagagtttaggccagaaaggcatttagactctattttggattttcagggacaagatttcaaatttattccattcggatcgggaaaaaggatatgtcctgggataggattcacatcggcattgatcggggtgacattggccaatatcgtgaaacggttcaactggagaatggatgtggaaccacaaagggttcaacatgacctaaccgaagcaaccggtctcgtggttttccgcaaattccctcttattgctattccatcttctgcttgattcctcgtgtcaacacttgtctctctcttgggcttgcttaatgaataaaacattgtaaatttgtatggtttattgatgtcttgtcttacatatgtatttgacattctctgttactgaaatgttaaaatatcgttgcatttactgtaagcaacacaaacatatcttcttattgattcattaaccatgcaaatccaaactcttcaaagatgtatgggatctatgagtaaggtgactatatactccttcaattttccttcactacaattgtatatatcatcggacttggtgtagaggacttccaataagcgtccaaaattgagggcttgcttgagaactcgacgtggcacggtggttgtttttagtagctcctcatttactatcttattgatgtctacgaccattttttgacactctagaatagcttcttctttggtaactacgaattgcttcatataatagttgatcgcatttgcagcaaacccattactcatgtcgctctaacatataccaaacgcctaagttagaaaacaaataaaagcaaatcaaagaaaagattaattatttttacctcgaaatcagttatatcgtccatcagacgaccctttgcagctagagatttgattagtcttggtctcgatcttacccactcataagcttccttcccgacagcctctcccattccaacaaaagagtacattaacgttgcatatgtggtaagtgctatcccaccaacctctacatgttcttcgaagctaggcagctgatttcctcgtgcccatttgacaagatcaaggtttgctctcacaagtatcttgagctgtttactcaaaaacatataagtatattattacaagctatatatgtgttgtgatcaatactgatgtgtgtgtgtttttgttttcttctattaactgaaaaaatggtttatattaattacctcttctaacatctccttcaagtagtaggaacatcctttagacctcactcctcttccgatatcgtcgaaaacatccaacgcaagtttgaagataattcgcgatatatcttctagtgtgtgaatgccatcatgattccatctacacatgtttatttttacgaatatttttttgtcaacaacatcccacaaacctaatttcatggaaagtgctatgcatacatttttctgggtggatgaaatactgatattccctttattatttgtttatttatatgtttgccatttgagatcaaaagaaaatatatttccatatataaaatgcaatagcttcttatagaaaaaaaaattattggtttttgtatttagatatagtaattaaaatttaaatgttgaaaagattctgctgttagtcatttaagatttccaaaactctactaaattatggtgttattaggttatttattttggccaaagtattccaaaatctttagtaatatagaatcattggatcaatatgatctcgtaaagtcaataaaaatcttgcgttattcaagttttatgaaagtaactcattttgtcattgaaataaatgatgattgtgttattggtttatcgattgttatttcacaaaatttaatcatcaaaaaggtattgtatcttcataaggtattctcaaagtagttttctataatcaacaaaaaaaagttacatggaaactccattatctataccaacgctaatatcacaagtcattgtttattacattaacccagccaagagaacaaaaaaacatggtttgagacaaaattatttgtagagggaaatcttttctgatcaaaagatattcaaaacgttactaatggaaatagtgtaacaaggaaattgactcgaacatatgaaaaatagactctcatgaatcatcttggagatacgtatatatatactcaataaagtttatgattatgcaaattaaactaatctaggagaagaaaagataaataaattaaccaagactcaagaaataagttgaaaatgtagaggtagaaagttagcctatgtacctttccacacaatctacgagccttgtaagctcaggaatagagaaatagtgatcgcaagcgtcatctaaaatggtaaggaggtagttaaacttagctgcaataacccttccaccagaaaattgtggttcgaaatacatcatcaatccagctagccaagcctccacgatcctctctctaaattgacttggccacttagatgtaaggcctagctccatccaccatcttcaaaaagagcatacacaaaaaccccaaaaaaataaagaagagaattattcaatattgttatgaaagttcacaaaaaaatcgacaatgaatatacgcgatcctacttgataaaagttttcagttctttgatgtaatgcagctgcaataacttgaaattgagcttagctaatctgagtagcatcttatcgtgatcttcttcttgttcgtagaacgaaatgtattcccttgcaattactgcttccatgttccaacgttgaggtaaataaagtgtgtttcttataagccttaagatatgaggccggcacatcccgcctaccaataaagacttcaagtggctcgatgtaaactccaacgcttcgtccaatatataatctgtcgttgttcccaagtgtgccgcttcatacaagctaagtattcctttagcatcttccgtgagagatcgctcaaacttcccatcatcccctgtaaatctcttgaatacacctaacacgagaagagatctatgcattactaataggagatgcgaaagattacaaatcaattttgtactaaccatgaaattaagtttttttatatacatatagtttatagcaacataacaaacctccttttataatttttgttttcttgtctttgtaaaatgatctatttcctatttcttaagtttttctccaaccggcgtgtaaaccgtcagtgacctcgtcgttaggaattaagaaggaaaaaaaaataatctattggtaatcgttatatggttttgcaagtaatcggtgacaaaaataaattcgtaaatttgttatgactatatcttccacttcttaaaaatgaacctatatatgttgtaaaattatgcggttatggtaaatagatttgacgttgtaagtaatttaaaatacacgaataaaaagaaaaaaaagtgtcttacttgatggtaaattgtgtccgtatgttctgaaaacgcggaacatgatggagattgtagacaagtcattttcatcaccagttatatcatctatccttcgaaaagcatcttctaatatatctttgatttcattttcaaaatgaaatgcgaggccaaggctaagaagcgattggatcaaaagcactttcctctttgatgtctcatcatcacctttggaagataggagcttcctaacttcaggcttgattatgtcaatctctcttgtaatagcgtctaactcctacagagtcgaaaatattttgcatgtcttaattacttaagtcttttttacgggcaaacttatatatttaagaaagaaacgaaaaagtaataatctttatattttatgtcatttatctacatagactgtagttaatatatatttctagtatattatattgtctcaccgaatcatcgatgggaacagagaggaagtaatcagtccattgagagtgagacaactttgtgaacgcaagactttcataatcgaactttgtttgggattccatagtgtttgagagagatagagagcgagagaaatagagtttagagagttaaagaagcagtgtgggaaaaactaaaatatatactaatgaaatagtgttttttagataaacaagtggataataaaatagggttaataattagaatattgaaaagtaaaatcaatttatatggagaaaaatgtagtcaactaaaaaaaattcttagattgggagtgcttacacaaaattaatatactttggaaaaagtatattagtgctttatataattcaatgtttaatatgaaagtataattgccacatcaactaacattgtatacttgattaaactgacaaagcatacattgtatcatcgtaactatgataatacacaacattttataaatggcaaaatgatttttatatctaggtttattccgaagctttgttaggaaaatacgatactttattcgcaacgaaaaactcgatcagtgtggaaaaaaggcgtgaaacctaaaaatgcataaattagttcatcataatcttgaagaccaatagaccatcaatggtaatctcgcacacacatcaacatactaatcctcatctgcatcacaaaaagacataagtaacaaattattcacttttgatccaaaaaaaaaacaaacaaattattcactaaggatggtcactcccacaccgatattgggtgatatatatttccattaatattacatcgttttatatttcttactagaattttcagagatttcaaacatttatatttaggaccctcaaacatctacgtcaaaatcaggccactatctctaccattcagccctcaagtagcatgctcagcatcactctctgatatcaattatttcgactcccaagttgatggtttgacacatgttggtcatctcgatgatcctcaaactcttgattcgacaaatcttggtcaatgatatcagaaccctaggtttgtaatatattaattatcgtgacgctcaaaccctttggttcatcataacttagtcatcagtcatcacgatcctagaactcttgattcgcaataatttagtcatcactccctcaaatagatggtttgggacatctctctctcaccacgactatcaatatgttatttgacacatctcgttcatcttaaccctcaaaccatgggttaagacatcatagtcatcatgacctatcacaatgacataatgatattagcataatgttacattttctcaattagtgtcaaaaccatatttaaatatatatacattcataatcgttgtatataatgtgtctaatataggaaaattagtaatattaaatatcatatataacgaaaatggaatttgtgaacaatatatatatgaaaatgatttcactggtcaattctcgtttttcattttctaactggcctattatttctccttaagaaggctaacatcatcatatatactatatgcatatacgtagtagagtcaatataaggtctgtatttttaacttcttatataactcatatttttttcatctagttggaacaccgtaaattttattctaaaataaaacaaaattcttacgggttcatttattaatcaaattgatacattttcttcccacacacatttttacagttagagtcatgtaagacttatcgattcctatgctagaaaaaaacgtgcgactataccaaattatatggagaaaaatatgtggtcaacttaaaaaagtattccctagtttagtggtgattaaatattaccaatactttagcaaaggatataatagtgctttataagtcattattaatagtataatagagtgatgccaaatcaattaacatacctactagataacgatgacaactcattttttattttattttcaattgaaacatgcattaacattagacagataaatgatatatttaacataatttacttaatgactcgaattgggaaatttttcttctaaaatacagattttaacatatagagtgatgttagatttagctctttaaaatcatcaacacgttggaaaacaaataagctattataccaatttatatggagactaatatcatgaacggtacttcgttatcactcgtgcccgtcaacagtgccattggatatatgatgtattacatatcatggtattatgtaaaatgatcgagatcaaatatcatggacattctataagtgcatcgaggtcagttagacttagtatcgtggagcatacttcttgaccaccttactgtcggctaaaatttatatgtaaatattctcttgatacctcataatgatgtgacgtacgattctatttatgatgttgcactgttatttgttagatacacagtcattattttcctttgatatggttgtgaattcctctaatatgattatgtttttcttatatgacttggtctgaggtaactgatttgaacaagctgctgttagatttatcaccaactttatagaagaaaagattctgccactatgagaaattggcaaataatatagagaaaaatgtagtcaatttaaaataattattcctttatgagtgcttacaaattaatgatattttggcaaaacaattattagtattttataagtcaatgtttattagcaaagtattgtaaagccacgtcaattaagattatctaaatcaagtagcatgttcattaccattagatggattaaaaatatatttaagtttattttgttgggttgtgcataacttccacttccaatattgttccattttaaaaagtataatatgcatatagtagaacatacatcacaattacctagagaaattgttcagaaatgaatatttattcaatacatttttaagaatatttcaacaggaaaacaaaaaaaattgcagtacgaatttcattggttaattagaaatatctccttttttgtcttcatctagaaggaatacctaaacttgatctgaaaataattattttttactttaattttaaaaaaaaattagaagtcaaactgaaaacatttgagtacaaagttttttatttagagtgatggtaaattttctcaagcaactatatcatagaagataatctgcggcttgtcagaaaaaataataataatctgccactatgccaaattaccgaattatatagagaaagaattagttagtattaagaaacttgttccttagataagtagtgcttacataatatcagtattggcagaaaaagagaattagtgacataatattaatattttttcaaaaagaatattagagttctaaaagtcattgtttaatagtatataaatcaattaacacgtgcattatcattagatagataaataatatatttaagcttgttttatgtggttatgcgtattatttcacttcgaacattgttccatttaaacgaaaatatgatatacatataagaaatacatcacaattacctaaggaaattttgggcatatttttaaaaactatttgttatttaatttttttttccaaaatttgtcatagacccttggtttttgcccatgctgccaccccctagagacgggcctggttctatggtataatagagagtaaacatttgatttatgcttcaaactccttctatttcctttcaaaaaggtaaacaatagctgatgtagttttacattcaactaaaaaaaaaaactacttcaagcgaaaaatattataacttggttttaaattttgttcatcgagcagtatgtggagggctcgtaggacgttggcttgattgttaagtgttgtgattgttggtcaaaaaaagatatagaaaaaaagtcttatcaaattagccaccagacgaaagtgaaatttacggtccgagaacatgcgtttaccacaaatggttgtagtcagggtgtcatatcataagaaccacaacatgaggatccatagtgatgtgaattgttgactttgcctggctacatggtttttttctgtctgaaaaaaaaaaggccaaggaaaaaacaaatgtatccaaaaccctataaattacaaagtagagaggaagaagaaatgcacaaatttcagaataacatatattcactaaatacttacatgagagattgaataagaaatggaaatgatattaatcactttgtgcttaactaccctccttgcacttctgctaaaatccatactcaaaagaaccgccacaaaaaactttaatctaccaccgtccccttggcgacttccggtgatcggaaacctccaccagctcagcctccatactcaccgatctcttcgttccctcagtctccgatatggaccactcatgctccttcattttggccgtacaccagtccttatagtctcctccgccgatgttgctcatgacgtcatgaagactcacgatcttgtttgtgccaaccgcccaaaaacaaaagtggtcgataaaattctgagtggtgggagagatgtggcttttgccccttatggtgaatattggagacaaatgaaggtagttgaaagaacaactagttttttttttcgcttttttctttgttgcgtaaatttttcctagaagaacattttattcataactatgtgttggtagttttgtcaccacaaaatgttttttgtaacaaaacattttgaatctacgttggatgcagagtatatgcatccagaatctactcaacaataaaatggtcaggtcgtatgagaagataagagaagaagagatcaaacgaatgattgaaaagctggaaaaagcgagttgttcttcttcaccctcaccggtaaatctaagccaaatcctaatgactttgacaaacgatataatatgtagagttgccttaggaagaaaatatagcggcaagaaagatggaattgatgtggagaatatagtaaggacatttgccgcactcttgggtgaatttcctgttggagaatacattcctagtttgtcgtggatcgataggatacgcggtctggatcataaaatggaggtagtagataaaaggtttgatgagtttctggaaagagtggtgaaagagcatgaagaggcagataaagagactagatccgacttggttgataagttactaacgatccaaagcgataagaccggacaattcgagcttgagaaaagtgccttaaaacttatcatatgggtaagtataaatactagttattaggcatgcttgtatttctttcatacgttgacgttttacatgtttttttccctcaggatatgtttttagcaggaacagcgacaactctatcatttcttgaatgggcaatgacagagctaatgagaaatccaaaggttatgaagaaactccaagaagagattcgttcaagttcaccacaagatttatttgtaacggagaaagaagctgagaaaatgaattatttacaagctgttatcaaggaagccttaaggttgcgtccaccagctccactattggttccacgagtacttagtgaagatgtcaagttaaagggatataatattcctgcaggcacacaggtttaaagctctataatttttctattttttatttataattttaaagaacatgttaaatcatcaatcaaattaattagtctgttcgttgattgaataataaaaagctaaaacgcaagaaatatgcgatcttttacatgtgtaaagcctaaattaggattagtttgtgtttcgaacatgatctacgtacaccggttataaaaaaaaaaaaaaaaaaaaaaacaagaaacaactattttaaatttatatcaaaactttttgtttcatataaaattaatctgataaatttgataaccatattataagaaatgaactttctatttcatcacatttggcttagcatgtacaattaatggagaactacatatatataaaaagggttttctgcaacaaaaaaacttaaaagtcattcattttagcaattttacccatcacttccgaaaaatacagaataattttatgaaatcaaaaataatatgtactatagctcttacacatatattgtaaacgtattcaatatcacatatatttgatttttaaatacctgaaagtagagttgaattccttgtattcaagacttcgatttgatatagtacttatcaaatttgtaaaaacttgacaatagaaaaaaatagttgtattgcatattgtttttgacttcataagattattctgcatttatcggagatagaaagtaaaattacaaaattgggtgatcttgaggtttttttacataaaaccaatttgtgtatatggtgattcaaatcaaataaagtagtatccggtaatttatggtcatttacatttcctcattttatatcgattaattaacaattttagttgagattaattacaaaaatattatgggaacacaggttatagtcaatgcttgggcaatccaacgagacactacaacatgggggacagatgcagaagagtttaagccagaaaggcatttagacacaaacttggattttcagggacaagatttcaaatttattccattcgggtcgggaaaaaggatatgtcctgggataggattcacatcggcattgatcggggtgacattggccaatatcgtgaaacggttcaactggagaatggatgtggaaccacaaagggttcaacatgacctaactgaagcaaccggtctcgttgttttccgaaaattccctcttatcgctattccatcttctgcttgattcctcgtgtcaacaacacttgtctctatctttggcttggttaatgaataaaacattgtataaaatttgtatggcttaatgattatgtcttgtgttgcatattcatatttgacattctctgctcgtctgatagtgtaaaaaaatgtttttatgtattcaaaatgataaatctctttttttttacatcacaagtaaacaagtactttattttatttttttattaatcgtagttatctatttaaaaatagtttaggaattattccaaaagattttcttatgaactacatcaaacaatcagctgatttacaaactttcaggtttcaggaaattttcaaaattttgtgtcacaaagcacaaaatcaagtgattaacctccaggcaacacaatggccgaagacagaagcagtaaaatacaagccttggatattgagagtaacatcgaaagacggtttgaggagatggagcaaaccctaataagaattcaacaagaagatactgctactaatgagtcctcccaatggagaccgcaaccaacagattggaatgcgagaaacatgactcctatcgaggtttccgcgatcttactgcatcaagaagacaatcatcatcatgatcaacaaactcaacaaggtagtagtaatacaataacaaacttctttgactggaaaccagattttgttttccgcacacaatgtgttatcaacgacgaagcctgcagattggtcctctacggcggaaacaacatcatttcaaaaggtttagtgaagcagttgaaactcaagacgctgaaaaaatatccatctgttagggttatggcaacgagaagagaggataaagtcgcagaggagacgtgtagagtccctgtctcaatcggagatttctataaggacaaagttacatgctatgtagtcaacatggaagaagaggaagatcaacttctctttggaggaccatggctttatcgcgttcaagctacacataatggacgagacgactcttgtatgattatatggaaccacaacatgattctattgtaacctcaagtgtagaacaaatgggtctttgacaccaagtaaatcatattcaagacacatatcacaaggtttggtgtgtttttattatagcatcctatagtgttgcatgttgcctaatacgcgcaaaaaatatattaagacatacctcaattcctgagatcaatttatatgatggcaagaccagttttcagataatccaagcaagagaaaggcagacgcaggactcggtccacttctagtgaagtcttcattagattactcttggttttctctctatctcttccctctgaccccatccctctgctcaccaccagcgatacattacatagccatggcacttcacaagcaaacaccagaccattcctctcattctctaataaaccctttttataggctttaccaactttccgtacatacttccccgttgttacaccttcatttgatctgtctatatcagagatgtctgcatcagagtgaaggttcaccaccagagttccatgctcatggtgaagtgttttgctcagagctttcataaacacagaactggaatcccacagactatggggaaagatgtctgctccatcataagcatccatgaagatcaagtcataagtattactttggttcctgagaatgaaatcctcagcttttgattcgtataaggagagtctctcatggatccctccccacatcacttggtcaataatttcaggagttggtaacacacgtttcccagttgctgtcatcacagagaatgcaggaaagcccattgctcgaaccgactctgagataacaagtgggtctagctcaactatgtcaacaacagcacctagaagacacatcaactaacataagaattacagatggaagttctaaatactgatatacatgtacattgaaagttcctaccaagaatgtgtttagctataaacaacggtaaacttcctccaccgtgaccgatacataacacacgcatttgtttgtccccaatagctacactcctcatatcaaatttagaagctgcaagagaagtcaatccaactgaaaccatactcttcagatctgtcaccaaaggaaaaagagttcagcttaataataacacagagaccaactaaaacaacaagagagtcatcatttaacccttttaaacttggaaacacaggactaagagagctttacaaagagaggaataaaagaggtgacactctcacatggaacagcaagacaatgaggctgttgcatataaaaaacagaacttggttgcaatgttctacaagcagccataactttcacagtgctttgtctagtatcatcgttaaaccgaagcgatcgccattgatatccaagtacattaaacctcccattcttctcctctgtatctcttggaataatctccatataccttttctctaaccatttctcagtttctccccatgaatctctactctacataaagacaaatcatctctcaaatcaaacaatctcaggttttaaaagattgattcatcacagatacttacagggagagaagaagggtgggcgacgacagaaacgacgccgtttcctttattggagacagctcgtgagactgtgtaaccaccgtcttgaggatcccaccattccggcgagtaaaaccagtctccttcgtcttttattacgacgtctcttccgcagaaatgtcgtacacatgacttgacgacgcttagtctttttccacgctgtgttgtcaacgagaaacgttgaattgagttcatctgagatgacccacgatttcaagatcgccggaaaattaaagggtctgataaaggttttgactttgcggcgtttctggttactgttgcgaaacccttgttagaggttagttaggcttcagggttttaattaaacggtcctatagagagttaagagttaagacttaaagagtgtcgcaagagtttttcacttggttaggtgaatttcacttttaaatgttgttaatatacaaatggtgttaatataagtaaatttagtttctaagaatttggcaagtctaaattcaaatgatatctaaaatatataattagttggaaataggttgtgcactctcccattagctcaatacgaatagagattgccccgctaattaaacctgtgaaattcgacgtcgatttccgaagaagaagaaaagaaaagcttgaacttaaagggggaaaaaagataaacttaaacaaaataaaaaattttatatatgatcaaccaaactatctataaaataaggatatttgacaaataagcagttaattaccttttcgtataaagaaaagaaagtttcatatcgatggattcattgacacatttgtagaagaagcattagagattgaccgcaactttcaaagcttttaatttattagctcgttcactgacgacctaacctctttttcacttgtaatcgccaagttaaaattaaataaacgagatttttcagtaaaataagacttgagttattactttttacaaaaataacatgtttaacaattttgatgtgttagttttcgtaacacgccaatagagaaaatatatgaatatgtgttcagtttttagggtttaaagttttgacggcttagtttccggaaaataaaatcatgccgacctttgtatttaacttttgttgtataatttttcagacaaaaacaaaactcatcaatatcttttcattttcccttagtctgttatttttttgtacttagagaaatgctatctttgccaaaaaaaaaaaaaaaaaaaaagagtaatgctatatgtaataaacagcttggccaaaagagtgtgtaataaacagagtttaaatagaaaaccttataatctctccgagaaaacatatcaaagctacaccaatcaccaatgtctccttagtaataataatcatacatatacaaaagcttatgcatgtgacgttagtttatcggatgggtaccataaccactgcaccgatcacgctatccattttagtgacaattacaacttttagcaaattccaacactcaaccgcgttatacaagttctgagaaaaaagaaaaaaatcgtccaacagaaataaacatttaataaacaaactcgtgattggaaaataaataaataaaaactcgtgatatcaccaaatttcatcggcaacgggcaaattgcaataaatcaaattaaaaatggttttgcagttttcacggtcaacctatacgccgaaactcggcaagaaaaacaccgacttgaccacttaaccacctctcccttaaatttattttttcatcattacacaactgcttcttcttttcttctttgtatgattattgttaatataagcatgattagttacgaaataatgtcacctcataataaattattagatgtctttattttgaagacttttgcttttgtttgcttctgtagaatctcttaaaaacgaatttcaacatcaaagaacaaaagagaagctctccaaaagctggcattatccttttcttcctttacctcctaatctttgcgcgttttttgttataaccacttttatataaacatgcaaacttattttttattagtattttgttaatcgaagaatgtcacataaatccgagttgtttttgctatttaaaatatctacaaatggtttaaggaaagcatctatcaatattaataagtcgtacataatacattaaatttaggcaatctcttacaactttcgtaacaatattaatggaatatcatatgtgctgtagatgattgggatgtatgagaaaagtaaacaaagtgaggccacaagacctttcggtgaagacatcttctttttttttttgcatagaatcaacttgattaatacgtcctaatttaggtgaaatatattcatacaactaatcacatgcatttcataataatatagaaaaccccattccttagacaaaagaaggtcaaaacgatatacaaaaatagttcaatcgaaaccaaaataaagcaaaatttatgaatacatgttaaaattatataaatcattctgaagtaactataatactaggttaatacttatgtttgtatatacaataagttgtttttctaaaaccgaaatcatgtcaaaccgaaccaaattgcaaagtttttgtaaacccaaaataccgaataaattacaccgaaaccaaaccgtaaaccggattgtcttcacctaaattacttatattataaatactacaaagagattatatgggaataggtaaaggataattaatttgataattataatttttgaaagaacaaattttgagaaaaaaaaaaaagataggcttgagagctgtgaatgagctgtctctctttcatttatattccaacctctttctccttccacacaaacataacacaaaacctccttctcttcctcatatctccatatcccaaaaatactcttataacattgtattattatacaatctacatttcccattttaccctcgcttctccttccaattctcaccccattgccacttcactcagatgtcttgtacactgacatgaagaagacgattcaaatcctcctcttcttcttcttcctcatcaatctcaccaacgctctctcaatctcctctgacggcggcgttctctccgataacgaagtccgtcacattcaacgccgtcaattactcgaattcgccgaacgaagcgtcaaaatcaccgttgatccttctctaaacttcgagaatccgagattgcgaaatgcttatatagctctacaagcttggaaacaagcgattctctctgatccaaacaatttcacttcgaattggatcggatccaatgtctgtaactacaccggagttttctgttctccggcgcttgataatcggaagattcgtaccgtcgccggaatcgatctcaatcacgcagatatcgctggttatttacctgaagagcttggtttgttatcagatcttgctttgtttcatgttaattcaaaccggttttgtggtactgtaccacaccggtttaaccggcttaagcttttattcgagcttgatcttagtaacaaccggttcgctgggaagtttccgacggttgtcttgcaattaccgtcgttgaagtttttagatctccggtttaatgaatttgaaggaactgtaccgaaagagctttttagtaaagatcttgacgcgattttcataaaccataaccggttccggtttgaattaccggagaattttggtgattcgccggtttcggttattgttttggcgaataaccggttccatggttgtgtaccatcgagcttggtggagatgaagaatcttaacgagatcatcttcatgaacaatggtcttaattcttgtttaccgtctgatatcggacggttaaagaacgtgacggtgtttgacgtcagttttaatgaacttgttgggccgttaccggagagtgttggtgagatggtttcggtggagcagcttaatgtggcgcataatatgttgtcggggaagattccggcgagtatttgtcagttaccgaagcttgagaatttcacttatagttacaatttctttaccggagaagcgcctgtgtgtttgaggttgccggagtttgatgatcggagaaattgtttgccgggaagacctgctcagaggtctccagggcaatgtaaagcgtttttgtctcgtccgccggtaaattgtggatcgtttagttgtggccgttctgtgtcgcctcgtcctccggttgtaacgccgttaccaccgccttctttgccatctccgcctccacctgcgccaattttctcaacacctcctacgcttacttccccaccacctccgtcaccgcctccgcctgtttattctccccctcctccaccgccaccacctcctccggtatattctcctccaccaccaccgcccccaccgcctcctccgccagtatattctcctccaccaccaccaccgcccccaccgcctcctccgccagtatattctccgccaccaccatcgccgcctccaccgcctccgccagtctactctcccccaccaccaccaccgcctccacctcctccgccggtatactctcctccgcctccgccagtatactcttctccacctcctccgccttctccagcaccaactccagtttattgcacccgtccaccacccccaccacctcactcgccgccaccaccacaattttctcctccaccacctgaaccttactactacagctcaccaccaccaccgcattcttcaccgccgccgcattcacctccaccaccacattcacctcccccaccgatttatccatatctgtctccaccgcccccaccaacaccagtttcttctccaccacccactccggtctattcccctcctcccccacctccttgtatagaaccaccaccacctccaccgtgtatagagtattcacctcctcctcctccaccagtcgttcattatagctctccgcctccaccgccagtctactacagctctccgccacctccaccagtctattacagctctccacctccgccaccgccggttcattacagctctccgccaccaccagaagtccattaccattctccgcctccatctccagtacactacagctctccaccaccgccaccatcagctccatgtgaagaatctcctccaccagcaccggtagttcaccacagtccaccaccgcccatggttcaccacagcccaccacctccagtgatccaccaaagcccaccaccgccatctcctgaatatgaaggaccactaccaccggtcatcggcgtatcatacgcatctcctccaccaccgccgttctattgattcttttggaaaacacgagactgaaacgattgacgtgacacgaacagatcgaaacactatacgacgtcgttgtcaattcttacaaaaagaaaaaaaaaaagaaattataagaaaaagaaatggctgattaaagagttgtttgttgtatagaggatgagtctcttttgtgttttctattaattttatttttttccctcttttatttggatttcttagcacattattcgctttagattttgtattttatatatgcgaagagcttaggctatacattttatttgttcattatcaatatccttctttaattttacaaaaaaattaaccatttccaaattggtgtaaacaaacaaatatgcttacaaaatttaaaagaagtaagatttgggtccaaagtaagttttgtctgaatataaagttggaaacagttgcaaatgaaagtgactcgtcgaagccttgttggagaaaaagagcaaaatacaatttactcctaaaagaaggaagcaacttggaacggctccgttttgattcgatgacagaacaaaagtagatgtaaagatgtatgtcacaatcgcgaatttacgcggaaaataaagtgttaggaaaatagttgggaccaaaccaaactaagaaaataaactttaataactaatagcatgggaaataaaaaacctcgatttgcgctaaatatgttgttttactttgaaaatggaatcgattgataaaaatgaaaaattgtagaatcataaaatgtttataaaggtatattgaattacgtgaatatttgttgaattcgttttatatataaattacaaagaaaaaatttaaacacattatcttcattcacattatggtgtgtgaatattgaccacattgccctgattattcacaatccgatcttccttataacgaccaaaatgtaatagaccacattttgatacgacacctcttttaagatcaagggcagtaagacgtcgaaggaagaatccgcaatgctttgacattcatggtgaaactggtttgcctccttggacagccgttaaggatatgtaatacactttgactctggtccaaagagattaagatttggagatctatagtaactaacaacaatccttatagcacgtatgacgttccacaaagagattaagatttggagatctatagatacgcatgcatatacaaggcgtgcatgccccctcccgcaagagatatcataccccgtatgattatcacatcgtgtcacatactcacatccatccaaagcacgatatagtcggttgactaagatttccttataatatctctcatttacatttgcatccaaaataaggttatgtcatgtgagtatttaatacatctcaacgcattatattatgtacggacttaactatatggttttacatacttttaactaataataaaaagcggtaaaagtatttgaactgaaagaatgaacattaatcaatatggaaataattagaaaaggtacaaaaaattgcggtaagagataacaaaaaaagaatatgaagagttccacttttagtaccactatatcttaccgtttgtttcattagttatttaaatgttatgtcttcatacagtcatactgatggtgtagggttaccaatcgaaaccattagctttagctttatgcatgacggacaagtgggcttaaggtttgggctgaataaatagaaggtcaataatcgagaaagaattatcaaaattgggccaacaacagataaaattcacgtatgattgtctttaaactctcgctaagaactaatgataatcactttccgcaaggtcatccatcctgaaactactctaatccaaacacgtttaactgtagaattttcttaaaacatttgatcgaaaaaataaatacactttggtaacataaatggccaaatcaatattgttttaaatttttctgcatataagaccatattcctgaaattgaggtattacaatatattttaagctagtactaaattactagcttaaaaatcggaaaattacaaaacttcattacatttttgttaattaaaggcttccacctgaatcctttataattgcataaaattttcatgcaacaattcacaaagaaattttttcacacgtatttaatgttagaaggaatgagcaatttctcatttaaaaaatttccggaatgaaacaaaaaagagtactagtacaaccgatttgcatatacagtttataaaataatttacaataaaaaaatagaaatatttttataaaaccctagatgtttttgagaactttttacttacgcgcgcaaacaaaaattaaaatttacgaatttgaaagaatggagactaagtaaatttggcatatataagaagatattggaattggaccatatatggagaacaaacggcatgagctaccaccaagagtaaaagaagaaccacattccattgatatatcactctatgagggttgcgttatacttccgcagaatcaacgtactatctatcacatctaaaagtcaaatcttactttgatttttgtgctttgatatttcatagaaaaataacaaaatatcctaaaaatgcaagaagaaagaagaaattaattcaaacatggatcacatgcttctatcactatatcaatttgtattcgatcaacttcaagtaaatgattttatttgtttatatatactctatgttagaggttcagtttcttttcatttgttttttaaaccccggaccgaatgttgattattacgttatagacgtaaagatcagctatgaatattggatttggttctttagtttgcatgtcttcctataatttgcttgtaagaagcgtttacatatctaaaagttgaaaaaagtcaagtgacaagtcatgtaaaagttgtttccattataaaaatgaaataattgagaagtcatcaggaactaattaagttaagacattcaagaagagacaaattaacaaccaaataggcttgttttttttaccatttcttcctcttttcaacaaaatagagttttcatttccctcctctctatgtttagttgccatgcatgatatcatctagctatccatactttaaaacaagaacgttcttctttaagactttaactaattttcccatacttaatagatgatatttaaccccaataatattattattaacaatatagtaagtagagattatgacttcttttattattattaacaccctcatatttagttacatgtgagcttgaaacaacacaaggatcaaaatccgttcggaaacaaagtaggtgggtacataaaaactcccaaagactaaggcctaaaatattagaagtccaatttcttcttttcacatatcttgaattgtgagaaatcaaatagcttcaaactaacatgtatcaaatgtttttttctatacagaaatcgtagtattgaaatttgttatgccaccaaacttaatacgtgcctataaatccaaacgtccctcattcatacccaagatagatatttcatttttgctgcagcaaatcctccaagatatacatttgtgtccattatgtacaagaatcttccgtattatctgtttgcatttacccaaatgtagcatgttcaataaatggtaatgctgactgatgctattacaaaaattgtttgacgacaaaaaaaagaaggaaaaataaaaataaagatggaatttcctctttgctaatttgcttctatgagatttggatttgaacgcaacattctacataagatatgatttgccacaactaattttgatccgattttttgaaagttttctaaaaatataactatgatttaacatttcctgtttatattttatattaaagtttttatcattagtttattcttttttaatgttttggttaaatttatcattgttttacttgaaagttggaaactatagcgtcgaatggagacagaaaacttaacggcgggaaagcaaaaaataatcatacgaatttggcgacaaaacaagattgtaacttgtaagaataaaattaactttttatcaaaaagacaaaataaactgttaaaaaaggaagaaaaatggaaagatgatcttcattattgaatattctcacaaattaggaaacataaataaataaaagagaagaaaaaaaaaattcacaatttatacactacgcatgccatacacaacacatatataaagaaagaaagtgttttaaaagagagcaaactcagaagaaacaacaaaacctgaaatcattcattttcttcttcttcacaattttctctctgatcgtttttgggtttctcatttataagtaaaacctctaataagaaacatttttcacatcaccagatccgatcttgagcttttgcaccagcaaaaaaaaaacaggttctcttctatctttgcttctacctttcttgatctatcagatttggtaacatgcatgtgagtactactacttgttaataataatcatacataagaatctttcgattcacaaatgtttcttgggaaaataaaagtggggattcgagttttgtattttcatccgttttctggaatccaaacactaaatttcttcttgcaaaccccaaaatgttaaattagtttttcaaaagatttgaggcagagagggaccagtcaatactcacttttcctttctttttttctcactgtctttgctttctgctaattatctaacttttccaacagattagacgtaactttaacataatttaaaccttaatttatgggtgattaaggtagatatatgtagttttttagtaataacctatgctagacttccaggtacatgattcttctctatgcttcatttataagttttctttccttttcagtttttacttacataacaaaattcaattaagtttttttttttttataacataaaagcttattttattgatcggaacaacaaccccaggggccagggcatgcttgtgaagtgttgatgatgagcttaggattagaataattaccactacaaattttttatcttatttctcttataattcaatatttattctaattaaaatatttttagggaatttgagttttttacaaaaaaagctgttgtttagtttttagaaactaaaataataatttggaatttatctaaattctgcttcatcaccatcattatgttaaattagttctttttttctttgtcgccggtttttaaactcttgttaatttcgaagaatttatctttttaataactaactagtacatcgactgagctatttacaaatgtcaaattcgattccattctttaacatagaaaatagttttttcatatcaaatttcagctgatcctttgcttttttttgttgtatcattttctaattaaattgtttgagaagtaaccactaaccacgggtctcataaagtggacttgtgaagctccaaaaatcaagttcgcttttctcaatttctggtataaaaaggaaataaaaagcaaaaagtgtatgaatagcattaacaatttgctcacttgtataaagattcgttagtccaatagcgtccgtacacgtttcatttagtttgcaatttgtatacattcatcccccaaaacaatctctaaggatttgtttccttttttatctcttctttaagctttcgtttctctctcaattataaagtttcttcgccacttcttagttttattattgatatctctgttcaaaaagattcttccttttctattggagttcaataattttaagtttgatatttttgtcttatggttatacaatttcattcaaattatataatggagatttcgttgacgtttatgtgagtaacatcaataaaagcatgccttacaaaggttttttgttaggtaaacttgcactccacgtattctttgttatgttctacttaacaaaaaaaaagatacataacaaattctttctgttgagaaacgaattaagtgtgaattaattaagagaataaaacacgtatgtttctcatgttatacatgatttctctcatctcatctaatgcaagtgctttaattttcatggtttcttgttttaggttctttgttctactgaaggaagacaactaaacgctactggagtgtctttcttgtgtttagtccggtcatctattcattaccaacaatctcccaaggaccgagaggttccagagactgacaaatctccttgttccattcgttcgagagaacaaaaatctctttttctttattagagaaaggaagaacattattaagaaaaatctagatacatatataactagcctattagattattagaagagtaaaagtcggtgtctataagtattaaacagtattttttgccaaggatctatatatgatcttccaatgtcatgaagaagagagagtctgctagatttaaggacttatggaaaccggtacaagcattgacaacactggctatgaaggaatcaagaacggttcatggtttatccagttccgtaatggctgcaatccatggatggctagatatgtgtacggtctaatattcctcttggcaaatctgcttgcttgggccttgcgtgattatggccgaggcgccttgaccgaaatgagaagtatggttacctaagtctctaggatttcttacaatatttttttcagaaaattgattgattataagtttattcattgttgcagaattcaagaattgtaaagaaggtggagactgtttagggacggaaggagttttacgagttagcttcggatgttttgtatcctttttttcttttaatcagtcaaatactacaaactattttcatgccttcagagagatgttttctttaactatttctctagttgttctatttcattatgtttctttcaaccgttgggacatcaaagacgcattcatcgagagataaatggcattcaggatggtggtttgctaagcttttcatgttgcttggcttaaccatcttcccctttttgttgccttcttccattattcagttttacggtaagattaaggctaaccaccgtcttcggttcatcgtttttcgatatcaaacttcagttagcatgacaaaatggctttttctttgctttcttggcaggggagattgcccattttggtgcagggtacgttttattttctaatcctacttcagaaactatgtgatggttgtatctcggaagcttattatttttttttttatagggtctttctcctaattcagctgattagtatcattagtttcattacatggctcaatgaatgtttccaagcacaaaaagatgcagaaagatggtgagaccccatgtgactgttccttaagtaactgggaaaacatacaaaatgctttgtgttttctcataaagttttatttatatgttgcagccatgtccatgtaatgctactagcgactactgcgtacaccgtgtgcatattaggggttattttgatgtacatttggtatgtgcctgaaccatcatgccttctcaacatatttttcatcacatggactttgttcctcatccaactcatgacaagtatctctctccaccccaaagtgagtaaaaaaattaagatgtgcatttaaatagtattcttccctcacatgtgaatagtgatttttgaaaaatgctcttcttgttgcatttcaatagataaatgctggattcttgactccagcgcttatggggctttacgttgtgtttatctgctggtgcgccattcgaaggcaagtttcatctgaatatcgagcaacttgagagtagtagtctctatttataggttcaagaagtaatagctttcaactctacaacattttgttttgcagtgagcctgtaggagaaacttgcaacagaaaagcagaaggttctagtagaacagactggcttaccatcatagtacaaatctcaaacctttccaagaatattttcatgacctttcggatattttgagattgtaaagaaagtactaaaaaggatattgtgcagagctttgttgttgcactgcttgcaatggtaatagcgacattctcgacgggagtagattcacaatgttttcaggtttgttatctatgagctctgccaactttgttgcaaaacttcaaaagagacacttgactaatagctagtgagtggtcttttacagtttagaaaagatgagaatcatgaggaagatgcaattccttacggatacggattctttcattttgtgtttgctactggagcaatgtactttgcaatgctacttgttggttggaacattcaccattccatgaaaaagtaagttcttgatgaacaagtactaccattcatataccaaaaagaaacaactaagctaggtttttgtgttaggtggacgattgacgttgggtggacaagtacttgggtaaggattgtaaacgaatggctcgcggttggcgtttacagtaagttaacaataaaaactctctattacctgtttttgatacagtttgtaatgtttgaataaatgttgttgcagtttggatgttggtggctccaatggtactgaaaagtagacaaacaacatgagagatcaccacagagagatttttgtcacctctcaattcatctccgcattgtggatcttgtcgaaaaatagaatagaagatttaagattgaggaactgtgtgaaatcaatatatatttgtacttagattgtttaggatcaaagaaagatggatacaaatatagctatacactagtaatactgtccctaaagagttctctaatcatgaagcgtgtacacattataacacatacatctctctaatacatagttttaatataaagcaattgggtgcgaaacactgaaaatttcatttatacacaaacgagcgttgagagttgagagaggaagagaaagttcagcaaattttagtctcataaaagcaattctaaattaccttattcaattttgacaagactttatggtcaatgtgtaaactgttatacaaaatcatacaacacaggaggagcctgaagattttctgaaggacaaacaacaaaatggaaatggaatatagaaacaccaaagaataaatatcaaacctatttcaaatcattttgatgcttataaaaaatacagtaatctaacactctcacaaacccaattcttcttcaggttcatggcccgtaccttccctcgttcaccctatttaacccatgtttgtattcgatttaatacctccttatagtcttatactacaccttagaacacaaacgcaatcctcatgcataacatagctctcgtgagctaatattctcgctctttcttacccaaatgggtttcctcctgattggaaagaaggtgggttcaaaggaactgcagcagcaaacgagcttccaaaattttgatatgtttgttgagtgtcatatgacgtgtttatgtcgccaattgggtttacattgctgcaaaaaaaaaaaaaaaacgactataactttagaaatggttctggaaaggtaaaataagaagcagaggtttcgctaccaactatcattgagagaccaaaggtagatcacgtttatagcaatcagtaatcagtactaatgaattaaaggaatcaaaaggccatacctaggtggcatgcttcctggtatttgagaaggcatgtaccctgaaaaatgggagcaaatagtttatcaaacactcataagataagagtaaacagatcattctatagcagataataacaaagtaaaaagtaatggcatgctttacttggtggcattgcagatggatgggctgagccttgagaaggtatattgaattgattgtgtactccttgagaaggcatcatgcctgaaggaggtaatgcaccttgcagaggagccatggaagggaacatattttcctgtatggttttcacatcacttaacacataatccaccagtcgaacattttataaatactttggtaagtcaagttgttcaattgcagatgttgaccaagtaatgtgaaagggtttcaccaattaacacataagctaagttttcgtacgtatttcattaagacctaaagccaacatattctcagctgccaagtagctatttcgctcaaagctaatttccaaaacatgcttgctttcacacaaagttttgattctggctaagtcaaatgagctagaggacataccgtttgtgtttgtgatggcggcccagggctgaagtcaaaagggttcattgacttgcctggctgcggaacattctgatacggctgttgcaggaaatagataatcattcacaagaaagtaaccggctgtgatgtaattgatgctcaaattcattaaggattcagaaatctatcagagaaaccataccacggggttattatactgctgcatgccatagtgcatagcatgaggtggaccagcttgccatccaggcactggtgcatggtatgatgggtagtttacagcgaataaatcctgcatacaggttagcatgtcatcacaatcccacacatggtaagatatagtgatgggagagaccaaatggctaaaataaattgaataccgcaggtaattctgatcttcccgaaggtttaacttcagaagactgcaggccaccagaagggactccttgaagaggttgcaatgacggtgcactcattgacctctgtacattagatgcaagtgctgtgttccatggctgtaacaaaaatccgagaaggataaccatataacaattttgacgcagaattttatgcaattgttttcatagataatgtaatgaagtgcccacctgttcactcgaatgctcattctgaaagggtgcaaagatttgtgacgtggaatgaccaagattcacaggtccgttagatggtgtagacgcctgacctggcacagaagaagtcactgccaactgggagagaagtgaatccagtgtgtttccactgggtggtggttgcgatacatttaaactaggggcactgggtgcagcatcgaaagatgcccagttatcattagatgaagttgttggctgtggagcaggctgagatgtggtcgatagtggtgcttgaattgcaacagatggagcaggagtttcaaaatcagtatcaaaatcaatcaggcttaaagcagtctccagcttcacttctggtggcttctcatttgtggacattaaactactcaatgatgtacctgactgaaataacacacaacagaaaacatcaacatttacttacctccctaagaatttagatggtattaccaacgaatgcatgtgctacaacaacattatataagcagagcatcaatggttcttatatactttacatccttcatgcactctgaaagagatgaagccaaaacctttgcatgtgctgaagcatcggtatttctactgacagggggttttggaggctctcccacacgaagaggaataacactgtcacccaaaatttccctaacaggtcgagctacaggagggctagctgaacccaagtcttttacttgctcaggtgactgggagccctcttctgatgtttttctacccccaaacctatcctctctgcgccaatcattcaggatctcaggacgagcagggctttttctgttattaacagcattcctactacccgtctcgaaccctggacttctcccaccaggacttgatctgtcgccgtaacgacggtcatatccatcttcataaggtggactccgagaaccactagaactacgtgtctcacttggagacttatcatcattcttctcattcgtataccttttatttacatacacatgtctgatgaagtcccttaaccgctcaacattactgacagattaaaaaaacacaatcaatcaatgtaacacatccatctccacaacaagaagacagatttgtaactgtaataccttccgtcaggcactgattgccgctgttgatccaatcctttaaaataaatatccttagcatgctgttacaaaaacaaaagatactaaatcacaaatgccaagagaaaaaactcatcaaaagaagagagatttagcgtgtttacctgatttccaccttctttcaaagcagtaacttcttgtgaggtaaatttcgccattgatatcgatttaacacgatgtgtaaactcacgactgttcaaaaatacatatgcatatctcaaacaacatttccaatgaacaccatctacacaagaatatgagaagataaagtacactcactgtattccactgcagttggtacaaacaaaagtccagaaagtagtgcaaacatattgtggtccctaagtaaatgatatcgaagaagaaacgttaacgttaagttctctcaaaatttttatcggaaatgatcaaatgaagagcaaaaaaaaacttacaaggctgttacagtttatacacctcttattctcaggaagtttaagaagactcctaataatcttctcgttcttctcgtcttctttaactcgacccgccattttcgattccaaaacactaagctagaaactacacaaactttagaactcaggatcagttttctgaatcaataatggcgaaatcaagttctgaacaatacgaattacagatttgttcgcttagtctaacgtaaacacgagatttgacaacaaattctagttcggttcacagagttgagatcgatcatgactaataacatacagatccagaaactataggagatttagaagagaaacggagcaaagtagacgaacctgagacgaatcttcaacgacgatcgaatttctggagattttgattcttctttgttgaatcagtgtttgcagagagagagagagagagactttgtacagctaagaatggtctgtggggttaaaagagtagagagagagatttgaggaaggagatggacggaaataattgacggcgttagatttttgtggaatctaagtttgtgaccggtgttgacgacgtcgacggctgtggtctgtctcgttgacggcaaaatgagacaatagtcgacttacttatctacgctatttgcctatttataattttataattattttttcttttaaacaaataaaaaaatattagtaaactaaaacaaaatttaatacatagtaggtagatatttttttatattgatttgtattacgaaaaatagattaattagtatttaactaaaaataaatgatttgagtaaacattaagaaccttttttatacgattttaggtaaataagattaatttgattaaaaatcgaatgaagacacgtccaaatttatgatatttgtttattagttcatttaatatgtttaatagatattttgtaaatgaagatctttgtttttattaagccatatgaatttaaaatttggataattaaatttaattttaaatagttaaaaatttgatataaaatttaagtcgaattgtaagatgatttatacaattgtggggtattctatattataattgattattatagaagacaacgactaagtgttacttataattttttaatttatttttatcacataattgggtagttttaaaaaaactcaaaacaaatttgataactgaaaatatttaaaaatatcgatgagaagtagttaccaaattttgaaataaacaaatatttttgaaggtagttgtgaacttgtgatctcgcaacaatcattacgagatccagtgtcgacgaacaaagactaactcaatctcttcaccccactgaatctcctcacctataatctccaggatggagaatagattagaaaaatattattcaagattttgtgcactatttaatactttggagattgatgatgtgattttgtattcgtggttcatataattttagtttttactttttcaccgattatgaaaattttaaaccaaaaactcacatatatgcgaatccttatctagttagacatatatattgtctaaagtaatattgtaaaccgcatatgtgttaattgcgatttaatattgttgtaaggaataagccatttgttagattggttattataattagtttccaattggctattaattcaggattttcactattaaataaatcatcttaaaatcttcttattttaatgctgattttcgaacatgttttttttttttctgtcaaataaaaataatttaaaatcaattacatggactcaaccgctcgaatcaaatggaccgagacaaaggcaacaaaagtgactttacggtctaaagaaacctctgaagcagaaagagtgtttcacttaccatctctatctccgtcgctgatgactgtatcttcttcaccactatgatcatcatcaaaactttgtctcatcgcatctttttccccaaattctcacaaaccttctcttctcaattccaccaaaccctcagattctcaatctccgatcgtcggaaattctcagcgatggccggagctggcgtcgatgatttcgttaaaggaaatgtttttccgaatggtgtcgctctcatcactctcgatcgaaccaaagctctcaacgccatgaatttaggtgacccttttgaatttttgtttcttgggtttgataaagtaagaaccttttagtgtttactgaattcaaaatcatttttttaaaaggaattggctttgaaatagttggatgtaacaaatgattgctaggctcagatataattataagaagcttcattatgatgttacagatatggatataaagtataaaagctttcttgatgaatgggaatctgatccgagagtgaaatgtgttatcgttgaaggaagcacatctagggccttttgtgcaggtaattgcaagttttgttctttttatgtggaagctatgttatgtagattgtttcatttaaattgaaattgtttgttcgtttgggaagtgtgttttggagtgactatctatatgaatggtgtgcagggatggatattaaaggagttgctgcagaaatccaaaaggacaaaaacacacctcttgtgcaaaaggtttataaaataaattatgctttgtcaaacttcaaaagatgatttagcattatttcaaacttgttaagattaaatggtgtactaatttgatgaacatgcatgtgtgtgatctctttcaatttggtctttccaagagctctctagaatggtttgatttatacttccttacgtttgtctcttgaatggtttgctcttagcatttttaagagtatagcctccaaaatgtagttttttaacttcgatattttgcttccttaggtatttacagcagagtatacactgatatgtgcaattgctgcgtacaaaaagccatatatttcattgatggatggtataacaatgggatttggtcttggtctttctggacatggtcgctaccgtgtgataacagaggtacaaaaacaaaagaaaccttgttctgtacttattatgtaggtaataattggtattactctcttgactctctttcatattttttgttctattccagaggacggttcttgccatgccagaaaatggaattggcttgttccctgatgtcgggttttcatatatagcagctcatagccctggaggaggatctgttggtatgttcatatccaaatcctttacactggctagagttttacctttttgaaaagaataaggaaatggtcaacaacaccagttaaaggtcattcctagttggttgctatctaaaaatgctcataatctggtgaaaatgatgattgtttgtttaagtactttttaagttttgtatagagcggaattcatgtagatggaagcctgtttattgtttttagaagcgaaagtaaagattactggagaccttcaacgatatgtaactactactgtggtataaatatctgcaggtgcttatcttggtttgactggtaaaaggatctccgcgccatcagacgcactgttcgttggtcttgggacgcattatgtaccatctgaaaagctagcttcattaaaggaagccattttgtcagctaacctgtacgcaattttcaatctccttttctcaatcctgacaatttcatgtgcatatctctcgtaaactcatacatgttggtgatgcagttctgaggatcctaatcaagacatccaagcaactttatcaaaatacagcagcaatcctgaatctgaggcccatctcaaatcacttttgcctcacatagagtcagcctttagctcaaataagtctattaaggaaacaatagaagagctcaaaaagtaccagcaaagcactgagtcttcaggtattatttttcatgaatgttgtaatgctcatagatctcaaaactatgctttaagaatctaagtgaaactaaaatcgctgacttacctttgacaatgtttggatacagttgtagaatgggctaatgaggcactcaaaggtttggaaaaaggagcaccattttctctttacctaacacaaaagtatttctccaatgttgcatgtgccaagagtaaacccgaaaacgaattagcaacagtgagttttttcaactcttagaacttcattatagttcttcgtttcaggagacaaagaagactattaaccttacatattaacctttcttcgtgaagcttaatggcgtaatgaaaactgagtatcgcattgcactaagatctgccctgcgtggtgattttgctgaaggtgttagagcagttttgattgacaaggatcaggtttgttcattgccactcaaatcgttagctctctagctcaattaaaacaaaagtgatcctctctgataaaaatcttgtgcagaatccaaaatggaacccgacaagcattgaagaggtagacgaaaacgaagtggaagctctgtttaaaccattaagtccagaagtggaagagttaaaagtctgattctcattttgctttctctgtttaagaactgtccaccaaagtattctatgaataaaaacaaatctttagccatgtgttgaagaagcttgttactgtataacctattcaataaattggcactttttttgaaccgttgcagattatctttaaaaacatgagccattgtattacaaagcattgaaacgtgattgcagacaaaaaaaaaaagatgaaatcaagaagaagcagagttgtcatatgtagatccgacgtgatggataacgaatccatagatcttgcgtttcagccgctcgatcttgtccattgttgtgatcttgttttcttggttcgacgagacccggtccagccactcgttaacttgtttcagctgagacaaaactgcagctatggaactaccgtctaaagatcgttttgctgcgtttttgttgtctaacgattcttccacgaactcaatgaaccacacttgcatttcagattgtagattcaccgcaaacttagccgtttccttcaagccatctaagtctgtccacatcccaacaatattgtctgaaaacaaccacaaagatagaaacttacttttctgcatttttgttatgtatgttagtttgtaatggaaatatgtttcaatttcaagaacaaacctgtcttgctagaaggtctaggagagagacgagtaggcattgatttcttcagagacgatggtgattcatggcttttcactagtgacaccacctcgaggttagtagctaatgcagcttcaacccaaagagagattgggttttgttgatcagatgacaagctgaaactgttttctgaagctatcttactgtatttcatgacatcttcatagattttcaaaaactcgttgatgattcgcaatggattccccaccttggaagccgaagaaagttcggagaatttactgaaatattcaaccagatgaaagcttaaacaagactgattaccacagttttaaattttgtatgagatggtataagagttttaccttaaacatcttatgatgcactcattggcattagcttcctccaatgctctagctgcagctttagcagcaaagtctcttcttttcatagcctcctggaaaattgatatataatccataattcgatatgagaatactctctagtctaaatgtagcttaaacacaaaacactatttcgaacctttccaagttttgcaagttcatcagagatactatccagtggaacactaccatccgtccatttccgttcatgataagtgataccaagtccttcaaaggctgagacttcttctaataaactactctctgatgaacacgacttcgctttctcttcacacactgaagaagaagaaccactctttctcctatttgcatcactgagacgcctcgtcatagcagcctacaacaattgtacattatcaatttcaatccatcacacataacaactcaaatttcattcaccagaacactaatttgttcatcaaactaaacaaactttctatatctcactgagtaacaaagtttttagtacctgagtacgcaaaattgcttggtgatcaggcttattcttagcactaccatcacctgctaatggttcctcccaatttttccgattaccattcttagcagacgaaccgactaaagcttcagaaacttttgagattccggctgcaatcaccgccatcttcttcttccctgaagaatctccaaccattggagtcatctttaaaccactagaaagtcttcttcccggtgaaatcgacattcttcttccactaggagaaggattcatcttccttccattaggtgatggctgtctataccttgacggcacaacaatcgatggctctctagctactttcctattctcctcacgcgccgccgctaagcttggcacaacgcattttgacggcaccggagacgcagatctcctccctttaccagaaaccacaggtgacggatctctctccaccgttacagctacagcaccagaacagttcttcttccctgatgagactgatcgtttagaagatgctggtgacgagaatctctgtggagtcgttttcggtttctgatttcgaatttggttacgattctcttcgttttggttcaccggagcaagcgcttgtctcacattaggtttcacatcactgtcaccgtcgtcgtcaattcttctattgttcaagtaaacagcgattggatctaacgagtactcagaatcagaaactggctgaataacgaaatctcgtttagatccgttagatactcttgcaatcaacggctctggttttccgacgaaggcatgacgaccagcgacgggacgaattcctgcggcacgtgggactggagtagcgaattccaagcgttcgaggtatatgaattgacctaactggagacggttactgaggattagatctgtgtcgcgttcggagagagagacgtaagtggaattgagagaatctgagatttggacgtagaagccttggttaggccatagatcggagccggcgagagctgggacgattccggtgacttgtaagattgcagatctgtgatctccggtggggcgagtgccggagttcatgcattgaaggagttttaagagaattccgggagcaagagaagccatttttgtttgagctttgtgagtttgagaaacacagagaagaagaagaagaatataggagaagtttattgaagaagctttggccgttacaagattcaaaatttgaaatcaaactttattttggtttttaactttttatccagaattagtacctacggtaacggtttaatatcggagttttttttaacataagtaaacaataataaagaaaaaaatattaatatttaagtaaacattttctaaaataatatgactggaaaaaaacactttaaaatgttgtttattgaaaaaggataattaacttgtaatcttatgtgttattaatgtttctccatttcctatatatagtttattttaacacatatcttatactttcacagattttatgtctttaatgatataaaagaacaccattaaaataaaaataaatataataagatatattagtagaaaagaaaaattaaatgagaaaatttaagatttaatagtaaaataataaagtaccataggtgattatttctctaaattgtgattaaatgtttagatatacaaaaaaaaagttaagataatacataatgtttagatattgacatctgtattaagataaaaaaaaatctgtgctaatgttttaaagaaaatattctctatataacttccatataaacaaattatggttgtatgtctaaaattttgtactcttattttctatttaaagtgttaggtttctgaaaaggttttgtggtgagaagattcttaaacaagtagtatattttatttagaataagttcgcgatgggttgttggtcaaagcggtcacgacgaaatattcctgaaaagtagagtgacgaaataagtttttttttgttaattaaataagagttatgtgttttctatgttcttacgatactatatacgtgttttctattttgaaaatttttctagcaattcaattgaagtcgagttgaagatttggatgcattgtgaaaattgtgttaaagatgtcaaaaaagctatgtccaaatttgaaggtaaacgtatattatagtccacatttatgataacactatatcgatctcattcatggtagttggtacaatagcttaacacttatacttagaattattttttttgaatccatatttatatttcatatttttggtgtaattgacactatataaaattatatgtatggttttactatctcaagttttacattatagttgcaaaattttaaaaaattttgttttatatattctttgtttttaaaatttgtgtgtttagtggagtttatatgcaaaaatataatattatgatgtgaacatttatcacacagctttggaaatttatattgtttgaactgatcatatatattattgaggataaccattttaaatgatatgtgattgctaggagttgaagcatgtaaaacagatatggaaaatcaaaaagttatggttactggtaattttaatttggaaaaattattgaaaaatctcaagaaaaaaactggtaaaaaggcagaaatcttgacgatgaatgagaaagttgagaaagaagatgttgttcaaaatgaagctaatgaacaagagacagttacaaagaagaatgaagaaggtgatatagtcgacaaaaaagatgagactcctgaagtagaagaaaaaattgacaaacctgaaacaaggtagatcacttctaacttaataatttttattacatttgttcaagtgtactttcttgagatggtacatgtgttttaactctcttttttttttttttgtagtacaagaaaacttgaaatacatatagcatttctaagtgagaagtatgaggcagacatcggaaaagttatttctaaattcgaaggtatataataaaaataatactattattcatatatatttgaaatatgtgttattttaatcatttatattgaatggtgtatgaataggggtcaaaacatgtaaggtcgatgtagaaaacaaaaaagttgtcatcactggcgattttgatgaagagaaattgtggaaagaacttgaggaaaaaatgcgtaaaaggatagtcaaaatggaaaaggaaaaaaaggacgatgaacctataacgaaagatgaagaaaatgaaattgatagaggtgtttatatgaaccctagtagtgatgatgagaaagaaatggctagatggatgatgtttagtgatgaaaatcctaatgcatgttctatttcgtaattgaacattgtcgaaactagtatctggaaagcttggcatagtaatagatcgactttatctattggacatattttgatactatataattgagaaattaataagtttggtttcaatattttttttagagctgaatggataaattgatatcatcttttcagttaattattttaatggataaaatcatattactccatattataaaataatctatttttttttcgatgttacgtcctagaattcgattttagagagaaactcaaaagatcaatgtttttctgccatcgtaggtaaggtaacaaaaccttccttgtattaaaaagttattaaaaaaatgcaaataaaccttatatagagtaatagtgatgatgtatttaaaccatggacatattgatttgtgtctaacatatgtatgacaagtacttggacaactaagttttttagaatgtaacgctttgttgagatatcaatccaagtttcaactagaccagtctcctctctaggggtatgcaaatgcaatataagtctttgctatgagtccaaacatcaattttaaaattctttctaatataaaaggagcctaatttttatttttttttgaagtttagtaagagactttattttcttattggttttgtcgagagtcctcccataaattgagaatgacctgagttagacgaagactgactcacataaaaatcccgttcaactgaaactcatattagtatgagataatttgggatataacccaaaacctaatccgtgcagccttcacacttttgatataaataccatgtatcgataatctatggttaactttacattttactttatatatgtttagacctttgatccacaaaaatttgcaaaattcaccaacgattaaacaatatactcttttaactttaatgcttcgagaatccgttggattgtcggctcaccggaactcttaattctttccagtacatggcaaaagtatcatcaacatatggcttttgttgttcctttaaagcaagttgctataaaaaatcgacaaaagaatgtgaagatatcttaaacttattgataatttgcaagagaatctcatatattcatcccctcctgaacgatcactacttttcaaacaagcaacttagcacgtcttcaaaattatttgtaagtgccacacacgaacccaaatggagaagataatttaattattacacaaaacgatcttatataaagggttacattgttgaactatatcataattaacaaacagaaaagcaacaacaaaaggagattaaaagaggagctacgggtaagatgatatccttaagaatgaaagggcttggtcattgcctagtttatgtcgtggtctttagtgtcattgcggctatagtgacagcatacgactcaccctcttcaacaccacaatacacttccccttatccacctaaaaactattctccttatctctcagaatcacccccacccccaccaccacaatatagaagacaagagcctaagtacacaccacacccagagccaaatgtctacgattccccgacacctctaccatattactttccttttcctaaactagacatcaagtctccaccaccaccatccgtctacaccttctcaccacctcaactatattactccccttctcctaaggtagagtacaaatctccgccgccaccatacgtttatagctctctgccacctctaacatattattctccttctccgaaggtaatctacaactctccaccaccaccatacatctacagctccccaccacctcccccttactactccccttctcctaaggttgactacaaatctccaccaccaccatatgtctacagctctccaccacctcctccatactactccccttctcctaaggtagagtacaaatctccaccaccaccatacgtctacagttttccaccacctcctccatactactccccttctcctaaggttggatacaaatctccaccagcaccatatgtctacagctctccaccacctcccccatactactccccttctcctaaggttaactacaaatctccaccaccaccgtacgtctacagctctccaccacctcccccgtactccccttctcctaaggttgaattcaaatctccaccaccaccatacatctacaactctcccccacctccctcatactactctccttctcctaagattgactataagtctccaccaccaccatatgtttacagctctccaccacctccaacatattattctccttcaccaagggtagactataagtctccaccaccaccatacgtatacaactcacttccacctccatatgtatacaactcaccaccacctccaccgtactattctccatctccaacggtaaactacaaatctccaccaccaccatacgtatacaactcaccaccacctccaccttactactctccttttcctaaggtagagtacaaatctccaccgccaccatacatctataactccccaccacctccaccatactattctccttctccgaagataacctacaaatctccaccaccaccatacatctacaagacaccttattattgactcttgaatggcttcgtaaacatgtaacatgattgcaatcatgtattttccttatttgtgtctttattctttattgttgtacttttgttatcttcttaagatttcatttcaccaataaatctttgctatattgaaaatgcacttactgtatacttccaactgagttgaaatatataatattttttattttgctatctgattacgggccattcttaaatcttaataggccttttgtatatcaatggcatttagaagagaaatgttaaaattctttggatacatatcagtatttttggtgatacaatttgtatgcattttctgtaatttaaatcttagaatacaaacctttagatagaacttataattccttccctaacaaaatatacacgaactttaaccaatagacgaaatctcatatcaatcctaaatgtttgaacttcgtttgtggtccagtgatcctactacttcttcatctttcttaacgaatctaaattgatacaacacaattcgaatattttactaagaaacaaaattgggcattgagtaaaaaaagttcatatgttatttacacaatatgtacaaaggcccaaaaggcccaatccttagagtcttcttcaattacaaaagattccttgaagagttctaaaagaaaacaagaaaaactctaaatgacatcacattcttctgatttctacttcttggtccgtccggttcatgaatctgaccgaaaccgcaaactaatcagaaatagagtggtcgtgccagcaaagcagcatggagacacatcgtcgaagtatgtaaagtcgggttcgttgctgtttggccatcagtaaacaccgatctccgaacctggttttccggttcggtttagttggaagagaagaattggacataaaaagacacatttcaagagagcaaaaaatcgatggtgttttggaattttgggtagatgtgaaaaagaaggaattgagaatgagagaaaaagtgatgtgagaatatttatagaagagagcgtgtgatgtcggacgcggctgctacgtggtcctacctacgtacgtttatgttgtttgtttcttcttctagattctttcttcatctttctgcgaatattcctcatccttttctttatccaacacgttttttattcattgtttatatgacgttattgcccatcttttttacacaaaatttcaagtagatttaattttattttttacttttttttttattttttatttttactgtccatctacactcttaacacacacaaaaaaaaaactgcatagtgaaaggatagagactagagagtgatgaagcagtgacaaatatttcatcatgtatataaaagtgaaaatgcgcaaaacgatgcaaatttctaattctaaatctcatattctcatttttctatagtattcgtaattagatctttgataataatattaattattattatttgttagtcaaattacaaatataagaatttccaaatgtatgaaattatacttggtattatatatgaaattattaattttattagattttagtcaatattttcaacgaatataccaaatatatttttatacatttggaaattcttaaacatttagtttgactgaaaaaataataataattaacatttattattaaacatgctaatgctagcatagttttcacttttcatcaaacatctaattattagtattacttttgttagcgtctaattagtaatattatataattttgactaatcgaattatcgaatgaatattattctatataagaaaaagtaaagaaaagatgagaagtacttgacgctagtggatccaatcttattatgtataaaagatctagaatcaaatcgatcgttacatacttatttgactcttctaccttacggagcgcagactttggaccatataatatacgtataacaattgtcttttcctatttaatttggctccatcaatagcactctctactttttctccatcagtgcatgcattagatcttctagaaaataatatcacaagagacatattcagtgtcttttttttgtattttcttcatatttatggttatggtttccttctaagcgaagtgataaaaatagaactagaaaagattctgacaaaaaaactactaggaactgcgaaaggccactagagagttcaaagcgtgtagccgtgttgccacgtcggtctcttaaactattgtctgaacgtagtactaacttttgtcctaccttatccagtcgtccatgaggactcgaaagcgacgtctccatttgactacaaattaacctatccactaaaccggattccaaacctcataaccaaccggtccaacccaaattcataccgaactatatagtattcggagaagcaaagagcccactttaaagctgtctttaacaataagacaaaaaaaatgttttggctttatacgttctttgttttttcccctagattatattcattgtagtatttgtatgttctcccataacattgaaccaaattcattgtaatgtacatggaacagaatccaaaccaataattgtacttctgtaatttctatatggtttaaactgaaaccaaatttcacttctaacgtactaatttggtgagatttttcttacaccaatggaatcgtcatttacacatataacttaaaaggctactaaggttttgtatcatagtatttgttgagcagtttctctgtatattctccaaacgtcaagacttcatcagagagacataactcttcatgtattgtaacttcttttgggaatgtaagcttctggtccctaaaacaaccacattcacatttttcgttgctattaacttttgtataacgaaaaaatcgtcacaaatttatcaatgttatcatcatttcaaaagttatctacttatcttagtttcagaataataccagtcaggttgcatgaacaacgcgaatgtcgatcgctctagaccacgcgcctcttctccttgtggcgcctgaacacaaaaacaagaaattataggttgtgttggtgcaaagttccgaaactaagtacaatagaatgtaaccatccgcgaaggtatgaagaatattacccgaacacaatgaggtgtagcacaaagataaccactagacagaattgatgttgtctcgcctatttggtatgctatttcatcttccccatacacaacctaatcaaaatgcaaaggaagcaattcataagaaaattattcataagcaaagcagactggacaaagtattcataacagaataaatttggtttcactgttaggtatcaaataggatccatttatacatactatgcacagtcatcaggaaggatcagtacagtaccttaacgatctgacctgatcgtgtttgtatgtataagccagaagcaggatctgggcaaggtacttcaactgaatctctagaaaatattgctcgagtaagacctgtggatatacatacaaagatacacttaatcagcatatcacagacgctaaatgtatttgcataccatcaaaacaaaaggagccaactaaactttaagtgaacaacaacaactcaggaaagcaagagagaagaaaactggacacctgtgagtgaaccatggtctgtatgccatccacaccaagatgagatggaatcgttgtcatgcgtagagctgatggaagacaatatgtcaatatatcaggcaatcccaaatgaaagttctactattaaagaagcatatctaacatgtgttcaacaagtattagccgctagggactgaactacaaagtaaataagcagagtaagagcttgtgaagggccggcatctaattttacctctcttgtgcagggaaataataaagcagccgtcctttgtgacaccgagagccaagtagtatcttttcaagattttgcttttcatgttgttttataccctttgacactgcaaatcatgggttgttaagggctttagaaaatagacaatgatgtatccattaaattttctagcaccatgacattttgtgtccgatcaaagagaataaacagtaatagccagattcatgttgatacacttcatcggtaatgcaaactccacagaccatgcaagcatccaacaaagagactggtttcagagagtaagaaaactaactattcgtcattttaagagtaataattaggctactctacatatagccacatagtatccctgcgaatgtgctatgtgcatcatgctttcttacactcgattccaaaactatctttgcaagcatcttaaggacacctaatcaaggatgttcaaagataaattcacgaacagcaatgaaactacttaccatattgatcacagtggtaagctaccattagcccaacttcgaacatcagtttaccaagagctttgaaagctgtaatgtataaaagtaatactcagttataaactggaggaaaaattgtaaataagagggcatcacgaaaaaagctagggtagcaaacgcaagcagataccagaaattgtcaaattctatggcacttttaagtaggaagtcatgcgatccttgtatttattctcaaaggtgagacaccaacaaattatatccgactaggaaaactaacaacatccaaaagtaaagcaagtatcacctagttacctccttcaagttccggtaaagaattccttggccatatatttgatccacaatacgatggatacctacatcgtgaaacaaatatgaaggtgaaataacgaatatagagaagagaagcagtctgttacacttaacgcagaccagaacacatataaacgtaacaccgtatttcgaagtaacctacactagagtatctgggaaatacaagaattcagttacgccgtcaatatttcaacacattacaagaatgctacataagccaaagacttaacaaacaaacaaaaaaaaggtattggtattacttaccgctgtatttcatatgaattactcgtaggtacatcttgtagaggattagcatagtaagaacccttcagcatgtctgcacaaacaacaccagaactttcaatttagtactttcatcagagcaggcaagagatatgatacagtcctacacaaaaaatacatttaaacttcatggtatagttcaataagtccatgtaagttatctagtaataagtaaccaagccaaacaagatgttaaaagaaaagctttatttagccaactatgaaatcttgtttcaattctgaagcaacactacagcaataaaacaaagtctacataagctcaccaagcttcccggattcaagtttctccttgccatgactccaaccaaaattatacctaagaaagaaacaaagcaaaagagtaagaatttgaaaatgaaaaaagaagatcataagtaacaaagaatcgtattttcacctactatgaggatcttcaagctccctcttcacctcttcaggaagaccagctaacctttacataggaatcaaacaatccttgagaaccatattgaaaaaaaatcaaatctatcaactgaatcaatcagctatacctaaagatcatttacctaggtgcaagctgaagtagattctgtcttaaagcagaatatccaggaacctaaaaacacaaaaagtcgaaatctttattcccaaacacataaaggtgacaactttcataaatcttgatgagaaaagaactatataatatcaaatttacaataaagttatgtactttaatacatatttgacagattaagaacaaagcaacaaactttttggttaaaggaagtgattcatacatctttaacagagaggattccaagtccattaggtccaaatccttcttcaatccttgcagacaaatctatgttgctctcctgtaataaggaagagtttagaagacgaaacagaacacagagaagacaaataagaagaaggacttggctcaatctgaccttgagctctgagtaggatatggtgaccgtggaaacagtaggaacggtggagtccgacgagagagacatgtggaggttggttatcagatgagagaaagaatggaaggaagacgtcggtaggcgagaaccggtgaaagagaaacgaaatcggcggcagaccggagttcttagaactggaagcaattgactatttttatttattttagtttgctttcttactttacaggtaggttttatttttaaccaaaaaaacaatattattccaatcaaaaatattacacatcagctttccaatttgccacgtcgtatctccagcttgtcacatcaccattttccaaaagtgaaattaaggagacttcaagagttttacaagagtcttaagtaagtgataagtcttaacaatattctgcttcttcttgtctacaaagacatcatcctcaaaacaagaccttaaacctatgagtgtatgataaaagacaagagtaaatgaatatagagacgaattgagcttaagagtgaagaccataaaacttaaactgaattactcaaggtgatcacccaagtaaataataatttacattagtcatccggaaactttatttacagggaatatccattagtccctaaacctacatgattcgctgagaatgatattaaaaccaaagaaataattgaaaagaaggccagcaccagtaaagaaacccatgattaagtttaattatcattctcaaaatgtaaagaagattagaaaatagagaaatagttagatttacaaaacaaaaaactgataaatcaaaaaaggaaacaataacctttcttaagttttgttttttttgatcttcaatatcagtaatcatatgtggcaagttttcctctcctatttcccctaagtgatacaaagacttaaatccattgttttgtgcatatcaacacctcaacatataatgagtcagacaactaaatatatgttgtcaaacaacctacccataacaataatatctggactaacaaataatgtattcggacaaagcacttatacatatcaaattacatcatgctaaacaaatggattcacatgggtatgtttattgcacatatacttgattacaaatagaagattttcatataagtcgtcgtgttaagttccaacaaagccaactccggagatgagaaaagcagtggcttgcatgaagagatacaaatataaaaatgcatttccaaatgcaaagtcgtagcaagcacaacataatatgtatatacccatcatcatctccttcaaatttactctgcaacaaaacattttctttcactcattagtatccagaaatattgttttatttatccctcattctaacctttttacacacaaaaaaaaaaagagttttgctagtctattgcgaatatatcactatatcagaagttcataacacatgactgaataatcacaaatatatattttgaataatgtaaaatagattaaaaaacaaatatcattttaagaatttaaaatttaacaaataacaaatgctattaactagtttgagtcttctaagtccggattacgtcaaattttatgttaagtaattgatattctttcttttcaaatgtttcaattttttttttcactttttttttttttgtcaaagatgtttcaattttctttctttcgtttaatttgattaatttaccttttcggaagtcgtccattctggggaagtagcttagtgttaagagtatctcctaatttctctgtgacaacccattcattgactcttcctccttcaaataagccaatcaaagttcccttggtccggtgcatagccattacattttcgaataagacccaaaaaatcacgaggtagaatgatctgccaataatagtaaaaatgtaagtaaggtaatatatagagtgaataaatgaggtcgttataggatgtatagtactaaccttggagtggcaatggcactcaagagggtgatgacagaaggaacatatatagttgaccagttcggtatatttacttcgggaaggaagacacttgtaggaagaatgacacagtaaaagaaataagtgaagaagtggactacgatcttccgtaggaaaaagaagctgtagatcacgtaaaacttcttccaaatcttcactctctgcttatcataagtttttaattagtttatggttactatatatatatcatacgcatcttatgtgcgtttagatataaaataaaatttcaatgtcacttggttcaaccaacctgaattctggattaatatgagttaattataagtgatttataagatttttttcaaggtagttattgataaatgagccaaaaacaaatgtcgttatgtattttgtttggttgccaatggttagaaacttgcccctcttaaaattgtcgctaaggatgagccaaacaaaaatgtagttggcacgtgggaaatgtgtgtctgaaaatgaaatatagtaaatggtaaaaagaccttattgtgaataatttccatcgtcattttcctaataagattggctggaccacaagaccaccgatgctgttggaatcgaaaggccttaaattggcttggtagctcgcttttaacctacaaccacaattattcttgttttacaatgattataagcatttgtatttagatagccacatgcaaatgcacataatatatggttgtggttagcctttgccgttacattttaccaaaaaagaaacactagaaatcgaaactaatttgtttattatatgttaacttatacaacaagaaatccatataaattacaaattaaaagaaaaggactaaaattacctcgaggtcattgacgaagataaatttccaaccgagaagaccaacacgaacggccaagtccatgtcctctaccgtcgtccggtccttccatcctccagcttcttccatcgccaccattctccatactcccgcagttcctgcatatatacataaaatcccataatatgaatttttaatcttttgttaattaatgtaatgctttatttaccattaaagccaaagaaagcatgtcttgtggatccagattgttgctctgccatgaaatggtagttcagagacatctcttgcatcctcgtcattaagcatgtgttagcgtttactgcatgaccgaatcatatatatgacgaaccacattcacattaagtttttatctcaaaactatttaatgtgcaaggagcatagctagttaactaaatatcttctatatacttgattggttgatcatttgccattttgttactttcattatcaattatttttagaatgttacaaatcggaaatggagttgaatctaacattttaaataatggacatgaaattatctatttattaccactcgagatttggtttaaataccctagaagtttttatgtagtagttatatatatatatgtacataccaaatctccatcgagcttggacaagagcgacctcagggttgtggataagaaaggggatagcgcgttggaggtaatcgggctcgggctggaaatcagcatcaaagatggcaagatattggcactgcttgacgtaactgtgcctcatgccgtgcttaagagctccagccttgtagccatttctgttctctcgcctctcataatttatatttatgtcttttgatgcccattttgtacattccatgctcaccagttcctgaaatttaattactaattatgtataaaatcaactcaataatgttcagcaatgtcataagtcatgttattggtatgtttcttattttaaattaagttttattagcgaactctgtccattgagagtttattaagaacggaccatgattgctggatcggtggaatcatctaaaacttgaacaattagacggtccgatggccatgttagtctgcacgcagcacctatagataattcaaagacctgccgagtcaaaactattatgttagtataacaacgtaatattaagtagctctcacacatttaagaagtttgaaaaatcaaagaaacaacttatatgctagttgacatatgagacaacagctactgtggagtgaccagtgttatttgcactaaaagacggaagtatgaaaggaacattatgatcacgtgtgggttttcttttagtaattgtgtacaagttatatgttgttattaacttgacttgtcaattatatatataaagaataatattataaagagatagggagagatcaaaatcaaacttgaacctctcgttcgttgtacattgggatttgaacaaggaccatcggataattttgatgaccaagctccatatcctcctgcattgcctcccatttgtagactttctctggttttcggttaaacaacttgacatagagtactacaaggttcatgtaaacactctcaacgaaaactaagagcgagatgatcaaacacataaccactatacacttgaacaatggaactatgaatacattccttgtttctctccacatagtgctcatgtttatccccacaccatccacggatgctttaagagtttctccatggaacttctcataatggtggacaaaagaataaaaagttatcccagtgaaaaaaaattgtaagaaatatattatatatacattgtaatgaaaaaacagagagcgagagatatagagaaagaaagacgatgtcttaccattaccgagaggaggttaagagataaatcgtgtagagaaaggagaggcttcagaagcaaaaacatgtcttttcttttttgttcagtgactgattttttagttgtactgccttctttctttttctttctttgttttatagctattttttttattagaatattacaacgtggaactaattagcctaatacctaagtaactaacaatgatgcagaagaaaaaacaagcttgtgtaccaagacattatataaaattatttttcctatatagacacctattgctgccggtaattcgactaatatagtgatgagattcatgagaagactctttggtatgagttttttttagcaaactcatctggggtaaaatatatagtctaaagctcaagttaaagtggccacacacacacgactttgttcgaaatagaattgaacctggaacgtctacaaatttttgtccttagatacctcatctcaatgtcgtccttagattcgtgtaggcctaggccgatttaaaaaatatggcttttgtaatattttaatttttaaataatcatatcatatttcacttctattgttctatacttctataaatcttcaatatatgaccatattttgcttatgcaatatttctatttcgaaaatcctgtatactttgtagttgctctatgaaaccaattaaatcccttcgaaaaaataaaaaatataacgtgggaatagtataatatctaaagtaactaacaaagattcacaacgttggcattatctgtcgtacaagtgcgtgtgttgctgttttcacttgaaccacacgaaatggcaagaacaaaaccatcataattaaccaaaacaatacaaaacattggtaaatgacaatatatatttatttagataaatgacaaatgttaaagctgttacttaaaaaaaaaaagataccagtgaaatattggatgaaaatatcacataatattattaaaatatatatatactcttacattaaaatatgggcacacaaaaaaaaaaaaaaacaataaaccagtcctacatctttgttccatatactcttagtctcttacattaaaaatatgggcttctgtaacttttatttttcaataaaatcgacaaactggcaatcacaaaaaaaaaggtaataatgacttacacatttaccaactatttatgacaacaaacaaacaaaaacaagggtcccctaaacatggagacactttatttaggtcacaatgattttaaaccatgatgaaacacaaagacgaaatagagaatcttataactcataggtcatgccaaccttgagaagcttcgacctaggaatcgcaagtgctttgtctccttcccgacaattcttcttcaagaaattgtaagcatggttcactataaacttcttaaacaaagaagactctttctctgccgtaatctcggtctctcccattagataaaccatccctttctctctcgctttctccaccaactctgtttgatcctccacggattgaacctgcacgacccttcccgacctaatcttgtctgacgaagatgaatgggcggacccgatccgccccgatgaagggacataattagacgaaggcacaactgttgtctcagcatttggttcctcttctttgtccgtctcgtccacctcccctcctcctccagacatgaagtgctcgtgatgaatgaattcctttaagtaataaacaaaatgacgctcgaactcatcaggctcctcaatgtcttccttgtaaccatatctcacaacacacctaaacatcccggaatcctttggccccacgtaacggaaaaagaaccgctctgatgacgtcactcggttcacgggaagtgtcttgatcgatatcaatacaaacaccgagtggacggacgaaagatttgatatatagtgagagaacaatggagttataccgttaacaagctccgtgtagaaaagaccaatccctggaacccggtttacgtcaggacttgtagccatttgtatagcattttcacgagagatcttctccctcagctcgtaccggtatttgaggacatgaacatattgccaaatcgccatcatcgccatcaaaacgaccgttatcgtaagtggtaaatacccaccgcttgtaaacttgtacatgaccgaagataggtataacatctctatggagccaaagacgaccaagaagatagcaatccacactatattggtcttccagataaccaacattatgagagtcaccattaaggttgtgatgaccatgacggttacaacggcgatcccataagcgtgaccaatcttctcagtagttctaaaggcaagggtaacagcgatgcatgcaagcatgagcaagtagttgatctccgggatatagacttgtccctcgtacttagccgaggtgtgaaccaccttcactcgagggaaacaacccatacgtagagattgcgagatgactgaaaaggcgcccgatatcatagcttggctcgcgatgattgatgctgccaccgctaccacaaatgttggccagtataacggatctgttaaaaagcattatgtgttatatcacattattgcacgtcatttttttcatttttattttgaaatgatagtacttgagttaaactaaccagggattgagtcgtagaaagtatttgacacattgtaagtatgtttagttaggtacgcagcctgcccgcaatatatcgttactaaagcaggatatgcgacacatgagaaactaatctgcgacatttattgtttgcaaaattgtgttagtgaattaataataaaattatttatatgtgtgtgtgtttaatctactctagggaatgtaaaaaatataacctgtacagctcgaacactgaagtgacctagatcagcaaacattgcctccgtccctagttcaacaaattacatttcaatcataaaaagtaaatttgataattaagacacacacaaaaaaatgtttatggaatatatgtggcctctcaccagtgatgcagaggaaaacacctccgagggaaatccaaccctgtctaccagttcttctaaagtagtaaatgatatagagtggattaagtgcctttaagacggtaatgtcatgcttgaacagattaaagagaccaattccgatcagaaatgtgaaccatacgaggatgatcggggcgaatgagaatccaactttatcggtgccaaaccgctgaaatgcgaatagaacaatcaagattgcaaccgaaacacccaccaccgtgtctgcacatttagcaatcaaatgccattagattatgtttacgtacgttacattgttgcatatattaaattagtttgaatttgttgagtttactttggccgagagatttgattccacttactgctgaaagtactggaccaaataaaatgaaacaaaacaacaacaaatttgttagttcgaatgttatcaaatacaaatgtttctagagagaagttcagctagaaaattgtttggacctatgactgtcttttagcatgtgcaattgtaacacttgaacagagtcccaatttaaaagtttaaatatgcatataaatttaagtctataattctgaaaaagaaaaagtctaacacatcaaatataccattataacaaaaactttcacaatgtctacaaataataagttaatttgtgacaacccctggtaatacctcaaggtctatagtatttttaagatgattggttagttacctgagatggaaggagtaaggattccatcaccaatgaccatggaagttcccataatagtgactaggaagagaatgatcttagcgaatttagagttctcgagcttctctttgatcatatgggctcttctgagctgtgtggttggaagttcaagtgtatagttggagagttctacatcttctggttcttggtttggaattagtcccattttcgcataccgacatatcagtgagtacaatgcaaatgttcctcctgcgtttaaatattgtacataagtaacttttctaattccttgacaaaaaagtaacttttctaattaattaatcaacaaaaaacaaacatgtatgttatttttcggggtaataagttttattggtttgtttacacacaatgaactacatatctttaaacaaattttcatttaattaaatcttcagtctcttttatgccaactttttatatttgtcattggacctttcataaacactacatggatatgacaactcttttccatacgaaaatatatcaccagatcaatctcatagttatagtattttaaacatatatataaaataataacacttcaaagtttattaaaaatataaattgagaattttattattatggttgaaacttttaaatataatataaaatacaaaataaatcctttgatttttaatatttcaaatcatagaaacaatctgatataagaatcaaagtgacaaaaagctatgtttacataattaaattatttcatatttagttataccacatatatatgttgaatgttttaaaatcatacctaaacattgatatatcttaattactgaaatatccagtaattaagtttatatatatatatatatatatatatatatatataaaaggctttccagtagttgttcacaaacaaaataaatgaatcatattgcaatcatttatatggttatgtatgaataactttgccatgattactaatgaaaaatactataatatcaaagaaaaaaaaagactataactctgacttgtgcattttgtagacaaacaaaatttcttctaactttttctggacccacaagttttattatttttatcaaagaattttttctttttgaagaaaacttgttcttcttaatattagataaaataaacttctcactttctcaactttttttcttctattaatgtaaccagtcagaggctcagagccatggagtgtacttttaaggactcaagacttgtttttacgtttattggaccacgtgaatcgcgtcactcgatatcaaatgatgcgatttatataaaatgatcaacaatcaacatgcgacatcgtacaaaattgttcttcgggaggacgtgcgtcacataataaaaagtcaacagtaataactacgtttattaattaatgtagctatacgaaaagacaaaaataaaacattaaaaaaaaagaacttcatcatagatctaataaattctaatgtggatccaaaagaagggcgaccatcttgtgtgtatttctcttgtttgctttaagttatagcatttctataatacattttcatcaattttaatgctagtatatgataagtctacaatttaattattccatcaacccttgttcataattgactcattacttaggaaataagtgaggttgtttgttcattttcttttaatacacgaattatattatttatataaacaaacaaataaagatcaaaagcaaaaaaagggtaccttcaccgttatcgttagcctgaagaacaatgaaaacgtatttgaggagcgctacgagagtaatagtgtagattatgagcgagagaacaccaacgacatcatctttgtcattgatgccatcagtgaaagtacttgcatacacatataatggcgatgtcccgatatctccatacaccactcctaggctctgaaatgccaaactcatcgttgttctccagctcatctatttcacacatcattattcacgatcaccaaatcttatattaatgatcatcttcttatcaaacaagagagatttagatacacaccaatgagcgacgcccggtatttgttggagtttgtccggcctctatgatgaaagagtcgggtcgatatagttttccccatgatttctgataaataaccaaatattcaaccacaacaacaacaaaaaaaagttttcagaaatgtgactttaatgactatataaacacaataatttgtacaaacatatggttgagaatgataagtacactttccaatctagtattactacaataactacttcattcactcttttgtatattatcatgattcatgacatctaaatgtgtttccaagctggcggctactgattttttctaagtagcaagaaaataacttatatttgtaactcgactaatacctctttcgaaaaagaaaaaataatagaacttaagtaaacaattttcctaaagattgactcttttgaactctatataaaaattaatcacaaaaaaaataaaatagaactaaattaaatacatgttattttacttaaatatgcacaatattaacttttagaagtagatagaattgaagaaagattagcgataatatctgaaaaatggattaaaactaagtcatacctttttttcattcaacttgttctcatggttattaacttcatcaccatctatttgatgttcctcaccatccattttttgctgtgttttttttttttttttttttgtgttgtgatattgtgacaattgagagagatgggctaattagatgcgtttttaactcttcttttgccagtggcttttataggcgtaatagtaagctgacttgtggttaaacaaacaaccaaaaaactcaacaagtttgtggaatagagttttttaatgtggtagggacgcgtctcaaacacgtattgccggctgttgaaacttttaaactattcaatctacatacaatttcaatgctaaatgttttgggaaattaatgaactagctaaagagtaggaatattcattggttagtacgtagaacatcttccgaatcttttttccgacgtatagtctgagaatgattacaaaactaatagatttatgaagtagatatcctgaagaattctaaaggttagtctacagtatttagattaaaatgaagtaaaaactctcttttaattgtaattcattttggttgaacaaatatttttatacaaaaaagtttggtattatgggcaaagtaaactaatgatggtacttttgaaacaaaaacttaatagtttgatattttagagtatttctcaaaaataaaaatgtatcctgaatatttccaaaacattagtctgcaattgactataagttttcgataggattgtctatttaagatatctggacaaaacaatattggtaagggtggataacggataatttgaattttgaaaataattacacaacattctcaaacaaatacaggacgattgggtaacatgacgagttggtggaaaattctaccagttaaaacatagaatggaccatcaaagtctggatatgtggtttaagtatttgaaattcaagacattcaaatatgtctgtgaacggctacatgtgctggtcataccggtgcgggttctttctggaccttcatcaaccgtatttaggtcaccattcaaacaattagatgagtttttgtcattgtgtgcattagtgagtttttacttaatttaaaataaaataatgtatgctttatgagagggttcatacatatccaatatttttacgtattaaataaatgatgtaaaatactctatttttttatgttttttaaacaaaagaaaaaaaacaaaaataacaaaagatcatataattttatttgagaaaaatatattatttgggtttttattgtactcgctttgtattgatagacttgtttcgtcgattttgtaccaattagctaatcttgttctacttgcggctaatgagtcgattgttttgcatcgtctattctattgtctcttgcaaatagtcactcttcaaacatctctatcgactcttttctcgagtcaatggctcctcaccaattgtattgttacctctctaatttatctatataaacaaatacgtattattgagggttatttatttattagcattattaagggttaattaaacttgtatatttctcttttgtcagctttgctagttcaatgaattgttataccaaatatattccctttctctacaaatgtttcaactgtactaatcttctatatacaagtatacaacagtatttaagttcatagagaatgaatatattgacttactagcttacattatttgattataatatattttagaaattttcagaataagtgaataacaatgttatatgacgcatatctagcttttgcaaaccagaaaggaagataccgcatgatttatcttcgatagcaaaatttcaccaagttttcaataattaacttttgcgatcaaatcactaatggggtcatggagatattagaatgtaagcttttgacttatctaactcactctttttctctcttttattatttcaaactcaaaacatcaaagtttgacatagtgcttgaaactatcaagtccaacagcgaaataaggaaaatacatacatatagttcacaatgccccatcatttagcaatatttcgtcgatgcatagcatatgatttttcacacgaagccattacattagcctactgcaagaactcccttgggtcagcgacacggccggttaaagccgaggctgcagcagtgtaaggagacgctaagtaaatttgcccttctttgtgtcccatccgaccggggaagttcctgtttgtcgttgagacacacacctgtaacaaacattttaaaacacgtctttgttagtctcactttcaagaataggtgaagtgcagataattggataagtagggtaagtaatgggtacgtacttgaggttcattcaagcgagcgtaggtgtctgctgggccaccaaggcaagcaccacagctagggctggctggtgtgtcacagccagcttcttcaaagatctgcgcacatgtctttccacctgctccaggtaccgggagagcatacacatccatccacacctgataagatgaccagatagatacaatgcatttggtatttgtattctttgattaaaccacttgagatagtaacaatgtcgaaatgtagagctaaccttctgagtagccgggacaaggaaagttggaactttgacctttcttccctgataaaacacaagtagattttcatgagactaacgcaaacaaattgtggtgatagagaaaagaaaagaaccttagagaaagaatcaataactttttcctaatatcaacaacatgccagcaaaactgactcaaccagacaaacaaaacacataactatgcatgacatagaaaataataaagaaaactatcactgaatggaacaatttcaatttgatgaagtcttagcttcagatcatatactaatacaagataacagatccttttgcaagattgacgattgtagtttcttccgcaaaatcaagtacaacagagctaagcatgagtactaagatacagacaagaagtggaacttactgctgcgtggaaaagtttagctgcagccataaaatcctctgtcttcccaccagtacaagaaccgatgtatactctgtcaattttcacgtctttgcattctctagctagagctcggttgtcaggagaatgaggctgaaaaaaaagacattaacaaaataagtaacctgaagtggcagaaataactcagtgtttaaattggtaatcgtaaacccaccttagccaccacaggctccagctttgacacgtcaaatctataatctgcgacaaagctgtaattacaaaaagaaaggttagccaacggagagataaccaacagagggcaatccgcaaccaaaaattgcgcccaaaaaatacaatttttttacttagagagtgtgaccattctatcaagttgtattactcatatgaagagtaggttcgaaacatgttgtgttacacatccagagtactgagttatttccagatagacaaaaaattcaaatagcgataccagcagtccatatttactctgcccactgtttagaaattctagagtaccatgtgatcgtaccttgcatttccatcactatatactggctcaaatggtacagatgtcctattctgcagaagatataagatcaggagtaagacatacatcaatataatgatccttgaagaaacatatgatttacaagaaaacaagacagtatacatgcctcaacataatttaatgtcgtcgcatcaggagggatgacaccattctttcccccagcttccacaaccatgttgcacaatgtcattctttcttccatctagcagccaaaaaagattcaagcaaccatttataaatcaatgataacatcatatgcagctattaatttttatttctataagagaagggacccataatgtaggaaatatagaatgatttcttacactcagactttcgatagttgtaccactgaactccatcgtcttgtaagttgcaccagcaacagatatttcaccaataatctacaaagtttgaagcaagttcaatatccagatgaaggacgccagatagaatcccaaaagagtaatcactatataagtaaactatcaatttagagactgcacagtaatatgcaattaggtgaagacatatgactagaacacatcagaaggttcaatatacctcatactactgtaaaaaattatctgtgaaagattacggaagctggaaaaggaaataaatgcagtaaaacatatcacactcacttgtaaaatcagatcctttgcttgcaaataactaggcatctcaccatccaagataaacctcatcgttggtggaacctgcgaagtcaggatatgagcttcagacactacagtataatttggagagggggaaactattctaacaagcctttttcaagttgaaacaggcatcactgatttccatttaacacactgaataaaactatatcatagagaatcaaaggaatcagctattctacaaaccttaaggaggatttttccagtgcctaacacaaaacctgcatcagtgtttccaatccctgtagcaaattgaccaaatgctccagcagtacaagtgtgtgagtctgttcctaacaaaacctataatagaaaaaacacatcatttcgaacataatcaaacaaatccatattcaatcacaagaaagccaatcatatccagtgaaagagatctttacctctcctggcctgcaatgaccttcttgtgcaagtgcaacatggcaaacacctttgtagtcaggattagcctacagatgagtgaaacaaacaaaaaagcattaaacttcatccgaatgcaagcaaaacagaatcaattcaaaccatcataccttaaaatttccaaggtcagtgatatcatagaaatacttaatattctgttccctgcaatgctccctcatgatgtcaacattccggtttgcacgcttatcagcagtgaaaatataatgatccggaatcacaacaatcttctccggatcccaaaccttcagcaagtaagtaaacaatcacaataagttacactaaacaaccattgtgatcaccaattcactaatacctaaactaaacctatcaaaactcttctcaatttgtataattacagaagaagaagaagaagaagaagaagaagaagaagaagaagaagaagaagaagaagaagaagaagaagaatacgtaccttggctttttcaccaaactctctcttgaagataccaaaagcaccaggaccacaaacatcatgagtcataagaacatcaacattaacccaaatgttatcaccaggaaccactaatgacttctccgaagctctagctagaatcttctccgtcattgtcatcccagttttcacctgataaaatccaacacacaaaaccattgaagtaaaatcaaacgagagagaaagaagaagaagaagaagaagcttataccgatcctgtagttccaggagaccgatccttttgaggagccataacggaaacaatcttccgtgagatcgatttcttctgacatcgatgaatcgaaatctgagaagatttaggaaacgaagaaatccccaaatcactctgcgaaaatcgacaaaacctataagaaattgagaaaatgtgaaatcgagagagaaaagaaatgaaggatagatgaataaccttggaggatgatttgcatagaaaaggagaggaagagataacagaagccattgattcttcttcgtcttcttcttcttcgtgagggtgtgtgtgtgtgcgcggagattagaggcgtgtgttagaaaaaacctaaaggggttataaattcgtctttctactatagtagacaaaaagtcttactatgacacataagctgcgttgactgtgagagagtctctagttaggtgacaaataaatcaaacaaattgtcattaggttggtgtcattaaacgtttaatcacgtgatacttcatacttgtcttgataagtaactttttttaaccattcacaagaacaaaagtattcgttaattcacatttctaaaatttattaattcagggatgtactcgaattagttgtttctacaatttagtaaaacctctataaattaagaatattgagattaatggtttactaaatttcattaaattatcgtaattattaatttatagaagtgatatttttaggttaaattattaatttagaactagaaaaaatattttaaggtattagtatatcgagtattaattcattgaggtttcattgtatcaagctttgttaagtttgtgtctctattttagaatttgtttgtgttaatgttttagttttgttgcttgctatttgggactatttctttaatctcatctatcttgtaatattctagcttacgactgaaagaattgtttgaccaaaaaaaaaaattgttaaacacatatttgttgagttatggatcaacagcaggaattgagttatgtctactcatttttgactttttgcttcaagtctagatagtcacaaatagttaaaattcttttagttgaattatatatgcttaaaggtttttaaaaatctggcaaagataattaagaataaattatttcgctcatttttttgacatttaaaactatttcgatgctacaaagctagaacgaccgtgttaatttacgtttgctttactttaaaagttgaagttgatattaagattgatgatatcatctcgagaaaacgtatttgcacaccaatgcaatagttttgagagaataaagtagtttggttataatacataaagcttttttcgtgataatgtatttaatttgtagacaaagaggattgagtctttaggttggcgaatacgttcttgtttaccacgtgacaaaaacttccagtcaccaaaatgtacaatgacgaaacagagattatatagaatgtagttatatataataacttaatgacgttgattaactttgcttaactctatgattttcctaagtttttcctggtttctagtttttgtttttctggtgagtaatgttttactggttaagctaatttataactattacatactttctcattttctttttgatgaaatttacatttgtacaaaaaaaaaagccattaatttatataggatcttttaatctaggcggtgtaactttagataaacaatatttttaagcgttctttaatgcaacacatgattatgagctaccatttcaagttgttgcgatgcaatcgatcgatttcttggtttgcgttgtttcttggacaagaaggaagaacaaacaggtccccacgcactcagaggaagcttgttgcccaatttgtgatttatgctatatggaagcagcgttaaaacgtcctacccaaccagattctcatttggccatcaattatcttcaaaaaaattgatagagagatcaagaattttaatcaatgccagaaagatagatcaagaattttaatcaatgccagaaagatcaaacaagcggttcacggtgcttatgagtctttggtgcactgaagattgacactttcccaactctgaaatctattgatttcttgtttttagcttttattaggttgaggtccatgtaaaaaccaaactgttcatatcatatgatattaacattcatagcaaaaaaaaaaaaaaatggataagggtgaataaggagaaaaaaaaacgtcatgccaagttagcaaccaccagaatagatggaagcgaataattgtttgttgggtcatatgcatatttctgtagaagtccataaaagccttctcacatattgtccaatccttatacaactcctatgaacgaacgtgcgatttgagttatataaaaacaaatgtgttgaaattttatttgtaatttgtagtgttggaaaatggcggtttataaagaagaaaccaaatatacagcaaggttatataatttaatacacatataatcttaagttctgtttcttggatttctatttacaggcttgtatatcacatggaaaaagttgtgatttacgcactaaactaacactacaactagacattgacattcgacttaaacaaagtctcctctcttcataacattcgcaaacacatgtatatatataccagaaaccatagattcccttcctagcttttcaaaattctacaacaaataatggatgagctccacgaagccgcgattgcttattacaacaatggctccatggaacaacaaaatttgtcgtggcagtttttccgggcaatggatgttaacggagacggccgtgtcagccttcaagaatacaccgacttcttgcgtcaaaccgctggtttagcttggatccatcccgagatgtttcgggagctcgaccgaaatggagatggtcagcttgacttttgggaggtcttgacgctttactacgtggctcggacccggaccattaactgccgcacatgcctccggattctcaatggtctatacttcacgtgtgtcacatgctttgaatcttcatgtggcaacacgtttgatctttgcgtcaagtgttatatgcgtcggacgtattgtcatccgcatcgtctctttttggatagttatgtcttattacgatcaagacgtatccaccatccttcggtatgttgactccatcaatcgttttttttttttttaagttttggatttaggcgtttccaatagctatagacataaatcgcgtttgttgacgtgtcgcggttcattggtagtttaggcctaaattgattagagttgacatagttgtaactagttcttgactaattatctttgtttcgaatagcgattaatattttgatatatgtatgcattggtttgaaacgtcgaataaacgtttaattttgctgtataaacattaagccagaatatgaattacagtaaaacctatataaattaataatgtagggatcggaaaaatttattaatttagagaggtattaatttatagagagattttctaaattttgaaatttcttataaaatttgatctaaaaagtaagtttttctatataatgaataatctttttaaaatcaattacaagtagaaaaccattattaggttcaaaacaaaataaacttttttctacttggtaaaaatattatatctgaactctagaaaaaattaatataaattgtataaaaaatatactagagtcatattttactaactatatattatacataatatatattcataaatatacatatatatattcataaatttatataattattaatttataatattgataagaccagatatttacataggattttcaaaaaagttattatcttattaatttatcgatttgtatcaatttttacactaatctcaactacagagcggaagaatttattaatttataaaggttattaatttatcgagtattaatttatagaggttttactgtatatattttaagttttgtgttgacacgtatacatccatttcctttatttcataatgaacacggttttaacttgtagacagaaagtcaattacattcataaatatgattacgtctctcaaaattattaatggatcggcgacgattaaatcaataaaatgtcaacattttgtatcaatgattaattgattatatatcgcattcaatattagcaatcattaataataggacgtgcatggtgcgaaggaggacttagtaagacagataattagaaatcagacttaattaaagtagtcaatgtattgaaacttaaccattcttatttaattacgtcgctatctttaattatctattttctctataaaaaaaactaaatttgattgaaccaaagtaaccaaaatgatctaatcaaatgttcaaataatcatctaaaagtctttcaaccgagtaaaggtatatataaattaaaccaaattaaaccttgatggttgatgaaataagcatagaaaatctgtttatttttctatcttttctttcttaaagaagtatgaaaaagtcgcacaaataaatgatgcgtggttcatagaaacaaacaagtaatgatatggttatgttctcaatggtgcagcagccgcccggcgatcaaaacctagctgaagcacaacattcgagggtaagcctttcttacattttattttattttattttattataattgttgtaaaaatgttcattcttattatctttagtaatcaagtactattaatattataagcaaattaactaacatgagtttaatttgcagatggggtggtggaatgcgttgagagcaatggaagttgcacttgctgttggacatctcgctgctttttgcaccattatgtgaatgctcactttctagttcacatcacatttacacattttatcatgatactcaattcttatataaacattaaagcttgcttactttttatttatttagttatgaaaacatatatttatgtgtacgaaacaaacaaagccttttgcgttgcaaaagagaggttcggcaattcttcataaatgcatggttcgatagttagttaattttcgtgtataattaagttcatccggattatgttaattctatgttatttggtaatctttgtctaaaaataaagaaataaaaatgattaaatgtgtaacctctttaaagttaacaatcaataaatcatatgaacttggcatgttcaaaatctggtaaatacgaaagtcaaaaaggtcttataattgctccagtctgttatcaacagtaccatcaacttctggacttctattttcttattgccaaaccgatgtctcgctgaccttgaacagttgtgttgtgctttttggtggaatggtactgcctcaactgctcgtggcgctatagttgcttgggaagttgtttgctcccctaaatcttctggtgggcttgggctgaaaagattagctgattggaatcagttttttggtttgaagctgatttggctacttttttctcaagacggatctttgtgggtgtcgtggtgtaaaacacacttcatccgtggtagatgcttttggaatgctgatttcagagccactggcagctggatttggcgtagtctcgcaaagctccattctcttgctcgcccttttgtgttctgtgaaattgtttccggtcgtgacgctcttttctggcacgataactggactgatttaggtcctttaatagatgttgttggtgtggcaggtcctcgagttacgagcattgcctcgttgtgtctcgtttgcgatgcctcctcagatggattttggtccatcccgcaagggcgacatcctcttactcaacttttaaggacttgtcttatctcttacaatcctcctccttttgatgttgggaatgatatcttcagttggaagacctcaagaaatcaaagtcttgattttttctcttctcctaagacttggcgtcatcttcaccctgctggaccagctgtttcttggcattctcaggtttggttcagggaaaaaatcccaaaccatgctttcttgacttggctaactgttcaaaatcgacttaccactagagacaggttaaggcagtagagtataccagctcctgcttcttgtctgctatgcttatctggtgaggagtctagggaccatctcttcttccaatgcaactactccaaatctctctgccttgacctcttcgccgctttcattccaatcccgttttcaagcttcgacaacatgctcaactggattaagtctcctaccacaaatagaagactaaatgcgatttgtatgcttctctttcaagccttgatctattatatttgggctgaacgcaactcaagattacactcctcttcctttcgatctgaaactcatttgaagaaagatattcagctcctaattcgtcgcagactggcgagtcttgataacaaggtcacaactcttccgtcaaatgatcatgtgacttatctttcactatggttcacaaattttcagtaatttctaatctccggtttctttctttcaacttatgtattctaatctggaaatattgtctcctatgtaacctttgctcttttacaatatatatttaaaaaaaaaaaaaaaaaaaaaaaaaaaagaaaaaggtcttataagctcatattgtaatataaatttataatagatatatatatatatatataagccgcaatagaagcaacaatccgtcgtagtctagctggttaggatactcggctctcacccgagagacccgggttcgagtcccggcgacggagttttttttttcttttttctgaaacgagctaaaaaactatttctcagctgtaatttccttgcattgtcacgtttactactatatgattcaattagttttttaacgaagcttcattacatagacaatttgaggcctaggagggagaagatgtgagcggagtggcacatgatcaggattgtggtagatgagtgatcaataaagttagtgaggattgattaaaaactgaattgggcaacaaaaatatttcataagttttgtttatcctatagtgtttcctctaggggtagttaggtgaggagatgaaattttttgtcatagagtaagattatttttgttgtcatgtgttgattgactacattgaatccaaatgtttatatacatatattggtgttcaatttgcaggtacatttttagaaaagcctaaattgcttaaatgtgttttttttttatgtgtaattttttgtttttttttttgttttgtttaatgtttaggtttgttgattattacaagggaaaatgcaagatggagtttaaagcggcatgtttctttttttacaaaatgaagaacataatcttctctcatctttttttttgttttgttttttaaatttgaggcacctctctatattcttatacatccatttatttccattggtgtcagctgattcccacattttcatgttggaaggggaaaaataacatataaaagaacacttgattgctagaatttagagatgacgaaaaaaaaaacaagtgaagatcaatgagtggaggtaacctttagatttcttcttatgctttgtcacaacatgttctcttttaatttatactacccgaaagcatttaaaactgactaggagcaatgcatataatcatgccaagagccagaagttcttatgtgtctttgtgtttaaaacatatcctccattttgacctttcttcgttacaccaacacaagtgcatttgctgttctcgattaaatattccgctgtgtctactcctttggaacctcttagtgaccctccaggcctcctagttctgtcaaatccaaaccatccaaaaatgtaaagagaccaacactagtatataaaaaaacattcattgccaattggtttaacgagttatgagaacacataccctagaagggaggatgagatagtccggcgttggcctatgattataacatcaacgccaagcttgtcaccatgaagaagaatcgctgtagctttgacgccatctatagctatacactcggtgtgtacacgcacctttggctgagcgatttcacatattcgtttcatttgttccaagaagttaccatctccttgaccaatctccgaggctaaggcgtttgctgcggcgttagaagcggttgtggtaccgttagaagcgggagaggagccgctgctagaggaagagattgagcttggtaatctcaaaaaacttgagaaagcatttttccaagaaccaccagagttttcaatatgtacaagaataagctcgtcttgctcgagcacggcgtgtgaaagagcgtattgaagagctgctgcagattcacgtgtcggatcagcgatcaccatgatcttacgagactgtggtgttgaagatgatcctctacgaccctcttccatacccttcttcttcttcttcttcttcttattgtttcttccctttgcttatatcattaccatttttgatacattgttttcctatgggtttgttttacttttgatcagataaattacggtatcaaaaactcacgatttgttgtcacggtttgtgttcatgtttatctctgaaaaaacagttgggaaaaattaaagccacttaaccggtttgtgtgttctacgtttagaaaaaaaggataattgttgtggtggtggttagtgttgctatttttgaggaatacgtcacttttgttttggttaattttaggtgtcaccaacttccaacacaacaacaacatatcaaaatcaccaattatttctatggctttggcctttgtgtgtttctgttaaaaaaaatttccctgacttcttataattttttgactgttttgaaagatgatgaagaaactatttgacaaaacagaaactgcatgcaaattttgttttaacagaaattctaaatagagagttaaccttgtttatttgttccgtcagtcaatttaacgaagtgattatttttgtaaaagtaaataaagttagcaattaaaatgagaattcaatcaaagttaccaattaaaatgaaaaatcaataaaacaaattgggagttttttgtttggcattttttgacagataaagaattcaaacattcttctcaatctttattctatttcaaaatgaccaattgaacgcatgatttgaaagccatcatagttaattcttaaccaatcattatggaggtgattagctagcactttcaaagcttaattttttttattgtctttacatcaaattaattagtaatagaggatgtataaaaaaataataatttaggaactatcttttgttctataaaggagaagaaaattacctttttcatataaatctgttatgaataaagatggatgcccgttataaggcccatcatttaagcccatcatctagatgtttatagggttttaccctttccttgtactcctatataaagaaccctttatctcaatggaataacacactcatttcctctatctctttctctgtttataacacgttatcagcacgctctaaaaggtagatatagagattcttacatttttttttaagaaccatgtttacttatcgactcatggttcatagtacttattttctattattgaaacaaaacaatatgaaccgatcgatgattatactatagatcggtaaaagcatgttttcaatgattcaataaagaagagaatcatgcttatcatttgtttctataattactatcgcatgattcaatgattctacaaagaaaatcgttaaagaagagaatcatgcttgttaattgttaatttttgtgatttactattacaatattgaatatataaattaccaattttataattatataactaattttgtaactattcatagcccggtggtgggtgatgcaagcatgtattaatgttttagcattccagttttgaatagttgcatctatattcaatatcattttataaatattatattgtctaaaatccatttatgattgatatgatatcccttatttaactcctttgattaaaacgttatacatatcttatcacttttagatattgacttttccatattaaatatttgatttccatatatttgattgtgttattattatttttactaaaaacgttgcaagataatttttctttttataagattccatatatctaaatctttgtgttattattatctaaatctttttataagatttccatatatttgattgtgttattattatttttactaaaaacgttgcaagataatttttctttttataagatttttttctctaaatctttgtagtatctaaataaaaaatatataaaaaaaaaaaattgttcatggttttgccctaattttgcacaaaatagttttattctgattggttttacaatattgcattaaaattgtattagtatataatacttgattattttatgaaataaattgattgataaataacttaatttaaaggtataatcacttatagaaattttcatgaatgactagtttaatgtatcttaagaagatatcatatttttgatggtcaaagttttttaagtagtataaaatcttattaaaagactctagaagagcatatacattgttttctatgggaatacaaaattaaaatcatcgatgcggtatagttctccaaatctcaaagttaatatgatgagatataaatacattatgattctagagtggaattcaatacgagatggatgaacttgaagtttcatcatttcgaggaggagaagtaatgaatctcacatggataataagtgacatatccagaagattatgttcaatctttgactactaaagatctaaaagttgtataaagcaattcttatacgaatgtgttattagataaaataagttataattagttattactaaaacttcaagacttgaagtctctttgtgaatataactcacattgttaagagaatatctttgatgcggagatggtaaaacagacacttcaacttttacgcaagtattgttgtcttgtagacacaatattttgaaagaaattttgagaactattataaacttaaatcgagtgtttttcaaaggctaagaaaacatatgagttatctatgataagtaatactcatattctgaagtgaatataagatcttacatagttagtcaaatttaatatcgtttatactagaatataaaattttaattattatctcgttattgttttattaacatatgattgattattaaaatacatggaagtaattttggattataagatctcattaagggagtaactgataagcaatgaaaagtaaattagaagttttgaaagaactagaagtttcaaaagaattaaaagtttcaagagtatatttggcttaaccggattggtcatcctggtttaatgatgatgtgaaagtattgagaattatgtggacattaggtgaaaaaccagaagattctccctaatgatttatcaattgttacttgctcagaaagcaatatgataatgtgatttttttacgagtcaaaataatttggactttatctattcgtaagtatatacaaggagatgattatggattgatcacccactgtatgatatttaaatacctaatggctataaaagatgcatcgattcaatggacgcattgactcgattgttgcatcgacaagaaggtcatatttatccttgttataaacccgcaacatagagtttgcgagattactttcttgattaaagtacaagagtatttcagtgtttatttataataaccatttttggatatccgttgggataagtgtttaacattttgaaattcatgttcatacacaaaatggtttagtaatatcgatacgcatcaagccaatgaataattaatagttttccccatcattattggttttgggtcagaaaccaaatagttttcatctaaaatctttgaatgtgaaaagtgctccaccacagcacgctgagatgaaccctcaaaggaggataagtatacatgttggatatgaatgataactaagccatcctagaaggatttatatagcgctcgttttgaacactatcatattatatagtcagctattccaacataagggggagaatgtatacagctggtgaaaaaagataaaaagaaatgaattatcaatgatcctcggagtaaagaatgtatattaagagtccaaaagataatttaattatagaatttagcgttgtaattgccagacgcatttgctgacccaaataaagtgatgaagtcacttataccagttgtaaattaaatgctccagaatataatgagtgtcctgtaaggaccaacttcaaactgctattgagtcttaagatcgcatgaagcgtaatagaccttggttccaaatataaatatcctcgtaaaagtgaaggagcacaaaattaaaaatgaccaaattgaggaaataaatattttgatgatctcttgaagagagtgaatgatctctaaaagagacataaacatgacaaatgaaacattcaagtacttgacaatgaagagatctagctagctatgtcatgtcaaaatataatggaatcaaaagcaaatcgacgtcgtaatatatttgcatgctatgagcagttgatattatagacaaaaaggaggatcatgaaagaaagtctattgaaaagtgtacacaaagtaatgattagccaaaaaatggaaaagaagaaatagacatataattataatttctagtagagatatttggactagtagtctatgcacatgatgtgtaaaaccagtggaaaataaatgagtttttatgtgaaagaatagtgaaattaatgagattttcacaaagataagaaatgtatgatgaagagatatattctcttgtggtggatgtaatattttttaagtatctaaagtctggcaataagagacggaacactggatatgacatttatatgaaattcttgaaagatataatctctgaagattaattatatgagaattatgttctctagaactctactcgatcgaataaaaaaaaaaaaaaaaagaaatatataacatgacatataatcatataaatgtatatttatgttgagtttgtcaaaatctattgatcaaactaatatttgttttgaaaatcattaaaactcctacagagttatcataagtaatacgatgacaataatctatgataaaatatcactagataatgatatttataagtctatatgaaaaccatataattttgatcattaagattatggttattaattccaacgagatattgtatttgattgaaaatcatctcctgaagaagatgtttccgagggggagattgaatgatatgcgtggatgtaccatttttccttatcatagtttttatcccacatgatttttctatgacaaagtttttaacgagacattaaagaacacgcaaataatacacttgatgaatattaagaaattctaccaatcatccaaatgaatattatacactaatgatatttagagaaataaataagatggtcaagatgaatcatctaaaagattcatgagcagaagaatggcgttgtactttatccagaaatttgttcaagagaagatttggcagacttattctcaaatactgtttattctctgccacatcttctaatcatgtagagattttaccaattcatgaagctagccgcaagtgtgtatggctaagatccatagttcaccatatacaagaagactgtggtatatatgcagggaaaaagactccaacaattatgtacgaagacaatgcagcatgcatcgcacaactcaaagacggatacatcaaaggcgatagaacaaagcacatcctaccaaaattcttctacacacacgatctacaaaagagcggcgatatacgagttctacagatccgttcgaatgataatctggctgacttattcaccaaggcgctacctactgctactttcaagaagttagtctatcgtatcagattacgccgtctcaaagatctcgacgaatatactcataagggggagtaattgtatgttgcactctttttcccttaaccatggtttttcccattggattttcctggtaaggtttttaatgaggcagcatttcaaatactttacgagttatgatattataatggtcatcagggggagtgttatgaataaagatggatgcccattataaggcccatcatctaagcccatcatctagatgtttctagggttttaccctttccttgtactcctatataaagaaccctttatctcattggaataacacactcatttcctctatctctttctctgtttataacaaaatcaaacatatttttaaactaataattctatttctgatagatttccccaatcacactttttggcaagtataatttttcagttttctaatttgttatttgcagggaatgatgctttttacttttctcttttgttgatctctgatgcttctttctcgatgaatcttcatcaaaccatgatgttttgctattttccaagacagagttagtgataccattgtagccgtttcttgaccataaattgaacatgctcaagtaatcaacttcctcttgaatgaatgtgtagcaagctgttccaattcttgatgatagttcagatgatcgtcaaaactaattgttgttaccatttgacaaagaacatgaaacattacatcagaactgaaaaaaaaacaacttcttacaaaaaaagaaattttttttttaaccaaaactatacaatgatttgagatttcgtgtttacttgatttagagttaagcgaacaactatcctatgtcttctctttgataatcgatctgccatttgttttggattttacgtagtgcctttgcgatcaattttttcaaatcactcctattaggcttcttcgtctatgtgtcatgaagactctttcatagaagtcaaaactgatttctctagtttattaacatttttgttgtaatagctattgaatccaccaacttagtaactttcctcttagtaagcttatttgtgaagactagtgtcaacgtcatagaaaatttcacctaacaaatttaagaaaaagaaaaaaaacgtaagcaaataaagaaatcaataaatcttttacccaataatagaaaagacaattgttggaaactagagtttcaaaagactgacataccatagtagttgagtccattttttcgattgttttcgtttatctctttgccggtgaattttcttcgacaaagtgattacctgtttcaaaacaattactgttcacataagcttttacaggtttttgtttgattagagaaatgtttatccacttgattaaggagaatttggtcctccttttatttttctctctctcattttataaaatccaaaatctcaatggtattaattaatttttttccgaaatatggttatgcatttaattgtttcaaatttaagtatcaacattcttttttatcttctctctttcgtttcatttattttcttaaaacaattaagcctaatttaccctgagtttcttgcaaaatttaaaaaactaattttcctaatttatttataaaattcaaatagaaataaaaaaaatcttaaatcctcgaaatgagttagaggctttcacaaaatctaacaaacgagctgcttaggtttaagtgataaaaaacgagctgctagggttactctacttaattgtttctaaaataattaatttatgatctctgaattctgtagatcataataaaaattaaaaaataacatttaaaacgtaatctataaaaatacttttttaaagagatgaagttgttgcttctacaaataaggaaactatggaaagtagaggaggttgttcctaaaaataaagaagactaattattatttatccgtacttttcatctcaaattatccgtcttacgatttgcacaatagttttattgagatgaataattgaaaaatattaagttaaaaaaagtagttgtataacgttcaactcattcctatccgaaatagtaaatgaatcagttgaacaattttttttatcatttgttagaaaatatatatgaatccctaatcattttttcttagtgttactacttgattacttataattgattttgagaattatgagaatttaaagatcaagagagttcactttttagatgttgatgatagattgtgaataatcatcggcatattttgtgacccaaattgccttataataaaagaaataggaatctttgatcagttttttctttacttaaccttttatcaatttcaggcaaatatagaaatctttgaatcaatcagaatctgtcatcttaataaaaaatatatttaattagaaaaatctaatttgccaccaaaatgagattacatataggtttgtgtttataagagaagatttaggatttagattttataattaagtgaggttaaatattcattagggtttataaacatgtttagatattacaatgaaacgaggttaaatattggtttaagtttataaatgggtttatattttacaatggttgaatagaagagttcacctctacgattgaacgcaaatgtttttcatcaaaatatatggtgtaatttcatctaataccaatttagaaagagagagtcatagagtacgagacatttgttttacttgattagtacgagacaaacccaagaacaaaacagtacaaacaaaacaaacagcttttaagttttgtatcctattacccccaaaaacacacactcccaaatgttcaaagatacccaaaaactcgaaatgggaggagtggggtctcttaaaccttagcttctgcacacttcctttccttcattcttcatgtcaccaactagcaaaacaaaacaaaacaaaacagcaaacgattcagtctcagcttgtgcttattacaatctgcaagaacccaatatatatctaattcaaattaccaaaataggacccctaacatctatcttattaaacattgataccataatacaacttgtaaacaagtcacaagcctatgcaagacagatttgcaatcatttcctgctagtgcatttcccaaagttaactaacatgatactaaagggttatactgtgaaacttattaaccattcacttagaatttacctggaaaatatggccaagaaccacgattttaacggttgaattttaattacaaatggcaag

SEQ ID NO: 578 - DNA, 113970 bp, Arabidopsis thaliana
aagcttgtcaccatgaagaagaatcgctgtagctttgacgccatctatagctatacactcggtgtgtacacgcacctttggctgagcgatttcacatattcgtttcatttgttccaagaagttaccatctccttgaccaatctccgaggctaaggcgtttgctgcggcgttagaagcggttgtggtaccgttagaagcgggagaggagccgctgctagaggaagagattgagcttggtaatctcaaaaaacttgagaaagcatttttccaagaaccaccagagttttcaatatgtacaagaataagctcgtcttgctcgagcacggcgtgtgaaagagcgtattgaagagctgctgcagattcacgtgtcggatcagcgatcaccatgatcttacgagactgtggtgttgaagatgatcctctacgaccctcttccatacccttcttcttcttcttcttcttcttattgtttcttccctttgcttatatcattaccatttttgatacattgttttcctatgggtttgttttacttttgatcagataaattacggtatcaaaaactcacgatttgttgtcacggtttgtgttcatgtttatctctgaaaaaacagttgggaaaaattaaagccacttaaccggtttgtgtgttctacgtttagaaaaaaaggataattgttgtggtggtggttagtgttgctatttttgaggaatacgtcacttttgttttggttaattttaggtgtcaccaacttccaacacaacaacaacatatcaaaatcaccaattatttctatggctttggcctttgtgtgtttctgttaaaaaaaatttccctgacttcttataattttttgactgttttgaaagatgatgaagaaactatttgacaaaacagaaactgcatgcaaattttgttttaacagaaattctaaatagagagttaaccttgtttatttgttccgtcagtcaatttaacgaagtgattatttttgtaaaagtaaataaagttagcaattaaaatgagaattcaatcaaagttaccaattaaaatgaaaaatcaataaaacaaattgggagttttttgtttggcattttttgacagataaagaattcaaacattcttctcaatctttattctatttcaaaatgaccaattgaacgcatgatttgaaagccatcatagttaattcttaaccaatcattatggaggtgattagctagcactttcaaagcttaattttttttattgtctttacatcaaattaattagtaatagaggatgtataaaaaaataataatttaggaactatcttttgttctataaaggagaagaaaattacctttttcatataaatctgttatgaataaagatggatgcccgttataaggcccatcatttaagcccatcatctagatgtttatagggttttaccctttccttgtactcctatataaagaaccctttatctcaatggaataacacactcatttcctctatctctttctctgtttataacacgttatcagcacgctctaaaaggtagatatagagattcttacatttttttttaagaaccatgtttacttatcgactcatggttcatagtacttattttctattattgaaacaaaacaatatgaaccgatcgatgattatactatagatcggtaaaagcatgttttcaatgattcaataaagaagagaatcatgcttatcatttgtttctataattactatcgcatgattcaatgattctacaaagaaaatcgttaaagaagagaatcatgcttgttaattgttaatttttgtgatttactattacaatattgaatatataaattaccaattttataattatataactaattttgtaactattcatagcccggtggtgggtgatgcaagcatgtattaatgttttagcattccagttttgaatagttgcatctatattcaatatcattttataaatattatattgtctaaaatccatttatgattgatatgatatcccttatttaactcctttgattaaaacgttatacatatcttatcacttttagatattgacttttccatattaaatatttgatttccatatatttgattgtgttattattatttttactaaaaacgttgcaagataatttttctttttataagattccatatatctaaatctttgtgttattattatctaaatctttttataagatttccatatatttgattgtgttattattatttttactaaaaacgttgcaagataatttttctttttataagatttttttctctaaatctttgtagtatctaaataaaaaatatataaaaaaaaaaaattgttcatggttttgccctaattttgcacaaaatagttttattctgattggttttacaatattgcattaaaattgtattagtatataatacttgattattttatgaaataaattgattgataaataacttaatttaaaggtataatcacttatagaaattttcatgaatgactagtttaatgtatcttaagaagatatcatatttttgatggtcaaagttttttaagtagtataaaatcttattaaaagactctagaagagcatatacattgttttctatgggaatacaaaattaaaatcatcgatgcggtatagttctccaaatctcaaagttaatatgatgagatataaatacattatgattctagagtggaattcaatacgagatggatgaacttgaagtttcatcatttcgaggaggagaagtaatgaatctcacatggataataagtgacatatccagaagattatgttcaatctttgactactaaagatctaaaagttgtataaagcaattcttatacgaatgtgttattagataaaataagttataattagttattactaaaacttcaagacttgaagtctctttgtgaatataactcacattgttaagagaatatctttgatgcggagatggtaaaacagacacttcaacttttacgcaagtattgttgtcttgtagacacaatattttgaaagaaattttgagaactattataaacttaaatcgagtgtttttcaaaggctaagaaaacatatgagttatctatgataagtaatactcatattctgaagtgaatataagatcttacatagttagtcaaatttaatatcgtttatactagaatataaaattttaattattatctcgttattgttttattaacatatgattgattattaaaatacatggaagtaattttggattataagatctcattaagggagtaactgataagcaatgaaaagtaaattagaagttttgaaagaactagaagtttcaaaagaattaaaagtttcaagagtatatttggcttaaccggattggtcatcctggtttaatgatgatgtgaaagtattgagaattatgtggacattaggtgaaaaaccagaagattctccctaatgatttatcaattgttacttgctcagaaagcaatatgataatgtgatttttttacgagtcaaaataatttggactttatctattcgtaagtatatacaaggagatgattatggattgatcacccactgtatgatatttaaatacctaatggctataaaagatgcatcgattcaatggacgcattgactcgattgttgcatcgacaagaaggtcatatttatccttgttataaacccgcaacatagagtttgcgagattactttcttgattaaagtacaagagtatttcagtgtttatttataataaccatttttggatatccgttgggataagtgtttaacattttgaaattcatgttcatacacaaaatggtttagtaatatcgatacgcatcaagccaatgaataattaatagttttccccatcattattggttttgggtcagaaaccaaatagttttcatctaaaatctttgaatgtgaaaagtgctccaccacagcacgctgagatgaaccctcaaaggaggataagtatacatgttggatatgaatgataactaagccatcctagaaggatttatatagcgctcgttttgaacactatcatattatatagtcagctattccaacataagggggagaatgtatacagctggtgaaaaaagataaaaagaaatgaattatcaatgatcctcggagtaaagaatgtatattaagagtccaaaagataatttaattatagaatttagcgttgtaattgccagacgcatttgctgacccaaataaagtgatgaagtcacttataccagttgtaaattaaatgctccagaatataatgagtgtcctgtaaggaccaacttcaaactgctattgagtcttaagatcgcatgaagcgtaatagaccttggttccaaatataaatatcctcgtaaaagtgaaggagcacaaaattaaaaatgaccaaattgaggaaataaatattttgatgatctcttgaagagagtgaatgatctctaaaagagacataaacatgacaaatgaaacattcaagtacttgacaatgaagagatctagctagctatgtcatgtcaaaatataatggaatcaaaagcaaatcgacgtcgtaatatatttgcatgctatgagcagttgatattatagacaaaaaggaggatcatgaaagaaagtctattgaaaagtgtacacaaagtaatgattagccaaaaaatggaaaagaagaaatagacatataattataatttctagtagagatatttggactagtagtctatgcacatgatgtgtaaaaccagtggaaaataaatgagtttttatgtgaaagaatagtgaaattaatgagattttcacaaagataagaaatgtatgatgaagagatatattctcttgtggtggatgtaatattttttaagtatctaaagtctggcaataagagacggaacactggatatgacatttatatgaaattcttgaaagatataatctctgaagattaattatatgagaattatgttctctagaactctactcgatcgaataaaaaaaaaaaaaaaaagaaatatataacatgacatataatcatataaatgtatatttatgttgagtttgtcaaaatctattgatcaaactaatatttgttttgaaaatcattaaaactcctacagagttatcataagtaatacgatgacaataatctatgataaaatatcactagataatgatatttataagtctatatgaaaaccatataattttgatcattaagattatggttattaattccaacgagatattgtatttgattgaaaatcatctcctgaagaagatgtttccgagggggagattgaatgatatgcgtggatgtaccatttttccttatcatagtttttatcccacatgatttttctatgacaaagtttttaacgagacattaaagaacacgcaaataatacacttgatgaatattaagaaattctaccaatcatccaaatgaatattatacactaatgatatttagagaaataaataagatggtcaagatgaatcatctaaaagattcatgagcagaagaatggcgttgtactttatccagaaatttgttcaagagaagatttggcagacttattctcaaatactgtttattctctgccacatcttctaatcatgtagagattttaccaattcatgaagctagccgcaagtgtgtatggctaagatccatagttcaccatatacaagaagactgtggtatatatgcagggaaaaagactccaacaattatgtacgaagacaatgcagcatgcatcgcacaactcaaagacggatacatcaaaggcgatagaacaaagcacatcctaccaaaattcttctacacacacgatctacaaaagagcggcgatatacgagttctacagatccgttcgaatgataatctggctgacttattcaccaaggcgctacctactgctactttcaagaagttagtctatcgtatcagattacgccgtctcaaagatctcgacgaatatactcataagggggagtaattgtatgttgcactctttttcccttaaccatggtttttcccattggattttcctggtaaggtttttaatgaggcagcatttcaaatactttacgagttatgatattataatggtcatcagggggagtgttatgaataaagatggatgcccattataaggcccatcatctaagcccatcatctagatgtttctagggttttaccctttccttgtactcctatataaagaaccctttatctcattggaataacacactcatttcctctatctctttctctgtttataacaaaatcaaacatatttttaaactaataattctatttctgatagatttccccaatcacactttttggcaagtataatttttcagttttctaatttgttatttgcagggaatgatgctttttacttttctcttttgttgatctctgatgcttctttctcgatgaatcttcatcaaaccatgatgttttgctattttccaagacagagttagtgataccattgtagccgtttcttgaccataaattgaacatgctcaagtaatcaacttcctcttgaatgaatgtgtagcaagctgttccaattcttgatgatagttcagatgatcgtcaaaactaattgttgttaccatttgacaaagaacatgaaacattacatcagaactgaaaaaaaaacaacttcttacaaaaaaagaaattttttttttaaccaaaactatacaatgatttgagatttcgtgtttacttgatttagagttaagcgaacaactatcctatgtcttctctttgataatcgatctgccatttgttttggattttacgtagtgcctttgcgatcaattttttcaaatcactcctattaggcttcttcgtctatgtgtcatgaagactctttcatagaagtcaaaactgatttctctagtttattaacatttttgttgtaatagctattgaatccaccaacttagtaactttcctcttagtaagcttatttgtgaagactagtgtcaacgtcatagaaaatttcacctaacaaatttaagaaaaagaaaaaaaacgtaagcaaataaagaaatcaataaatcttttacccaataatagaaaagacaattgttggaaactagagtttcaaaagactgacataccatagtagttgagtccattttttcgattgttttcgtttatctctttgccggtgaattttcttcgacaaagtgattacctgtttcaaaacaattactgttcacataagcttttacaggtttttgtttgattagagaaatgtttatccacttgattaaggagaatttggtcctccttttatttttctctctctcattttataaaatccaaaatctcaatggtattaattaatttttttccgaaatatggttatgcatttaattgtttcaaatttaagtatcaacattcttttttatcttctctctttcgtttcatttattttcttaaaacaattaagcctaatttaccctgagtttcttgcaaaatttaaaaaactaattttcctaatttatttataaaattcaaatagaaataaaaaaaatcttaaatcctcgaaatgagttagaggctttcacaaaatctaacaaacgagctgcttaggtttaagtgataaaaaacgagctgctagggttactctacttaattgtttctaaaataattaatttatgatctctgaattctgtagatcataataaaaattaaaaaataacatttaaaacgtaatctataaaaatacttttttaaagagatgaagttgttgcttctacaaataaggaaactatggaaagtagaggaggttgttcctaaaaataaagaagactaattattatttatccgtacttttcatctcaaattatccgtcttacgatttgcacaatagttttattgagatgaataattgaaaaatattaagttaaaaaaagtagttgtataacgttcaactcattcctatccgaaatagtaaatgaatcagttgaacaattttttttatcatttgttagaaaatatatatgaatccctaatcattttttcttagtgttactacttgattacttataattgattttgagaattatgagaatttaaagatcaagagagttcactttttagatgttgatgatagattgtgaataatcatcggcatattttgtgacccaaattgccttataataaaagaaataggaatctttgatcagttttttctttacttaaccttttatcaatttcaggcaaatatagaaatctttgaatcaatcagaatctgtcatcttaataaaaaatatatttaattagaaaaatctaatttgccaccaaaatgagattacatataggtttgtgtttataagagaagatttaggatttagattttataattaagtgaggttaaatattcattagggtttataaacatgtttagatattacaatgaaacgaggttaaatattggtttaagtttataaatgggtttatattttacaatggttgaatagaagagttcacctctacgattgaacgcaaatgtttttcatcaaaatatatggtgtaatttcatctaataccaatttagaaagagagagtcatagagtacgagacatttgttttacttgattagtacgagacaaacccaagaacaaaacagtacaaacaaaacaaacagcttttaagttttgtatcctattacccccaaaaacacacactcccaaatgttcaaagatacccaaaaactcgaaatgggaggagtggggtctcttaaaccttagcttctgcacacttcctttccttcattcttcatgtcaccaactagcaaaacaaaacaaaacaaaacagcaaacgattcagtctcagcttgtgcttattacaatctgcaagaacccaatatatatctaattcaaattaccaaaataggacccctaacatctatcttattaaacattgataccataatacaacttgtaaacaagtcacaagcctatgcaagacagatttgcaatcatttcctgctagtgcatttcccaaagttaactaacatgatactaaagggttatactgtgaaacttattaaccattcacttagaatttacctggaaaatatggccaagaaccacgattttaacggttgaattttaattacaaatggcaagcttggcgttccaatcatcaactactccgtaatcaaggctgagctcagtcatgggagggatgttttcagcagcgaaaagcatgactctagggaacatgagactgttgtgatcatggagtacaaactggacaatgacattcggatcagtactgtggcttatgtaacaagcaacattcctcatcttggacacatccattgcgaaatcaaccggaggaatatcaggataagaaggccgctcgaaatcagcaaggacctgagacagatctccccaatcttcccatctcgcagaagagaaacgagcaggatataccaatgtatcaccgttcatggtcagaatgttggcttgttcccttgtcaaagcaaccccagcatactcacaaataaaagcaccagcatgtaatacatccaaagaccgaactccccaacccgtttccagtgacctaaacacttctagcctattcctcaaacccttttgagtcacacggtttcgacagcttggagggcactgacacgctgatccacattcatgtatcaacggtttctgtcttattagcgtcccattataatcataagcaatctcacctgaattcttggcttcacaaaggcagccactgccacaaccattgacacagtcacatccacttgcattaccactttgctgaacaaataagccaggaggaaacgaagtttgcgcaagatactcataatacaaaggttcttgatcgctgtcaatgtcgttaaacaaatagacaggaacattctccttcccattcgagatatcgaaattgatgtaacctctcggtctcacagacaatggattagtcttaagagtcctagcaaacttcaacaccgaactacccatctcagcctgtccttcaatcctctccaaccgatatttaaacacaccgaaaccagacttcccaacatcaaaccaagaatcaacaatcctaaacaacccatcataaacataaactctactagaaacctcattctcatacttcaaccctctaataactctcacttcaatcccataatacatactccgttccatcgcaaggtttccaccttccagcctctgatgttcagcttgccttccaagcctatcttgtccaccctgacctgtatacataatcacatctccttgatcatcatcatcctcatacccaccagaaacaatcacactagtagctattggctccccattagaactaagactccctgtaagaaaatcgatcccagattgagggtgtccatgtaagcccatgacacataactcaaacctaaagaagaagatatccccaacttgaacaccgggaatcgaaccgacgattcgtttatcacgattcatccacaacatacaatctctcatcattgaaccagctttaccagctttaccatcagctctagctcttcttccaccaaccccattacgtttagcttcttccatcatcaaaaacatcctaagagaatcataaatcattctcgtcttcctcacatgttcacgaaactgtctctcactttcaggtccaacatcagtgatcctcactagctccgacgaacgtggctgcggtctaggtcgttgagtagcaaccgacggtgaagagtcactggttgagtaaggattcggttccggttccggattctcctcaaccggtacgattgctccggttaaggaatcaagaaccgcaacatcatcgtgacgttgaagccgttgagcgaaagcagaccgggctgactcggcgacggtgttgtaatctgaggaaaagtctgtggcttcgttgaaatcggagacggctgatgaaattagggcttgtgggtttgtgtttggaagttgaaaggccaagttttgggttgattcagtgactggttcaagctttgggatcagtgaaggtgacggatttagagacggatcaagaggaatgtgagaagaacccattttttgcaacgagaagcgaaatgggtttgacgagtttatcagagaaatcgaagaaatgggttttgtttggagaacacctttcaagctaaatccatggcggagaagaagctcttacacaaatattttcctacagaatctaatgtgttttttctttagatttgcttttaatataaagttgtgatattgagaaattatgatacgattattccaaaaaaaaatagccggaaaaaaaatgaaaaatttcataccttttatgtgttgaaatctaaatttgaagatctctttaggatgaaaaagagctctcttggtactcaaatttctgggtaaaaatggtggtgtgtttgatttggtgtataaggccagaccaaacacaccacacccgtttattttggtttgtagcgatgacgtgtcgtaacacgttcaggataaatattataaaatatttttattagaaaagattgcagtatagagattattaaaaaaaaattaataaatttaggaaacataatttttttaatatatttagtaaaattataattttataatatggaaataaggttttccaaatatctaagttttttatttttttaaaatttgaataaaaatttctttctatatattatataatttctttctattttttaaacttgaataatttttcttgatatctaatatctttctgtattttaactttgaataaatttcttttggtatattctggatatcggatttttttctatttattgaaccttgaataacttttttttaatatctaatttcttttttttttgaaacaataaaatatctttatatcgtaagtgtgtcgcaacacattcaggataaatattacgaaagtatttattagaaaaagtcgtgatatagaaattgtaaaaaaaggagaaaattttaggaaagtaggcataaataatcaataaaaatattttaattcacaaactaatctaacaaaaatatggtgtgtaacttttataagaatgtccattttatctttttatacatatcatttacatacacacttcctttcttcatatcctttttaacttaatattttcatcttcatctttatcttgaaacgataacgtgcatagacattttttcataaaataattaagaaacaatagtcaggtttttgctatatgcagagtaatgggcgggagactttgcgtccacaattttatagaagacatttgagtaagaagatcaacatcgtgcatttgtgctaccacacatttttttttcttttctttataaatttaaaatttattcacaaaaaaaagacggttttacaataaatgcatcgtttagccaaaaaatttaaaaactgaacaagtacaaactgaatagaagatctaacgacaatgagtgctaaaccaatatcgtagcccgctcttgtagatgggtgaacctgaagtagccaaagtactcaaccgattccgcatattcttatcgatcattttggcaagagaaggagctggaatgggtgactcgccatgccttctcccatttctctctttccaaagactgtgagtagtgagctgaaacacatatcggaaaacaaacatgtgaatttgcgtcaaggccgaacttgtagatagatcaacaagagagtcccaacgagtcgtataacgtgaacccaacatatccctcgtaagagctgaccaagcatgagaggagtaagagcaagagaaaaaaaagatgatcccttgtttctacttccgtttgacagagcacacaaccccctgtaagcgtcgccattccactttaataatctgtcccccgtagctagacggtttcgaatggctaaccaaaacatgaatgagagtttaggaagtggagttttgaaaccatactcccttgaaccattcacacgttggagtggactcacgaatctcataccaagtgtcccgagagaagaacttatgcttgaaggaaccgttgcagcatttccagagaggaatgtcacatgttgggtcatgacgttgtcggagagcatcaatttcgtcttcgatagagtttagagtggccgtacggtgtcttcgacgcacatgagaccggagaacatcagcaacagaccaagatgaagagatacccatatcaatacaacctcgggctcccaatacctcatataaagacccaagagaacaccaattgtcataccaaaaagaagtacctaaacccgagtgaacttccattttaaaaaggtttttggctttatctctatacttcaagatcttctgccacatccaagaacccaacgtacttctcccccgaggtgaccagaacgatctaccatgaagcagatttaaacggatccaattagcccaaagcgagtctttagctgaacaaattctccaaataagcttcataatgcacacatttccatcgagctccggattatctcaccgcattaaatgaccatagtgatgttttctgctacgatattatgtgtcatgatatatttttaacatatacaagtttctagatgctttcttatatacaagtttgctacttctccattgacttacgatcttatggtatgaagcgcaaattctcttttatcttttcattttttaaaattaatttttcaacttttccttttttttttcttttaccactaccacaattatttctacaccaccatattgtcatcaccatccctgttgcaactgcccaactaccaccacagccaccatcaccatcgtcacaaccatcgtagctggccaaccgcaaccacaaccacaaccaccacctggctgttaccaccacgaccactgcaaccataacaaccatcaccactaccacgtcattaccatcaccatgatcgcaacctccgcgcgcaaccagtacctccatcatcattaccactactactacaatcaagaccaccaccaaatcatcatgaaaaaagattttaacatggaaagaacccttttacttatcataattttttttcttgtttatatatgctttaaaatccaaatcatgatacaagtagaaaaaaatataaatcctttttttagaagtattatgaacttcatttttttgaacacaaaaatgtaaggtaaataaataaaaaattaatgaagaaaaacctcacacatgtcaatattattttttctttcttggcatatacaccaacaaaggggaaagtagaattttcacacctccattcggtcttacgtgtgaagttgaccagcatcgactccttcatatgcatatgtgtccagtaagaaagtatgtatgtgcaaagttcgttacttttgttgtataatttttgtgggtgactaacaataatttggttacgacgcttctattagtgaaataacttcaaccctaatttggggaaagagttgatatctagactcataagtaatgacgaaaacggaaaaatagttagtggtttttttttttgacaacggaaccaattggtaacaaatgttatttttggttatagagatttttgttgtaaagactttaactgttgaaactttggctgtaaagattttaactgtaaaatataagtttaatctacagatacatttttgcagttattttgtgaaataaatcctgaagttggaacttatttacaatggctgccactggattttaattctttgttttttttttaattgatggtttaaatttttttacggcaattaattgtgtaacaaaccaaaaagattcgaaatatatggaaatcacttatgtcacgcaaaacataataaattatgttctccttatctcacctacaatattcactaaatcttaaaacaactaaaatttaaactatttgaattatttgtattaaatttcgacaattaattaaaacaaacattgtgaaacaaaccaaaatatatttacgatcccataaaataagcaaaccccaattatatgtgcacctaaacacattccttatcttggtttgaatatgccatagaattaaaagtccatcactttttcggcataaaatcacaatcacaactaattccacaactaatatttaaacttataaaaaaataaaatatcatgagacgaaaaatatagcgggacgggtttggattaatatgatatatagcaagacaggtttgaattgatataacataggttaaagatttattttattattttatcatcactaatttttctagttacacattaatataaaattatataactttaatactaaactaaaaccataaaattaaatttaatattattatatataaaaataaactatttgcctcgtggtgtaccacgggttaaatcctagttggtatatattatggcagtaaaattgtagtttcaaataatataaattataccggaaattaattcggatgatgatataacgaagaatttatatataaatattagattttgttatcaaatttctacatcttatcattaaattttaatatatatttttttcttatatagaaaaatagatattaaaataacaagaaaataatcatcatgactatttttcattaagaacaattcttcgaccacaccatcctaacttaatagattacatgttatagttaacaattgtttttgtacgataaagcttttggttttcatttcttagcgaatcttaaacattagaaatgttacggacaacagataaatttactgacgctcttatacatctacgtactatgaatgcgacatagtctttcaatgacatcttgttgcgcgatcttagtctaactattgacaaatgaatttaagaaaagtaagtcacgctattatttctctttgatttgggtttttctattatcacaatggagagagtatgaaaggttttaaaattacattttaagaaagttattttttgttattcatctaataataataagaatgtaagtaatttccaacatcagtagattatattaactaactttaattgtgcaaccgtgtggaaactcatgatgaatcgaccccaatgtccaaactcttcaccatcttacctactcatccgtccaaaagctcctcaactttttttgtggtttagtcaaagtccaaaaggtagctggagatggattggtcacgactgacgagtgctcaacagccatattcggtttggtatcaataactttgatgatgatgtccaaaagaaactatgatttagatatggagtttacgccactttcattttaaacaaaaatacaaattttaaaagacaattccctctcttgcaaataaaagttgtttacaattatagtaagcataatgtcgctccaaaagagaaatatagttttggtcctgtctcgtccaggaatttgtattatggtcagtagagctacaacatatagctccccaatttagagatatttaaattgcttaacatttgaacttttggtgtaaatattctaaaatacgtcttcggctgataatgtagtttttatttccggaagaatttatgatgacgttttaagtggacataaagattgtgatcttatgttagagacataaatcaaatcaacataagcgtaggccggtgatgcaaaagtaaatgctagtttagatggataatgattctgcacactcatactttatatatatcttagttctattaactttcagcctaattttcttttaatttagaacttttgttttgaccagattatgcttattggattttttttccttattgattctgtttttttttttttttgtctaaaacaaacctaaaagagatgtgaaagaagatgaggtcatttccaacaaaatttcctatgattaaagtaaataacccaactggaaaatcgacgatttctagagaattatgtggagaacccgacgagtttggtattagagttatgtctcctatgtggagaatctgctgaaacaaaagatcatatattctttgtttgtccatatacttcccctaaatggtccgacctcacacctaacctacttgaatcgggtttatcacctaataggaacgacatttttcatcacctttattctttccatctttaccattttgacgctgtcctattctgtcttgtgttccaagacaccatctaccagtttggcaagaaatatactgacatcggcatgaacatgaccgttactccatctgattttctaattcgtaacattgacaaggcggttggtaaccacctttgttccttccgttacactatagcaagtgcggttaccttacgattttgttacatttatgttacatgttagtcaaaaaacaaattcttacttattgtagataactcttttttcggttgtttatgtgctcgttcaactgtcatatgatagtgtagtgtgcttaattcatttttctagagaaaaccaagaaagaataaataaactagagttaacaaacagcaattccctaaatacatggacgcgatcgatactcacaattatatcatattcctttccgctatatagattaaccacagacacagtcacagtcacataaaacaatttcccccctaaacgacgttatccgtatctaagatagatttactagaatacaaatttttaataataatgcgtttaactcgaccaacttgtaagattcgtatgctaagcattatcttgaatggttgtttaaagaaggaaaacagtaacaaattaactaaatattataatatcattaatgatgtctctttttgaatttggcctacggcccaacagagatacatgcataacagaagaagtggcgaaaaaaggttttgaaaacgaaatgtgtggaacatattcagctatatataggtatctaagttaggtctatatttactatatatataatatatcttccacttagaaagaaaccgtagactcataaacatttaattagcttactgtgaatgcaacgggctacatctagatatatctacctatgtttgttttacttgcatttcacatgtttcgttttagataatcaaattttcttttgttttatagcgagttattttttcttatattttgaagaaaaaatctataaaacaatttgtttggtaaaaatcccaccagattcaccacatcctttagatttctatatctaacgagttcattgtttttccaaagaacttgtaaccacaaagaaatgtacattgatgacaaaataatcatagatctataacgaacttttgaaactaccatactttgaactttcatagcttaatgatattacaaatcgaatgcatgaaactaattaatttatatttaacggccgcaatatgagttctacaatggtatctgattcctgttttattttgactcgtcatcacatattatattcttgttttcatacattattatttattcttttagctgaaaagtttcttgaagtgatattatatatgtttgatcaagtagtttatttaattgtaaaagataatgtattctttttatgatctttattcatgtatatcttttgtgttatggagataagtaaaagctaaactcgaataagaaacgacaaatgtgcatcttcaaattttcttttcttttttctcaaatggaaatgtactaagtaatgtggcagtcttagtcttttttttttttttttttttttttgtgtcttattcttagtcttgtttgggcaatggtttgtgttctagacagacacttggactgttccattttgagactgattgctccaaaatctttaagataacaaagcatctagagaactgcctgatttttccatgccattagatgacgtttttttattataagttagaaatagatttcttaggtttggtgtatatctcacatactatatagttcaataaacttttcatatgaattgatcaaggaaatatcaagttgtgttgatcaaaaatatcaataaaaaagatcaagaaaatgttgtcataaccacgtggtaatggtctgttatttttattgtattcatcaatgaaaaagatcaaccctatggttagcacagtaagactagtacgctacaatcataattagtaataaggatatgcataacattagtccaaacttcaagcgttaatattatgttatcataaaagtctcttgttccgattacgctgcatctaactaaccttgttttggtgttgctaaagagagaaaaattagcaaatgtagtcaaggtcaacctacaagaaaaggctatggatatgttccagctatagccaaccacatatatggtttatgcaaatcattgtaatcctatggtgggaaataaacacgcttattagctgatcaataaaataatagagattagaaaaagagtaaagaagtgataataaaagtgaaaaaagttttatattggctttaaaccgggcatgaaagttacagtccagttctatggatcctcgggtcaaagttttgcagttcaagatgtttggtgtttgcactacaaataaaataagagatcatcacttatcttacctaatcactaccatggttattcatttgtaatatataaaaaaaaaaactttttgcaattgtatttcatatgtttcacttttaaaatatgtatagaaacttatatattaaacagaaattataacatacaccggatcaagcagatagattttcctaatgataggagaaatttaggataagatagtaaaaccgaatgtctttcttttttctctttcagaacttttaaaactctccaccaatgttgagttatatgtcttatttctctcattttcttgtctatcagatacacgtaattcaaaatttagacgtttggtgaaaagtgaaagatctctcatatattgagtggcaacaatgtttatgatatcatcaaactttttgataacaatacaggaaacgttttcagaaaaaacaaaaaaccctgctatcaaacttggacttttggacttcggtttagatgtgtaatttgcggttcgcttgcggaaaaatgtttcctaaccgacggtactgtcctgtatcttcgacgaccgtgtatactcggtactaaaagaagaaaggaaaccggcgttatgatactcggtactagttagtgataatagtgctacaatcttacaaaactatccactggtaaagagaataatataggccacctgtcttgtggtgacgttaaaaggccgtaaactgtttcaaacaagtacataatttattgctaaagtcctgacgtggaatccaacgaacataattaaaagaaaaaaaagacttaagatcgatagcatgtctaaatttcctgaacacttggacgtatgttactggtctagtttaatatgtattactccaccaccaccaattgttgttaattttttattatgtttttaaccattataattaagggggctacatatagatataggcctctttgaacccatagatactgtacgtgtcacatatctaagttcaactttttttttgtgaatctctctgttgcgcaaaaagagttttggatttgatgctttagaaatcgttacccaatgcctttaaacatttcatttttaacccctacaataccctttttagaaaccaatgagaccctttttcatttaaaatttatattcatatgacacaaaacattttctttcttctaagaatatgacagcaaatattacctatttatttgttctgtcgtatatatgtattgattaaacaacttaaatttataggctgatatgatctagtagcctcttttatccacatagactgtatacccttaatatgttataggtttttcatccttgaagtggggttcttttgatacgatgatatgcttaaaaacatagactatatatctatctatatatatcaaataagaataatattttcatacaaaatataatatcattttcttttgatctccctcaccatctctcttaacataaaaacaaaacaaaaaagatagtgagggagaaaagtggtggacccaagaaagctttgtcagtgcatatataagaacataagacattaagacagagtagcacagagcttccataacaagacaaagccaaagagcaaaagagatcggtagatcttatagagagaacaaatttttcctcaaatcaaaatcagaagaagaatgagttggtggggagtgaaaggaggaggatggggaatggtggaagaagtttggagaaagggtccatggaccgccgaagaagaccgtcttttgatcgaatacgtccgtgttcacggtgaaggtcgttggaactctgtctctaaactcgcaggtaccaccactttctgtgtaatgcatgttttaatatatgtttttttttcttcaaatgaatgaatgattgattcatgaatgttttgatcgttaggattgaaaaggaatggcaaaagctgcagactaagatgggtgaattaccttagaccagacctcaagagaggacagatcactccacatgaagaaagtataatacttgagctacacgctaagtggggaaataggtaaaaatacctcaaaacgaaaacaaacaacctcaagtcttttttttgtttttttaggtttgtcgatggcttttatcttaagtattagggttttgtataggtggtcaacaattgcacgtagtttaccaggaagaacagacaatgagatcaagaactattggagaacccatttcaagaaaaaggcaaagcctacgactaacaatgcggagaagataaagagtcgtctcctaaaaaggcaacacttcaaggaacagagagaaatagagttgcaacaagaacagcagttgtttcagttcgaccaactcggtatgaaaaagatcatctctttactcgaagaaaacaatagcagtagcagtagcgatggcggtggtgatgtgttctattatcctgatcaaataacacattcatcaaaaccctttggctataactctaattcattagaggagcagttacaaggtagattttctcctgtaaacatacctgatgctaatactatgaacgaagacaatgccatatgggacgggttttggaacatggatgttgtaaatggacatggtgggaacttgggtgttgtggctgctactgctgcttgtggcccaaggaagccctatttccataacttggtgattccattttgttaagtatggtctacttttggacttcggttttctgtcttttcaggtttggttactagtttctatgctatgaacctataagtcgtttgtgatgaagtgtgtgtgtgtgatgtaagaggaatattgtaagttcaagattataaaaaaaaaaacttcaaacgtaagttaatgagcagggaaccatgattcttggatttttatgaatttgtttttgtgtccaatcacaaaaaaaaaaaactcatattagctttgatttgtgatttagatagacaaatccgatttgagttaagcctctaaaattagccgaaatccgtcaaaacaggtgatccagtcatatacacaaagcccacttaataaaaagatttagtcaaaatttgattaattattaggacttcaatttgactaaatgttaaattacaaattaaattgtaagagatttgtttccatttgaagcttgtttccagttttctttgtcaaacttatggaaaagcatttatcttattttctttctatctaatatgaattaaaagtacactatttttgttctttctcttttttttttccttaatttattgataaattatattaaaacaaaaaatcaacgtttttttacataaaatgcaaacttttctttataaagattacaaaatatctctatccgtgatgttctcgcgatgcaaaccacatttgcaatattataatcatatatatgaaagttggacaactctctctatatgattgacacatcatcacttttacatttgccatgtgtccactaaataattaatgtaagctcttcaacttttaataatgtatttattatttaattttacatatttaattgtactaatactaaatttattttgttattacatgtttttcaataaaattattttattggttttctcgtactcaaatatttttttctgtaatcttaactcaaattatgagtgtatagtagtcatggattagttaatagtttgaatagtttgcatattgttatatatctatataataaatcgtcgagggtgaagagtatgtatgaagtttaatcatcaaatttttaggtttcgataatcccaatattaccctctatttaattagtttaagacgaacattgtttaggaatagtgtgtataatgtattgttgataatgttgttagaaaaaaatactttaatactaagaataattacttattatataagtaaatgattagataattaaaaattatatttaaattaaacgatacaaaaaatctgaaaataccgcagtgtaacgcaggtgattacctagtaaaataaaaagaggtcacaaaactttctgatgcacaaagaaactcaatgtcaagttctccaaaacaaaaaaaaaaaagtgaataaaaaccatgaaattaaagagtttgataaacaaaacacatcattggaaaaaaaaaaaaaactgaatgcagcaaagtttaaatgatcacattttttttatttggttccaagtctaaaagttcaaattatccatcatttccgccccttctgctgcttcccccacctgatcttcctccgccaccgcttccccaccacaactgttttcaccgccttccccaccgcttctttcacggccataaccacttggtccacttcccccagtcctgtcatgaagttcaaacagcatgtcgggtaaacgacgttcgctatcgacagtagaggctacatgttcgtcgacttgacgttgcatccttgtgtccaacaaagtgttacgcggctcacccaatgggttactgctcacgttggcattgttactgatttggttcagagcatttggaaataacacactagctatattggtgaagattccatcatcaatatgaagaaaagaaggactcaccatattggttagctgaaccaacgataaatcatcaatatgttaattactcatccaataatatcaattccaaaccaaattaaatatcacacgattggaaaaaatttaggtctatatctattaccatgtcgagtggtgacatatcatcttcttccagttgatctacaggttctgcgaacaaccatttccctttttcaatctgtctacaacatggacattccatcttgttctttatgttaaaggatgaaccaacacaatctgtaagaaaccaaacctattagcgaatgatttttataattaaaaatattgtaatgaaaaagttattgtagatttgtgtagatatataaataaaaatatatagacagcaagaagtctcggggagtgatgtaataatctgaagacccaataatgtatgttcgagttaatgaacacatcaaacaaggtggagacagagacagagtaaaaagcaaattaatttcatcgaagaataaactaagataatagattcataacaaaacaaataataagaataaaagggatattaatcaagagaaaaaaaaatgaatctatgttttctcaaacaaagttccaattaaaaaaaatatttggtgctcacctaagtgaaacttgtggctacatcgaagcttaacaacagttcgttcgtcagcatcattagccaacggctccaaacaaaccgcacaatcgtcatcatcaaatggttcaacgactcgtttgctttctttgatatcactctctaaactcatagctattggttaatcttatgaaaataaattcattaatataaaaaaacttagataggaatactggaaaattaaatcctgagaaagatattttcctttaatatgagtgtatgttgactccctttatagatgcttttttattttctagatttctttctattagagtttatttgaagatataagggaaaaatacaaaaacaaatatatagataaacttcaaaataacaacactgcaaagtccttcataattcggaaaaccatcaatttgaccgtgacgttaacattgttattaatcctaaacataaatcaaatttgtttgtgtgcgtttaaaggtctgacccataacttctggcccaaagtgcgtggcacagtaagacagattgtgctactgaattgttcacatagttagtgacataacataattatattattatatagaacaacttagaattactaaataaacaaaaaaaaaaaatgaaaaaaaaaacaaattacgactagtgaccgcagtggtaataatgatagtgataacggccgtgatgatggtggctacgatggtgagaacaatggataccgttgtaacgacggtggtgatggacttatggtgatgattgtggtggctgtaacgatggttgcgacagggacgatggtagaaaaaaaaccttctttttttttgtttttaacatggctacaactttctagaattctgacttccaatttagcacttcttataaaccaaattcttctatcaaaacagggattcataaatcttctctacaagtgcagtgttcgttttgtctccctgcaaaacacagagaaaatatatagcgtaaaaaaaaagatctttcacttccaaattaattaagaaatttagatatatagacagactatcgaaaatgttacgagtaaggtttgacgatggagatatttatattcccaaaatctgttggtccttccgattggttattctccaaataaacaaaatgtaatggagggtacattaacaaggtagtaagtaaagggccaacaaatgagtttgcttgcacctcacatcacatttctccaagttgtggaataatctcttgtcaggtggaagcgtggatccaacgtaattattgttggtgtttaattggataagtgactttaaattgggaaaataatacatgaatattgccactaaagttgctttcgcgaagatccaagtatcttagttcattaattaggtttctgattgaacctatagaacttgacctaataaattttaggcctaaaggctagagttttgagataagaaaatctttttaatgaagaggaaaaatttttgatcaatatattggagttttaaaatagcactattttgtttcataaatgttgttgataaagtcaagtaaaatcacctcgcaagatttaacatcgcaagtgacaccctccaaaaaacagaaaacactgctcttgttccatgagcttaaccatgcgttcttatctcttgggttatatcgcaatatccgagattcatctttgaattttcagaaatggaggatcacaggagaaacaagagtgtatatagtagcacggaaataaaacagaagagatagcaataacaatggcgtcgaaccatcataactttctttctgtagtcgagtaatagagtgaatcacatcttttgtatgtgtctaattaagaaacctttgtaccaaccatcctctttaatagagagaattattgctaagcctccgacctctttgttgtgaaaccatatgaacaccataaccttttccttcttagaattcgcgcttagagctggtgttaaccaaggttaaggtatcttcctcaacgtcactatgccttaatttggaacgtgaccattcaaatatctcccaaactttacgtggaattgtcttcagacttaccaatcgacttgtgacaagctattatcctgttctccatgtatggatatatcatcgatttatcctatctattttctttatcaatctcttgtaagaatgttagtgtacttatatttgaagtatctaaccatgaggttgatgttcgtttaaactatgcacatggtattatatgaatgaagttaagtatgttttgtccacaaaaaatatgacgacagaaaacaatacgtatgaaccctatatatatacatatatttaatgcatccaaacagtttaatattcaaaccattatatcaaacaccaaaactatttttaagctttcgtcaattacattatcatcacctatttttgttttcactactacaatttttcttaattctattcacaattaaatccttttcacaattgaattcttacattttcaactattttgttacggagttgtttttttctgagactagaatagtttagaaaattattaaaattcaattatatttttttattctaaaaaccaaaccatccaattaaataagagattaaaaaaattgaaaaagacaataataataataataataataataataatatctagcatttgttgaaataaagagagtttgtgataagatatattgagcaaataataagggttagaaatctagttgtccaatgatgttgtgacacctgacctactcttacaaaaaagataactagggtttacgacaccttctcttctgtatacatatatatatatatatatatagagccaaacatatcaaagacttcacaccttttagatagccatcatgtaaagaaaaaaccctagccgcctaaagaggcaacgacttctctgatccattgttgaagatcgatgaagcagaatccaaagacgaaaatggaggaaatgaagatctcattttactcgcacatggacgagaagaacgaatccgattcaggcaagacagttttaatttttgatcaaatgtaagatatagttgtcttaaaccatctaatttttttcatttagttgttagatctagaccaaaggcgaggagataaagcgaaggttagatctgcttttgtaccagcacatatacgggaagaaaggaatctatttcaggctagacaatatcaaattttcgatcaaatgtcagatatacgtgtctcaaactaatttacttttattgatttagttgttagaccaagcaagcaaacaaaaacttgaaagaactctgcaatggattacactgtcgatcgatatggttaggtaaacgatacagatttcaatttaatctgtagatttttactcatgttttatattatactgttttcctaataaatatgttgtcaattactctgtagatctgtgatgaaagtggacagataatacgagctttgtcgggaaaaggtgacagaagtgatacaatgtgtcaacggtacgtcttcttttgtcttgtacttttgttgtacgagacttttaattagcataacatctgtcaatttggttagatagaaactgattagatctgagactttttattttgttttgttttgtttttttggctaaaaaaatcttttgttttttgtttctttgtttttgttgatattagactttagtgattagataaacattcatgtctttcagtggttcacataggagaaaaatctcaactttgtttatcaattagataaggcccgcctaataggctggtgcaaaaaataaataactttctataatatttgaattctaaataataaaatatttattttaatttctaatcaaacctccaacggtctttaacgacatgttttccgtttatttagttttcaaaattaacacatgttaagttacaatagtaaagataaaattgttaaatacgaactttatagtatattttctatttttaagggtttatgtacactttagaaattaaataaaccaagatatatatgtcatcaatagtagtttactattccgatcggaatagtcttgaccattagtcaactactattcaagctcatatttgacaaattgaatgtttatttagacaaagttaattagttggaggttttatatgggaacggaaaaatgagtttataatttgaaaatattttctatttggaggtttttagttgaatttagaggttttttgagatttttcagagatctaaatatcttttaaccgtattctactcttacacattctattttgtaataaaatttaactatttatttcagaataataatatggattttagttctacacacttcatcagttttaaaagatgagagcaaaacaaaacactaaataaataaaaagaaaattatatttacacgtgtcaaaatctgagatcgataaatttaactcgtggcacgaccctgtgagttactaactttgaaaaccatagcatagttttcaaagttagtaactcataagatcgtgacacgtggtaaatctattgattttagattttgatatgtgtaaaacaaaattttcatttttatatagaaaaaaataattgtaagtaattataaatatcaaaaagttagttactaactttcaaaaccgtactttatataataagatatgaaaattcactaaaaaattccatacaactttaggcatatagagcttatttatactaaaacccctaaaatatcctaaaacaaactaaaccagcaagactcatgttgcatgtgtcgtcattttactgtgacgcatgagtaagcagcactgagagattttagtcactcacatataaaaatatggtccattgggtgtggattagtgtttcaaggagccatacaaagattgtatgtcactgtgaattgtatagccctcctaagtctataagtaaaggacttctcctatcatcctgtctactagatgagacttctcctatcatcctgtctactagatgagacgtaaaactataacttttgaaacgaaggagatgaatttcagaaagtgaacttccaaagttttaagaaagaccatcaatgtttattatttctaggttcatgtcctacgttgaggatagaaaatttcagatgatggtgaaaacttagaggagtagttctctggtatagtgaccaatgcataagtcgaatcatttgggtaatctagttctgaaatcttaggatgccatatgcggtggtaatatgtgatgtttccgggtacggaaatttctttggaactaagaattagagtgagtgaagtcacatgaacattaatgtagatcactgatcatctggtggatatcaaaacaatcaaccacaaaacaagaaaacaaatgtacgtagaattccaagaccattagtgattacgatatattaagcttacattgcatcttagaaggcaattcaaggtcatcatgcatgttcaaagaagataaacaatgatcctttacctcttgtgtgaagcaaagtttgtttaacaattctctaggcatctctaatggaataaaactaagaggaccaccgagttcagtttccagaagcttcgtacgtagctttctccacgttttagatagtgttatgtatttatttcttacctatagaaacctgtcagctaagatccggactacaacaaagcacgtctactctactatattcttttgcgataatcaatagattcttctaacatcgtaaaggaagacaaaagagtatacatacttagttgtcgtcgtatctttgttgagaagtttctaaatggcacatagaaagtacataaaactatatgaaaccaaggagaaatcaatgaaacttttagagactgaatgatgttgttatcttagttgtcttccactagagatgcataatggaatcgttaataaaatttgccccgcacaaaacgaaggattattgctcttatgctttaaacatgtatataatattacactaccttttaagatgcgaggtaagctaaataaatactagtgattaagaaatattacaactgtcttcttcttgcgttgctacttgattcgaccacatgatcgctacaaggatgttcactcaatctatttgttgatgacgaagtatcttcctcaccagatgatggggtcatcaagtcagcatcaaccaaggatcatggaggaggcaccaataagtcgaccaagatccacgagagaaccaacctaagcataccaaatacatatgtgcctttcaagaagcataccagcccaacccgaagaatttaagctacaaatcaacttattccaaaaacttaactcatcaaggaatcacggagaagtggaattggttcaaaaatcttttcagatgaagatgatattaaagttacaaatcagcagatttccaaagaacccgatggagaccaacagctacgtattagaggatttcgacctgaccagaaggagttaacctacaaagttaattctcagatattcttgactcataagatgtagaaactagagaagagtttgggggaaaactctttcttatgtcttgttgatctcaatagcattgatacaatgtatatatatgcaatttagaatatgtttttcctaatttgaataagaaatagataaacatgaataagtatatatatatttcctatttagaatatttatttattcaaattaggtgaaacataatctaggttgtatatatatatgttataccaatgcgattgagagcaacaagacataataaagagttttcgaaaacttttttctagtttctacataagaggagatctgacaactggaataaagtcaaaaccacgtttggtttaggagatattaattttctaaacccgaggaatcctacacttgccttatctggaagctgacgggtttgattacttgcaaactagactagagtatcgtaccttaagaacatatcaagcttcatttacagccattggatcaggtgtattcaatcttgcgcactcaaacaccaagacattccatatctcgaccccaaagccttcaatgcactccaacaaagagattcctttaaatcaatgaagaacacgtcctttaggagcttctacatggaccagaggcttctctcacatggaaatatcaagaagatttcgagatataaggagtcaatcatatttccttattcggccaagattcaagcaattaagcctaacggctataatatcttgtgcatctttattttgtgcactttctttcttctttttgtgttttagaccgttagaaaaaagcctatataagcccgtcttgttctattgtaaagatcacctttcaatcatctaagaaatatacaagtttgtttttattcaaagagtgtctttgtttaaagtttctctttaagtttcatttgtgagattcatttgattcaaagagtgtctttgtttaaagtttctctttaagtttcatttgtgagattcattttattcaaagagtgtctttgtttaaagtttctctttaagtttcatttgtgagattatagaattaggattgtttatgtgattcaaacaagtctagttctccacggattgcgagagtcaatcaagcccaccgattgagagagtcaatcaagctttaccaccacctctatcttcgtttccatcttccgctaaagcttattgatcagtttttgatcaccgtttgttcataagattgtggagtgattcctgatgctatatcaccagaaaacatcataccttacaatgtatggtatcataaggtctcagggaaagattaccctaacgattcaacctatcatatcccttatagatatattttcattcagagtggcctagtaatgtatttctaatcattatcaatttttggttgtagctgcttttatctatgaacttctaactcataatttatatgcttatcggtagtgcatcattgtgttcatgtactatatcaactagtagtcactgaaaaactaaaatagtcataccatcgcagccctaaagttatttgccgaaatttctcgttttatactttttagagtaacgcttaattatatcgacatggactagccaaggtgaacaaaaccggtagaaaaactattgtaactatcgacaaagcgtgtctcgaaaccacaattagagttgatcttgaaaccttgacagatacctacgaaggagcaagtattacggattccatggtcgataactttttttgttgtcaaacaaccttgcattaaactaaaaccttaaaggaggagggttcatacaaactgaaattgagattacacaaagggacataggataaaagctccatgagttttccaaagatgtgctagacttgaagaagcttgcaaagtttgaaaattctgttgaagccatattggattcgtccatggaggcgtactccgcgaaatcctcaaccagtgattggtcataaacggcacgagcgaatgacgcatacttgcctttgataaaatgctccacaagggaggctgagacttggataacacccctgaaactgtataattgaactttaaagagcttagtaaacaaagggggcaaagatagaaagttggagaagcttcggtaaccaccgctcctcggagaggggatcactgtcgataactatgaacagattttctgctggaatccctaaagtttggaattctgcattagtatttactatttatttagcttacattacatcttagaaagttagctgaagaagctttgttggagtttggcttaaaagtgaagggttgggtctttctagctagccccatgaacagtttatcaagcttagctcagctgagattgcagaagccgtgaaactgttgtaagcgaggttccttgtggtcgagacagcacaaatgccttgttggagaagaaaacgaagaaaaagaaatatatggactaacacaaactcattttcttgttcaagtatggactctactgttatttatctttctgcatccttacctttctatgatgtctaatcgaaatgaaccatatcatagtgcaattctatagctttcctggttaaacatataatatttatattaacccattcattatcttctacatgaagaagatatctagcctagagacaaatccgcacaacttgcaatctaccattaggaaagttggccactaagacttgtgtttgttttctctaaaggttagggtcacaacttatctatcttttacctcctcacctacttcacagttgtcaagaagcagatatctttttgataatcaaaattataacttccatgaaggttattgatttatatatgttagtctatcacctgaaaggctgaaagattgtaaataaatgtatttgttttattttgtctttgtcgttggttcttgagaaattaaagaggaattggtctttcccttcaatggctccaatttatataagtctttttctccttttttgcttttgtctttctctttcaactcctattggtttaattctctgatgcttttaagggtttaatgttcaattggaacttgttgatcttaagattattgatgttaaagaactttgacgtagagttgtcatttgggtctaaaaaccatgggcagcccatggtttttaatattaaactgaagtatttaacttatgtttagtttatgaagtattgaagttatgtcattgtatcattgtgtgaaacacttaagatttaagtatggagttttgaataaatgtgttcgtgatatcatgtattatttagatccatgaattgtctaatttattatagttttttttggggttggtcctatttgggcttaacccaataatgtccaaaaaatggggctatccatttgaacatggacagtccatttgacatccgtattttgacatacgtacgttgcaaaaacaagccttttagtgagaacgtttacaaaagaccctcttatatagggaggcggtttttttcttacaatcgaataaaccaaaatcacatagattgttaattttgattaaaccagttctcaattactacaataattgagtattgtggctaactggctatcgttaacatatatagaaaattttcgtacctgtatgtgtatgtggacaacttttcaagttaaatttgtctatagctgtaacttcaaaaatagttaacggacttttgttgcttagtcttagtcaactgaattatgtgaccaaatattttttagtaatttgcttaccttatagctatggatataccgttgctaatctattggcaatctgttatggatggctaaaaatcatgtcatcttgattaacgagatggcacttaaccacaaaattttctatcaccaacaattgttttttctattttaaccacggcaaatctccccaagtaggattcgaacctacgttgtccagaaagactcaaagaggattctagaatagaaatatgttgtatatcattttgtaatgatgtttacatatttgttttggagatggataataaaattgcaaaaaaaaataaaataaaaaaatgacaatctaaaaagcattttttttttggcggaagaccgttaaaatataagaataaagattgttagtgtacgtaaatgtaatactattagtttagtatagagaaaggcaattgtacttgtacaacaaaattgcgaaagtttcaaaatcttagctttgcatttgcatgtaggcagattttgtatatatacgtgacgaaatttaaaatcaaccatttgagtgattggtttatttttcttttctataagacataattgattctttatctataagcgataactcactttggaagcaaaagattctaatagtagaacgttgaatttctattttttctaatttaaaaaagagaattagaatattatttctacttctcgtcattcacaggtgattttattccacccttatgtaagcatttttaggtcaacttctgtatttgctcaaaaaaaaaaaaaaaaaaaaggtcaacttcttttacgttgattttattggctaccttttttttgtcttatctattctttctttctagttttcttatatttcactgaaataaaacgtagattgatctgataaatggtaagatcattaaataacaatttgttgaatcttttgggttcataaggaattttaagattttgtctcgtacgttatagggattcttcaatcttccaccggcatttgtattaactcgtgattttaaagaaaaatccttttcggtggttaattagtttggtgtatcgattgagataccaatattgtatttcattttaaattggttattcgtgtaaatattttggcatatatttagcgtatgactcattcatcttaaatgttaaaatatttttctattaaattcaaaaacttaaaaaaaaaaaagtgtttacaaattttgctcctttttggtcacaatgaaccaattaacctaatcataaatttgtctgtagttaaactaattatgtaagttagacaatgttatctaaatataaccaacatccacacttgatccttccaatatcaatcctaattttttttttaaaaaagcttgaaaggtttttgatcctcattttgatatcatcgtctcttcatagttgaagctttgcttcacacccaaataaaatcaacaattaattaagtagatggccattgtgaacgtttccgttctccctctccaaatctcataaatttgtatttgccaagcaattaaaagtcgcttatggattttgtcccaaaacggtactgagagaaggtagaacttatatatgtaaaattacgtctcaggagaatgagcattcgaaaaacaagtggttacgggtttcatgagaatatatatgcattcgaaaaatcctaatctatgatccaaactctaaaaataaaattcgctaatatttacaaagagctaaagctaaataaagtgaataaacatattaacagagttattatatataatttaaaaatattatatatatgtatatatataacaaggagacagctcaaaacggatggattttaaaaaaaaacaattacaactaacacataacagcagtattagtatgaataatcaaactacaaaatgacgactccacaattatgccaagaaaataaaactctaagttaatttatacaatatgctgttagaaataaagatatcctcgtcaactcgtacttcgatgatcgaagaagttatcattttcaagaggatttatatcatgattatttgattgcatattagattcaattctttaggcaatttggtatatttaattttcttctgaaaattagccttttcgtgttaaacaaacaaacagtgttcatagaaatagttaaaatgataaaaaaaatgtttttaaaagcacatcaaaatacagaccacagaaagaaagaaaaaaaattgggttgttgatttttcttgtgttattccaaattaaaaaagaaaactaaattataagttatgaacaattttttttcctttctagctagcaaggcggtctaggatctaaaactttatttttatgtggtaatccatgatgtcacacaatttcaaaataattttccatgatttagtgtctgatcttgacattaagtttacttttcttaaaataaagtacaatatttataagtcaaatcataaaatttattgttttaaagattatatatttattttgttcatcagttatatatataaaacgtaacttggagtttcggagttggtatttcacaacaaaacaattccaaatctatatcaagagtttatgtttttctttttaaaacgaaactagattttaactaatatatattaaaacttgcaaattttattttaacttggacgatttatttttaaaagtaatatatattaaaacttgtaaattttatttttacaaaatatttatattttacagtttataattgttattaaatactgaattcatgagacaattgttaaaaaaactgaagttttgacccctattaaaatagcatattaataatattttaaaattttataaatattgattcaaatacatccaccatataacccaattccaaaataaaacacgttctgtaatttctttacccggcccatgattgttttttaaagtagtaatttttaaaattttagaattattttttatatataaaagttttgcaaattgtatcattctctaatacatttatattttatagtttaaattaaattaattaaaatttagatatcaaatcttataagttgattttgattggctattatttttggaaattaataatgtatttcgttttttaattaatttaattaattaaattagtatttgactttttaatccttaaagagataaattaatttactctttaaaattttatttctaatggcatacctatgtaattacttacaaaaattaaggttacatttaaaatgtacttcccaaataatatagtaggattcatgtcttaaatcattagtaaaaataaatagttgaaatcaaaaccaataggaatattatttgggacgaacttttaatctactaacgagtttaatttatttttcgtagaaatgtcaattcggttacctggagatgacccaaatcattccttgttggaaatttttggcgtgaatatatcttttagaagcttctccgaatgttgaatagttttcatatctcattagttttgtagttatgttactcttccataatctcgaatattgtatagatgagatcttagggctgtatatataagtttgatgattaacaatgaaagcaaacctttgtggtataactttagtatggtataagagccataagacaactcaaaaacccggccctatatctcgagaattcaatatctactatgtgagaactgaaaacaagagttgaaaaccaaagccgtggaagcaacgctatcactatagtttaatgcaactgaagggggagaattatgagagtaaattatactatttaaattcttgctacattataactttgaaataatagtactagtttgctaatgatcatcaatcgaaacaaaaagtttagggaaaaaaagttgtgtatccacataaactaactaatgttttgaaaaaaacattagtataattgttggaagtgatttggcacctcttcatcattaagtaacacgtaacaacaataccacggtcatagtaaatagttaacatagacttatgaaaagagtgatttcttaatcaacgcttgcaagtaacctgagtcaatcctagaaaaaaagtttaccagaccacctagtctctctagcgttgacttttgtagcacttcaaagttttaccatcattcgaataatccaaacattacaaaattggtatataatcttggttttcagttagaagtgtatgatttgtcaaaccggtaaaaaaattcagagaaaagatatttacccgagtgacctaaatgaagtgaacaggtcaacctgacctggaatattcttaaccaccagcttatatagatcacatatgaaaaatataaagtgtgtagatagatgcttttaaaactttcgataaaggcccgtcaacaattgataataagttttcgtgtgaactaaaactcaaaagtattaaaaagaatataccagtgggtcttattatgctcgattatataatttttcttgcgtgttattatcattttttcatgaatcctaattatttatttggaaaagtccaaacccggagatgcagattccctggtcaatatttgcttactaactacaaatgtcggaatcaactttagttcattttggttcttattgcgtctgttttataataatcaggtgtagttaaagcaacttttttttggggcaaattaaagtaactttctaatagtatatatatagagaatattaatacccaatatttatatacagaaaataacatgtttaaatcagcttcttctaaattttaaagtaatcagtttcatgaatttgtaaaaaaaattctgcagtatcattaactagatgtctgattaaatatagtaaaacatgtgtacgaattatttagtttgtatggagaaatatttttggtcaagcgattaaagttccattttttgtggattttttttcgctagaatttaattacgaatatttgttttgtagagttaacaacctaagaatcgagatatatctcgacatcgatgatataaagaaaaaaaaaggtatagtatatatttttaaaaacatacacttattgtttttagtgatgatactggtaaaacactttcatgcaatattattgaaataccacttcaaagactaattttcggtatcgatagagttttagttcgtcgacgtcgagaaattttatatcctcttcgatttctttacagtttttatcgattttttttgtatatacttctaattttcttctctctatatgacttttctctcaatttcttctttttcatatctactttttaagatattttaaagagtcgtgaaagagcatcccttcaatatgctcatgccattggtattgaattcaccaaaagagaagcctctcatcaaataagttcttcaatcccgaaacttgagcttagtctccaaatcctttgagttaagatgtcttatgaccctcgtcatttataaattaaactcaataaaattgatgtctacactttgatcggattgaacaagaacattgtcatgttcacttgcaatattcacataagcctttatcggattcagttgtccgcaaatattttgatatttactcgatgaaagatctgctataagggtgaataaatttgtaattcaagccccatcacaaatcgcggtagatcaactgcatctagcttggaaatcaagagtactatatgctcgttgacgccttcatcaagaccaaaagtaaactgtacattgttgcctctattccccaatcttggaatctaaatatctcttgatcaattttttatgcttggttctatcatatagttactttttaacttgatgaatttccaaacatgttttaggaaaactactttgtgaaaattttatattatataaatagaaaagataatttaacggaaaagaaacattaactttatagcatgtggtatgtggatattatgctcactctcaattagtcaattaagatataccaacaacaacctggttgagatatcacagaaattatcaattaatatcttataaatgaattcgaaatatgctaaatgcaaacatagttttgtaagtacgtaatttataatatattaatactcaaatctaagacttacttttgaaaacaaaagaatatcttgtcaaattgacactttttaatgttcaaaagagatagtaagaaatttcgcctaaccaagaaaacaataaaaacaaggaatttcagtctcaatactatatatatttttctgttattcacttatatatttggatgtgatagaatacttttttaagaacacacatatcttatcttcaccgatatattagctgatacattttttacattcctttttattattattattcttatttattttctattcacatgtacttacaaacaaaaacttaaagactttgcaatttgcgttacgaatatttttcgtcaggctgtaatttgaaaagtcttctagatgatttcaagtctctgcttaatgtgccaactaggctctatgtcactactttgtgttgtctctaattctcattcttcttgacaagaccaaacatatcactaatgatgaagagatgactaatatttgtttatacatttgcttgtaatgaagacatgtagtatagcaaagcaccatataatatagtgatagcattctattaatttgttcttttttacagccgaagaagaagagtataagaaacatgtttaagattcagccttaaacaagtgaagaaaaaacaaaaagaaaggctcaacgaatgggaactttgatccaaccattggcaaaagcaatggctaagatgacgaatggagttgacataccgaatatgataatgtaaggaagaggcgtcttcatcggattctctccttctctttctccaacgctttgccaatacctacaaaattccaatgcaatcctcatccataaccatttcttcaatcacaattgcatgtttatgaaaaatgaacatgcaagaatttaagttctttttctattttaaaagagtttagttcttttgactaaactacaacccaaatatttttattcttttgctaacacggatttgagtctggatattgatacaatactaacacaatgtcacaaaccaccagtctacatgtcattgacacatacaaaaaaaaaaactacttaaattctgcaatggagactaaaatttttgtattaaattggtaacctacatatcgttttgtaattttccatgttttcatcaatttcctaggtttgtttttctgtgattttgcaaaattacattaccattctatgagtttctgttattttctacaatctcatgatgaaaattgagaattaagattaacttactgttcaggttcttcctctttggttataaactttttcttatctttaggcttcacttctccatctcctccaccttatgcaataaccaaagattaacaaaatttacatctacaaacaaataaaagatataagagtacctaatttggcatgaagcttgaattctgggaatcctaatggtgatggtggacaaaagaattgaggtaaagcaagcaatgatgaatatgaagaagatgatgaagttgaggaatcactagccctgtggctaaacgaagaagaagaaattcgaaatttcgctgccatttccaacaactatatggatgtgatagaatatttttacattttatttttctgttattcacttatacatttggatgtgatagaatatttttttctgaacacacagatcttatcttcaccgatatattagctgaagcctgatacatttacattccttatttattttttattcacatgtatgtactaataaacaaaacttaaagactttgtattatgcgttacgaatatttttcgtcaggattgaaaagtcaaccctaggcctttagcttccttcttttatataaacagagaaacaaaacactttctttctcagcctctctgtttcatcttcttctctaaactctcaacatgtcttgctcggccaccgatctcgctgtcctgttgggtcctaatgccacggcggcggccaactacatctgtggccagttaggcgacgtcaacaacaaatttatcgacaccgctttcgctatagacaacacttaccttctcttctccgcctaccttgtcttctctatgcagcttggcttcgctatgctctgtgccggttccgtgagagccaagaatactatgaacatcatgcttaccaacgtccttgacgctgcagccggtggtctcttctattatctgtttggctacgcctttgcctttggatctccgtccaatggtttcatcggtaaacactactttggtctcaaagacatccccacggcctctgctgactactccaactttctctaccaatgggcctttgcaatcgctgcggctggaatcacaagtggctcgatcgctgaacggacacagttcgtggcttacctaatctattcctctttcttaaccgggtttgtttacccggtcgtctctcactggttctggtcagttgatggatgggccagcccgttccgtaccgatggagatttgcttttcagcaccggagcgatagatttcgctgggtccggtgttgttcatatggtcggaggtatcgctggactctggggtgcgctcatcgaaggtccacgacttggccggttcgataacggaggccgtgccatcgctcttcgtggccactcggcgtcacttgttgtccttggaacattcctcctctggtttggatggtacggatttaaccccggttccttcaacaagatcctagtcacgtacgagacaggcacatacaacggccagtggagcgcggtcggacggacagctgtcacaacaacgttagctggctgcaccgcggcgctgacaaccctatttgggaaacgtctactctcgggacattggaacgtcactgatgtatgcaacggcctcctcggagggtttgcagccataactggtggctgctctgtcgttgagccatgggctgcgatcatctgcgggttcgtggcggccctagtcctcctcggatgcaacaagctcgctgagaagctcaaatacgacgaccctcttgaggcagcacaactacacggtggttgcggtgcgtggggactaatattcacggctctcttcgctcaagaaaagtacttgaaccagatttacggcaacaaacccggaaggccacacggtttgtttatgggcggtggaggaaaactacttggagctcagctgattcagatcattgtgatcacgggttgggtaagtgcgaccatggggacacttttcttcatcctcaagaaaatgaaattgttgcggatatcgtccgaggatgagatggccggtatggatatgaccaggcacggtggttttgcttatatgtactttgatgatgatgagtctcacaaagccattcagcttaggagagttgagccacgatctccttctccttctggtgctaatactacacctactccggtttgatttggatttttacttttattctctattttctagagtattattttaaatgatgttttgtgatacttaaatattgttttggatatttttttgcatttcagtaatgttttagatgtacagtttcatggggttgtgatgataatatctatgtggtcatttgtgttctctttggagttttttctataacgcttttttcaaattttatgatcattatttgctgcattctagataagcaattaggaatgtgaagcatggactaagtaaaagcctgaccgtttttaagtttggacttttgatatagctcatacttttttgatattagttcatacttattgctttaaatagctaaaaagtctaaaacaaaccttgcattgacgcaatagatataaataactcgaagtattgctttctagaagcattaacaatttggtaaaacgaagttgaaccatttactcaagcataataatcagaaatgacaatctttcatgtctgatgcaaataaataataatttatggaaataatttctatgtcttacatcactaattagacttttagatgcttgcaagtttgaagtttcagcagaagtaggtgcttttacaaactcttttttgttttaatttgataaagtgtgtttttacaaactctgttttattttattttgaaaaagtgtgtttttacaaactttcaaccaacctattcacgaatctctaatttcatttgtccaccacatgaaataatgtgtttattatattagtgttatttaaactcaacgattttggagattcgtacgtaccttgttgccgcaactaaagattcggagtatcacagttattatattaacaaatggattcacaaagtagatcgcgaattacttgaaagttggaactcgtgataatgttgtcgataccactaaatggcaacttcgtacatatgtaaaaaaagtcagggtatttgggtgcttttcaaaaagatggaagcatgacatgagtgatgaggcagctcctacaagttggaaagaagatattttgtctttacctccaaattaaaaaattggcatttttaaatatcaaaaggtgaagaagccaatcaattagtatatttatttgtatttttttttttttttcaatctcttttacaagttttaaggaacttaatggccagcactttgatttgatagatacacactaaatgaaaaagttgaccagatggctccggtactcggaaacaaattgcatggaaattttacataattaggtacacacatttcaacattttgaagaatatatttgactgttttgattttgcagtttcaattgctttatgatttctactcggttatttattgctttcctaaattttattctgtgtatcttactttattattttttagaatttaatatttgttgcttctattctcaatgaatatactcaacagatgaaataattaataaataattccaaacatttgaacgttaaataattaaatagtcttgaccattttaatattttttctaattgtaacattttctttagtattactaggttatgattatcattacacgtttgggttaaatatgtttttgaacttttggcgacaggcgagtcacttgttttataaacttaacttatactaatcatttaacaggctacatgtactttgctataggtgagtcatgtaactgtttaattagctagtgtgaatgtgtgatcgacgaaaaaaaaaaattagctagtgtgaccatattacttatacaacaacaaactaaaaacttgtcaaactaaaaaaagaaagtaatatatctgtttgtaattagtctaatcgtattaaacttttcagttttcacataataaaacaaaattacaaaaatctgattataaatgcatcactttttgtgattaacaattttttaccctaaagcaatagtaattattcttaaattttacaattcatcatcattaacaaatcaaagataaaaaaatttaaaatgctcacttttcatttcttaaaaaaatttaatctaaattgataatcattatctactcggaagaaaataatcgagatgacaacggcttggttcatgtgtgagcctcaaccaccccctctttctccgtatttccctaacatgtcttcacgaaaattttataatgatttatagaaataattctgtgttgtcatatattattggaattttcaatgctggaaagttgcagcagaacttggcgttttacaaactttgaaccaaccgaacaggaatcttcttgtcattacatgcaatgtttatttgattcaacattatttagataaccgaacgaacaactttggagatacgtaccacgttgccacaccgcaagattcgacgtgtatcctaatattttactaataagaaagataagattcgcacaaaagagatcacaatttcgttggagcccgtgatatcgttgtcagtatcataaatggtaattccgtacatacatgagttcttatgggtaattttggtattttagaagtcagaaagaagagattttaccaagtttttgacgtctctaaaagtgcaatttggacctttgtatctctttatcaatacctaaataaagaatctagatgcaaaattgttccgcatgttcaaatttgtgtaagaacataacataacactattatatgcaaagataaaacaatactccatctagaaagactcactccaactgtaatattcataattcatttattgttgctacagattctgaagttgaaaagaagttgcgcaaaacaataatgatactaaaatggcatagtcaatattagtggctataattaataactatacgttaccgtacagctagaaacaaaaccgtaagactttcacgactttgatttttccttgttgatttgactttttgttcgaataaatatattcaatgtatcatatgcttccaatattccaatgattaatgtgaaaacaattccattttcaccttcaaactaaaaaaaaacttggctgacctatagattctaaataattttattctagagtccgacttcgtcatagattctaactatttgattgaagatttttttttttcgattagaactgtttcaaactttattatatacaagaacgaatcaaagtatatcactctttactctttagtgaaaaggtgaaaaaatgggagaagttatttaaatttcttcggtgaatcatacatgtcctcataaagatactaaggtaccagaaaatgatcccacatacattaattactttcaaaaagtaaccacgaacgtcatttactttgaagcaaccctacctacccatgaacttaatagtttcatagaattaatcacgagaagaccacatatttggagagacattataaaaacattacttttatttgtaaacatgctatcgaatatcttaatcaaaagatgggatccctctaaagatattgtgtgctactgctctattaatcttattcgtcaatgttttttttcccggaaaatatttaggttcgccttttagggtgtgtaattataatatttaggttcgccttagggtgtgccgttgacggctcagttttctcggacttccgttgaaaggcttccatcgctaggttttttgttgattcggtctttgccgtttggtagctcgtttcttgttccttaaggtgtcttttaagttaatatttagaatcggtttatcacttcattgattccaaaagagtaatttcttttgttgatgtcgatggactgattgttctttgcttccatgttttttatcctttttttgccatgagaccaaaattgtaggatttacttaattgtatctcctaaacctttttcatttttcaatgaaatatttacattcttagcagaaaaaaaaaaaaaaaatttgtaacaaatggaaaactagctcattggcaaacaaaaagagtaaaaccagcccatattaaatatgactaacacaaccatgtacaaattaactcgttgccctttccgtaaaagtgaaacaaatagatttatcttcgtgattaacgagagagaataatcgcatccatcaatcgtattttacgactttcgattgtgatagtttaatttatttcaatgtatgcagaaacatatcaactactgaattatatatattaattaaccattttgtagtcagaattaactgggattaaatcacccaatcctaaatttgattttgacctaactaatgaaaatttaatagtaaaaaactattactttgattttacattttaactttgatagttttttctaatttttattaactagaaacctaattttttttcgtcaactagaaaactattctatcttgatattattttataattttacagacaacagaattatatataaataatttgagtttttttttgtagcttttaaaattgcattaatcaaatttgtttaatagaggatataaacatggtattaataaaaaaaaattctaaaaattcctctagttccacttttcagccaattcctcaactgatgtatcttaaaaaaaaaaaaaaaaatccacagattcagctaaaaatcactacgaaaaatgaacgattaaaattaacatgggccacatcaattgggcctaagaagataaagatgggccacaacatttaggcctaaaagaaaatgacctcaacatcaaaacttcgacagtcagtcactgtaacattttagatctttcccgaagaagaaaacgaagaagagacgaagagagaaatgaggccgatgcagctggatatgttatcggagatggatgatgcaggttcttcgatggccatggacgttgatgacctcgaagccatggagatactcaacgaaggaggacttgtctcagataacaagctcgccgacgccgatttcttcaacaaattcgatgatgatttcgatgacaccgatatcaactaaatccggttaagtttcctctttaagatttcagttttttttcctaaacttgatgtaatttgtggagaaacctatgtagtaagtgtgtaataagttctgggatttttatgtttgtggtatgtaacaatgtttttcttcatttggattactaaaacatttgatttgtgtgttattgtgctttgtctgattgttttttttggctcaaatttagaatgttttttttttccttggttctggagatgatgatgttttttggagattgaaacctaattttctttagtgttttggtattttagtaactgaaaattagagtctttgtatgtgaagaatgttgtgaatttgtatgtgaagaatgtgaaagttattgatattggcttaagatagaaactaattgattcatttggtaccatattccattgtgattgcttgtaatttcaacatctgaggtctctgaaatatgtgttgatgtgtttcattgtgttgatattcatgtgactcaccgggtctagagaaacttcccggtgagagatgaaatcctcatgtaagctgtaactttccactagtgattaagtgaactagggaactcatactgaagcacatattcctaccaacaatttaatggcctaagagaaatagtctcttgtatcttccatgtaactcagatacatcagtcaatgatttatatggatatggtatcttgttccatgttgatttcttgtaaattcaccatctcgtggtctctgaatgtgtgttgtattgtggtatgtgggagggggtgtataattcctgtcttgtggtatgtaggagggggtgtataattcccctggccaagttctgttgttgcatcgtgtcatattatattctctgggccggttttgagatggaaataatgtgcttgatgttcaactatggtagaaaggaaaaggaggctaagcataaagatgtcacttgtcactttgtcagtccctagcagtctttgttacttgccttatagtcgtatgtatgtagtgtagccaaatttcatgagatttcaacattcgatagcaattcattagatatcggtaacctcttttcagaatctcttactaataaaaaaaaagttatttgaggcctctcacactacccacctcagccttttaacaaatgtgttctcaagttgccacgtcatcaactctctcaaaaactcccaaatctctgcaagccaccatccatgagcctcttaactttcttctcctccctacctcaacctttataaaatctccacatcttggtttaatgactaaactctaaaattttgagttataaaaaagaatgtttgttaaactatgatattaacgctaaacatttattgaaaaaaaagttgggtttcgattaatattaaatatttcctatgtttcttagcaaaaataaataaatattttctctgttttttttgtttgattgttagaaaaaaacacacaaaagtaaatatattaaagttgattttaaatatattatattttgtgttttacaattttctatcactttaaaccaataaaatttaattatttttattaaagtttacaattcattaataaaaactaataaatattacataaaaattttaaaaaatcaatttttttgaaacaattttttttttcttcaaaatcaacaaaatagaaccgaaggaatatgaattacgcggattacaattaaattatcaattcatcgatcacctaatttgaacgagaaaaaacaagtaaaaaaacgaaaagtaaaatagtaaaaagtaaaaatacattctattggatttggttcggtatcaataaattatgatgttcttcacaaaatgcatttatatgacgtgtttgcttcctctccctccagtttcaagttgagcatatctgattagcaaaagcggttgaaggtcctctacttctcggcccaccgtaacaacatacactgtcaatccatatagttatcataaacccacacgtcaacgaaaccactcttttgacttcatcctctatccaatcacaccacgccacgttaacaccacgacctagtgtttctgtgatctccacacagagaaagaagcgtttcggttctgttttcgccccaacacaaagactccttttgtttcttttcctcaattggatcgaaaaaacccctaactttgacatggaaggagagattcaagactgggaaatacttcagagctcgagatctaccacggaagatgacaattcgaggagcttggaggagattgatgatggcacgcaaggtatgattaggtttgatcatttctctcttgagaaccagagtggtttgtctcgtttggaggcaaacgatgaagatgggtctgttcaatcgggtagtccaggatggatcgaacctagctccgatgttccttatggtccgaagcattttagtgagttatggtctgattcaagcagtgatcggcttgatgatcagaggttagtggatgatgatgtgaataacgagatgggtatagagagaaacgaagtgggtattgttgaatatagtgaaagtatagctcaagacatggatttgataagctctgatgagagaaaggaagaatctttacttcatccagtggaaggagaaggaaactctgtttctattgatcctggtgttaaatctggtggtggaggaggagaagagaaagggtttgtgtggtggaaaattccaatagaggtgttgaagtattgtgtgttgaaaattaatcctatttggtctttgtccatggctgcagcatttgtgggttttgttatgttagggcgtagattgtacaatatgaagaagaagactcgttccttgcagcttaaggttcttttggatgataaggtaactagcttggtttatttgattgtttattgttctttgagtatgttgattcatgagtcatgtggttactgtatgatcttttggtgtgatatgagctctgcttagttcaacttttactgcttagttagatgttttattagtgtcaattgttgttttgatggggaaaatgagaagatcagatcatccccttgtttgtcctgggaccagtttcttgttgctaagtagtttagatgcaaccagcgactcgaggtcatagtattcaccaacaggcatacactcgtacccatttacactatcttgctaagggtttttgatatagcaccactgcatcggttgagttcttgatagatacttttggcatagaatgtgtagttggtgagagcagtgttaatagtcgttagaataccacctgggtgatctatttctttgtccgtcctctctgttgtttcatctcctataatgcttaaacaacatattttttatttttacattttgagtttgcatgttctttctaatagctaaaggatagttgaaagatctttagactagttttcagtagttattctttgtagatttttcatgttggtagccagagatggaagttactatatattacgaatcttatcgtaaaatgtttctttgaggaatggataaaagtagtggtaaaacctgaaagtttagtttaactgatcttccactggtacaaagcctcagtaaggacccaagtttgaatcctgcttacggttgcatataacttggcggatcaaatatgtcttttgctgctgaaattcacgttcttgcttgacttgtattcatctttttcactcatggcaatgaagaacaaaagttctaagtatttcagaacacaattcggaagatttttacaccatctgattcttgtattgtctgtcttttgaatgaaatacttttttcagaaggtggcgaatcatgctgctcggtggaacgaagcaatctcggtagtgaaacgtgtgcccataatccggccagcacttccgtcatcagtgggtatgaaccagtggtccatgatgagtttaaggtgaaaattaagtgaatttgagggcataataatgcatatatgtgagattatatgatttgatgtggttggtgcatgtatcatatgattgtattaaaaatgttacaaaaacatacaaaaagatgcttgtaagtttgtactgtgtgtgtatatattgttacttgcttggtggaatacaaattggatcagaatcatagtgcagttttggaaggttgcggtcagaatctaaccttgataagcttctgagctggtcttagtaggcagtgtcgtaaagagattgtacaaagacaaaagccaataacggaattttggttgtttatttagaaagtacgactctttaagatatgaaaagggttaagacaaaaacccaaattaacagggaagttcacgtgaagagggcaatgtttctgattgatgtagccatgtaggagtctatctttcactttatagctatcctaaactctacgatgtcaattgtgattagatatatgtctcttcttcttgtttctttgtcttctttcactctattattcgttgaccattgtaccaccaaagtttggtatactcacttatcatacttaaatcacaagtgagtattgtaaggaactaaggatccaaagctaaagcatactcatgaagtttaactattgacgtttaacggaaataaagcaaaccaaaattcgaacttcaagataaatctacccattgtcttcacgtaacatactcaaattttggtttgctatgtttgattcggtctataaaaacacagacaataacttaagacctatgtaacaatttcctccatgagaagaagacaaattagaccaaaagtttgagagaaacctataaaacctacaaatattgggaagaaaaaataggagtaaataggtatgggtccatgttaatgatgcatgtgacaaacaatcaaagcccacaccattaattggagattgaagaaaaaacactgcttttcatattctgtaacaccacttcaattcctttttctcttgtttcctattcagtactatgtcctgagagtgcccataacttcttttgtctttttatctcagtttccataagaaataatcaactcaagccacaatgtgtgtttgtgtgattagttttgtgataagacattccataattttcctattgtgtgtttaggataagtgaagatgcttttggtttggaccatattatataaataacatgtgtctgcaatgccgcaaagtggagctttcttcactcacaataatcatttttttttttcattgaatgaaacaaacaagacattcaaaatagaacaaaagttctacagagatagagagagaaagagagcttttcttcatgggtggttctacaagcaaggatgagagaaacagtagtaagagacgcatcaaggtgaaagcaaatgaacagagaaggagagaaacaagaagagagcttgatgagaaagagagagtgattttggcgttgaagatggcagagacagagtggaggaaagagaggaagagactgagagaggaagtgaagaggctgagacagaagatggaagagaaggaagaaggaaaggcgaaacaacacgagtgggaatgggtcgtggaacagatgtgtttagagagagcagtgagggaagaagctgtggagaggtggaagcagctctactttgctatcaagaatgagcttgatgatctcatccacacaacatatggtaagacctttcacaaataatctcatctttgatgttttgagaaaggaaggtaatgagttttttttttcttttgtaggagaggcactgagacagaaaccgcaagaagaagttgcaaaggcagtgcaagaactcagaaaggaagttaaagctaggggagaaaccattgagacactgaaagggagaataaatttgatggagaaacaacaaaatgggaaggaaagagagattgacttactgagacagagtctgcgtatcctcggcggtagcagcgggaagaacaaggcactatcatctactaccagaaacctgacagtattcaaaacaaaattcatcgggtgtaaataactgttttagtcatttgaagttacttttccacaaggattgctgtataagtagactcagtaagcttcaagcaataataagccatttctttcctatctcatgacgctaaagaaagttgtatatacttcacaagtaacatatccagcatcaagaaaatctaatggaaaagaaaaacggtgaatgatcagggattaagattgttgtctccaaattgatctaagattatgtagaaacttagtacgtaaaaataagaactgcgtgcaaaggttccaaaacaaacgaaagcttaaggattgagataacttacttctcccgcagctgttctcctgaaaagctcacagatgcaaataatgctgaaactagccaaccgagaggcgaggtccgaggtgtaacggtccctgttagccaaaaataacattccctgcaaggtctccctgagcatgcagtgagagtataatgttcaaatttcatctatacgcattgtgataaattccaaccatcttgtccccttttgataccatgtctacgtttaagtttacacgactgaaccacagatcactataaaataattacaatggatgcttgtctcttgtatatagtatacagtgtgaatcctatacagctgaagcgagccactacatgctctcacttagctctctcccactgattggatagtagtactttcaacgcctttcggatcttcaacagttttgtaatataacttcacactctgaaaagattgacaacaaaaaatgatgccaatgagatatggaaattactagcagtctcaaaccaacacatgctccatccaaaaaagggttggcgatgtttaaatgtcactatcctgtgagggactgaatctttctaactttaagtcacagtgtaattcttgaaaacaaaaaggaaaaatgcatggagttatacgttgtgttatgacaacttatcaataatcagcaattgcttaagtggcaacaacaaagtacctacctctaacaatgtgatgtaatagaaatcctccatgtgctgcataagggcacttccatcacgaagtgcattgaatattttaatttccgtttgaagtatcttctcaacgagttccttctcacctttcatctgaaagaaaacatccatttaatctcatgtcaggaaatcactcattttcttgttcaaggaatatttttcactatattttttgcctctctacatcttctgaataatacccatacataagcttctgaatcccagaaaagatagatagtatgaaaaagactacgcagaaggaaaacaagttttaagttcattgacgcatatgaagccatcacaataaaatagctgctagtaaatgtgaacctataattataggacagtattaggagcagctcttaggaaataattcagtttagagatctctttttttttccctattaaattattagctatgaaaaatacataaacccaacaacaaacatatgcagaatttatgagaaacacaagcaggaaaattaaaactagaatcatgatcaaaaggaaaatgtgaagtaaccagagaaagagtgttagagcacttacaaatctactaacaagaatatcgggtgtcgcttcgccaatcacctcagcatgataaccatctttctggaactcaatatcctcctgcaacattttaatcaccttatattggaaaatcatattgtataacttacagagctcgtactgcagagtaaggccaaaaaggtagtcacattcaaagaaatattatacatcacatatcgtttttgcaggttatactagatacttagccagacagaatcaaacaaatgacagttgctatatagaagaccaaatgtttccagtgacaacaggcaagacaacacaactaggagcatgaatcatttacaatcgcatagaatagcacctcgaaggaaaaataagaaataatgatctgagtagattagatagtgtgatcaaagggcaggcttaccacatctccagcactgagataaacaggatgagcaacatgacaatagcccattaagcgagggactgtgggaattatgtctctatggtttacaactctccagctgtcttttactttctgcgaacgtagaaaacatataaaccatgaggttttatgacgacgtgccatctcactcccacttttcaactaaaaattgttatgttagaagaagcatatgacctgattataaatttcagcaaattgtttgttgcctactcttggagatccaaagttgtacatggtaacagtgattgccccacgtctaacaagcacacaaatcatgttaaatgcccattaagctgcttgtcgtcagggtgatatgtaggagaagggagttctcaaagtacttacttagctaattggctggacgaaagttcgagagccaagagtgtagctaatgcgccacccaagctatgaccagtcacataaacatgccatttatcttcacgctcagtaacatcgtctctgccaaggggtgagagagagagagagcatgtttattagaattgatgtaagattttagcacacctcgaagacgtaaaatttcaatcactatattgtactgtcctgagcaaacaaaataaacttcatctataaaaaacattccaagaagacagattttggcacgttcaccaatgacagacaattttcttcccagcacaggatgcaaccattgaaacaataataagtaacaaaaaattccctgaaaaggagaaagtaaaatgtaaaacaagaagcacctacatgtagccaattgtcattttgagcagcgatataattcttatccttacggaatcgtatgcactcagaaatccactatggacctgcaaaatccataacagcattaaggaataactcaataaacggcatacctgacaaattccagggtttaaaacatacctgtacttcttgcttgaagtccccgccaattcgttcaggattcagactgcaacatatttaaaatgtcaaacaaagagatgaataataacttattaaaacttcaaatgtgcagattcaactagcttctgaatcaatgtagagatgctgaataaatagacagtactaacccagcaggaactagcatcagatcagtctgcaaatctttccactttgtctgacaacatgaaatactgacaataagaacgataggagaaaaatcaaccacataatattaagatgatatagataaatacctacctgttcagttcctctgaaagcgataactactcttttcctccttgcatcacgccaaattgccacctgcagcttgcaaattagtatatcactatctatcatgaacttgtattttcaggaaaatttgtcgaagacaaaagattcacctgtgtgtcagtgatgtcgttttctagaaagcatagcttttcaaactcagatttgataaagcttggatgccccagagcagttgcaagcattgcccatgcctccatggcactttctgcgctagaaaagagtgttttcatttcttcagcgttcttttcatccgctccatcaacattcactagaccagagattttttcggtcttagaggaaccagagacatcgtctgttacactggaagaaccatttttttctatgaccttctctgaaccaacactgtccttacttaaatgaggcactactgcttttaaaaccattaatgcaccaaagacattatcagcctgcttaagtaattcttgtgtcgcattcttcatgtcggcaagggaagacttggatgcattaatagcgacctgaccatcttccttttcatcatctgcttctcgagtatcagcagtggcaagccctgattcaatgtaaccggcttctgcagtttttcgcgattgtagaccaaaattttcaagtagttccgttccattccacttcaatttctcaggtgaaggaaggccaagtttctggacgatattttgaccaactatgtcagggatgttatcccagaaattactttctgactgaatgctgccactttcattatcatcctccagttcattgccgtgaccatcgccatcaccatctttgtctttgctaagctttcctgaactactcagattagtactgcgatgttgatctgacgaatcctctgaacttgctccttcagagtcctcagcagtattgtttaaaagttcagtattcttaagaggagcgtcattgagtgactttaactgtccaaaggcatactctacaaattgacgtgctggcacagcttcagagtcgacaagatttttcaaaactgactcaactgcttcagagtcaacaaaattcttcagaactgacttaatttcatttctctgaagaaattctgaaacaaatgggaacctccaccacttcttttcttcttcaacttccccaaaccctttgtacttaatctgaaggtttaaatacggttaagacaaagaccaaactagtaaagagactaattttttactttagcatatcaaacatgtgaatctatggaggatcaaggctgcatgatatcttgtgcttctttggatgtaaaggtatattgtatttttggaagttaagttgattctctccgtcaacagaacaataatacaggaaaaaactttgacagcacaaactgacctccagttgaactttcccaccacctccaattccgtctagttctactagcaccttgtgcaagtttccttcggaagcaaaacagaacaatacagcttagagacaaaagccacaacttagaagttcagtaaattcatcagatgtatcactacttgcgtataactaatccacagttgatatttttagtcagagaatatttgcaagatctcattgccaaggaagcattttcaggaaagtcttcatctttgttagtgtataaaccacaactccgccaagtggttaaatatatctctagattccactaatcttagtgcttgttagtgaatgtagaaattctgacttgctagtttaaaatcctttactcaacaacaacaacacagacttccttcctcatttttaacacaaacttgtaaactgaataaattgataatgaataggtgaactaattctcaccatcacaaacggattccaggttgatttcggaattccccatacgtttatgcggggtaacaaggtttgcatcccaagctgcaatctgaagctcattaaaacaatttttgggaagtcaagcaaggctctatatattcagagttcaccaggccacaatagttgaaacattttcacctctatcttttttgcaggaggcagcttgatattaaaaacaaagtcttcgttccatttcggctcttttgtcctgccaatatgacaatgacaccattctttgttcaagttaaatgaaaggtttgagaagcaatgatcaacttatatatcatatcgaaaataagactgctccagaacacttccactatgatcaggctagagattgtgtatgcatctaattaacagagtaagctcataaattcggctaagaaacacgatcccccaaaggaaaatgcagtaaaaagcataagaaacttacccccatttggttttgcttttagcaacctgaccatccaaatccatcaccacataaggatcactcgttccctaaacacaaaaccaataagaacaataacaatgatcaaagtaaaaaagaaaaacatagaaatagtaaggtcatattgcttcaagaatcgtaaaacacacacccatggatctaaagcaggaaactcaaatcctcttttgagtttaataaacaattgtccatcatatatctccctaacaaatgacctgaaacaagtatataattccatctcttcaatatctataaaaaaaactctctaagaaaaaaaaaatcaaaaaccaaaaagaacttcacatactcagagaggtagagagtgttacatccagctgcattaacctcacgcttgccaatattttcctgagaatcaaaacagaaaaatcaaagtattattggttaattttccttcggaaaatactcagaggagagaatcagaagttaccggaggtgaagcgtaggattcgaaagcaaaaccagcgagaataacggcgagattgatatcgaacggagaacgttcatctttctcaggtaaacttacttccttcgtttctgattgagcgaagcaacggagcgaattaggtttagctctgagtctgaaagtgattttcccgggaaagttgaaggtgcgggtattgaagataggagagtagcggagacggtgttttggacggaggaagtgaacagagaagtgtaattgcagagatgtcatcgtttgaaatttgaattcgagaaatttggagaagaagaagaagaagaggatttgtgttcttctggagaattctgtggagctgattgtcttgttgtcaaaattgaaaccattaacggtttctttttcaattgacagtgaaattaatataattaagaaaattgcactttttaataacgaaattatgcttaatacaagatactttgtgacattaatgttatctttgtggtttcatttgagctggtaaaagatacttttaacacatgggttgggaagaaaattagttactccatgacataatttttacttaaacacatttttgtgtaagttaattattccgctgggcgctggagctttcaccagcaacgaggaacatcgacgtagagattaagtctatggagctttcagcagcaactaaaaaaaaacacttgcttccagagattggttagaaataatagccacaatggcattaaacccaacccaaagacaccaaaaaaaatcttgatccgtaactttgatttgttcttaaataattaaaatcgataagcttgaaaaacaaatcgagtcttttaaacaatagaagtttaagaaattatgattttggatctataattgaaacacaatataaaacaagagaaagaaaacattattctaaactagaaagcaatccggccaaaagatcaatgagacaccggagatgggcggtgatactctagacctaaactagccaaccgccgctatagaagccaacatatgccataagctagccgactaccaccgtaaatagaaaacctcatcgggcagaaaatcagacatctatgctgagaaagtcaaaggattttggtcagatagccggtcaacaaatgctgaagaagtcgttgttaccgggaaaaaaagctgcgatgacttcctctctaagtattgttcttgttagaaaaatttgatatattaattttaaaaactaaacatataatatttaaaaacatataaatggacaaattcaattttaaagaaatctcatagtttaagaagctcattgcacattgctcatgatttgtttctacaacaaaatgatttgtgcttgttgcaagtccccgtatctacgaactcgagcaaacgagcacacatttatctatgttttctgctttttctgatataaaattttagatctcctaaaaataaaatacataaactttcacgaattagaccactccagatacatcgaatcattttgatagaaacttacccacactgtatattctgaaactgataaagattaaagtcttataaaaatcttgaaaattgatgtttccgattcctacaatacaccttcaacatacaaaataacttagaaaaaaatctagaaattcaaatgctcgacgttaatctcattaatagaaaatgtctatattccgtttaaaatagtgacattgtttttaaatatatattttaaaacaacatcttactataaaccaaaaatattttttcttatgtttctttatttctccacaatagtcacgctacctttaggtttaaaataaaataaaaagctgaaaaaacattcttaaaaaacattttaaaaaaaacaagtcactattttaaaaatgagactaacctcacacattcaaacctttttgggtgttttcttcattattttgtatggtgaaagtttgttgtaggagtcgaaaataatagaaactaaatgttggagtcaaaagaactctcaaggtcttttaagtgatttttttttttcattttttttgtatttcctgaaaattagaaaaacataattgaatgcaacgctgatatatacttctttaattaattcaacaatggaataaaataagtaaaattacatcaacgatgcactcaatgatgttcattcaaacccaggggaaaaaaatatctccttgctcatttctattaccatggagataaacacaaatatcatttataagacatttggtcgtgtctttggtttgaaagcagtacaatgcttgcttgtactactgtgtacgattaaggaattgtactaaatcttattttttgggggctgtagattctttttgaggattttttttaattatagttgcctttagttttcatgtgattggaatacaaaaacattttcatttttttttcttgattaaataatgcatgttttcgtatctactaaaaagatcgtgttctttatgtactgcaacgaaacacaaactttgtgtactacatgagattatcttcacttcaaagacgtcgtttgttgttaaactctccattttgctttttcaagaccaatcataaattataatttgctttcattattattaactaggccttattactttgtttaattcgaagaaaataaatcttaggctcatgaacaccatttcctttcatatttgggtatgtaagtacacaaacttttcgttgatttggaaaccaccaagtctaatgctttattcactaaaaatctattaaattcatttttacaatgcttataacacttgctcggtttaaactttaaacaatatagaccaacatcatgataataatgcaagtttaccaataagcttattaatcatatataattattttactaatttaatgaactatatattatcggctacgatattcgtacatggctcggactaggattacacggtttgttctaatgataagagtgtttgctaatttggttcattcctttaaaatagacaaaggctgtgatgttacaacatcttattacatctcagatttcggattacatgatcacaaaacctttcaaaacaaataatcttattacaaacataatttggagaaacccaaaacttccaaaacaagaaattattcataaatattttaaataaaatagttgagaagtataaattctcatttcttctcgttcatgccaagactgttcttcacaccgtcaagagcaccctgagccatgttcttcactgattcaccggtctacatatatagatttaaggactcatatatcagttttattagcaaattttatcctctagttttggtagttacacatataagtatatacaatacctggccgaataaaccagcggcttgttcctggttatgttgtgcagatttgttagcggaatgagatccatcagcggttttgtcacgagctgattgtgtcaaatctgcagccttgtcacgtgctgattgtgtcaaatcagcagttttgtcacatgcggactgtgcggtttgcttcgcagactcggtccattgctcagctttctcctacaatatccatcaaaaccatatataaacatcaacaaacttaggatttggtaaaacatttatttgaaaatacggtttgaagttgataactataatgtatgaaagattgagataggagaacggacttgagcttggcctctgttctgtccggcgttgaattgttgttgcgacatgattgatgattcaaaaaggatgatgaggatttgaagtttgtgagagaataagttcttttagctttgattgattgaattggtttgatacgaagtgtatttatagtattgcattttgaatttagagtgattagtgaataagacctattttaatttttgtgatgttgagagaattgtgggtgaccatttgtggttcctaacatattctttgactctttctcttcttttactttttctttaaacattaaaaatactacaaataatagtttttattctccccaaaatagaaaccaaacttggaacaatgaaaacttagaaagcaaaaccattgtttttacggatcctggttatctcattgagttgatagcgaatcagtaaatttataagaagctaatttttatcggcaataatcacaatttaaaacttcaaagtcacttttatagtcagtaatttttttgtatagatcgactaataaagaaattaaagaaaaaaggataattggtaggatggaattaatgaccaaacttcaaccttttgatttcgtagttatgatacaagccaactcaacattgattttttattctaaagtaaatggatgactaaacgtttattatatcacaaacatgagtttaccctattttattccaagatgagtttggctacaagatattcttcagttttggttcgagcacacttaaggttattcttcgcttttcagttcaaagagcttttgtagatattatctttgttgagtaataaatatagcattaccaaaaaatagcaacacgaaaataaaatataatgttgaaatatagtcactgctgtaatatagtgtcatttgaaaaagattgtgtgtcgtggatagcaagtttcgaaccttgtttaggagagtttcggccacgcttagaaaaaaaacatataacaaagtattttatttatatattttttttactttagaatataggtttgaacttcttttaagttttaaaatgtaactcttccactttggtatttattttactaaaactaagtttcactactttcaaacttttcaacttctttcatttcttcaaaggtctcccacttaatctgttgtcatttctaaatagaaaaatataaattgactttgtaaaattacatccaatagatactcaaattttaaaacaaagagacctttcatcttatatcgcaacaattaattaatatgacctttgttacaccacttccacacacattttgaaaaaaattgattttccccattttacccaatatttaacaagttcatactagagtttacacgttagagctttatgttttatatatgtagtgatctgtaacactaatttacattcacaacatgattacttgacttcacagacatgaaagcttttatcatttaatctgaaaatgagatgattttccacatttgtttcatttttcacatttgaagttgtacaaaacgtttgtttctcctaaaaacacttgtgtcatccagactaaaaaaggcttttcatgagtttaagaatgaatttaaaattcataagcgaataaaagtaacttctagtggtaacatcttatcagttggtgtatcgtagcacaatatcctttgttcaagattcgacattgtctttaggaagtgtttcacctgcttctctatgtcttcgtcgtcataagatcaccaaagagtatttccttcccccccccctccaacgtttgcataaacacccatcctcgttgcacattgtttagtacgtatattcgttatgcagataaaaagagactatttcaaaatttatttatgtgtaaaagcaaatcaattgttaatgtgaataatgtgtatgctactttaaagacgagagtttctagattggataattgttgagtagatatggtagatttctactctacacatgatacaataattaacagtatcaggtagttgaatacatatattgtttcactactgtcattaagcacttgaaattaaaaccgagttagctatatatatcataactaactaattttcaattgttaacttttgtcaaaaaagatgggactgaccttaaaattgtcacaagagaagtagaggatattaacattccatattcccatgagaaagtttttcaaaatatttttgtctttgagttttaaagtaagttcttcttaacatgttatatgtataatatgatcatgtgtcgtttaaagttcgagactaaattcaacaaacgaatcaaaacttgcttgttgatactcatcacccatattatcaaaatattctatgtataccatatttggattatcgacagtgacacattctcattagcctcattaacatcttgaaccttataaaaaaagttttaaaacgaaaaaactttagcctcttgaggattgaaataaacacggtcactgaataaggttgaagttccaaataagtactagttctgcttcaaattaaatagttctaactcttcgagcacatgacatccaaatagaagtttgttaaacgtttataccaaatcttgactttgatgacgtttaacaaagcttctatctggatgtcatgtgctcgaaaaattagtactaattaatttgaaggggaacttgaactatttggaacctcaaccttgtttcgtgtgaccatgtctattccaaccctcaagaaactgaagtttttttgttctgaaactttttatgtgtttaaggatgttggctaatgagaatgtgtcactgtcatttgatatttcaaatatggtcaacctagaatactttgatattaagactgataagtatcaacaagcgagttttgattcgtttgttgaagctagtctcggacttcaatgacacttgatatgttcatacatgtaacatgtgaagaagaacttattttggaacccaaagacaagaatagtttgaaaacctttctcatgagaatatgcaatgttaagatcctttacttgtcttgtgacactcttaaggtcagtcccatcttttttgttaaagtttacaattgacaattagttagtgatgacatagtttaacttggtttttgtttcacgtacttaatgactgaagtgaaacaataccagtattcaacaacctgatacaaaccggtattcataaaaagagaatatttgaaaatttatttatgtgtaaaagcatattaattgttaatgtgaataatgtgtatgctactttaaagacgagagtttctagattggataattcttgagtagatatggtagatttccactctacacacgatacaatagttaacagcatcaggtagttgaatacaaatattgtttcactacagtcattaagcgcctgaagttaaaaccgagttagctatatcataactaactaattttcaattgttaacttttgtcaaaaaagatgggaccgaccttaagattgtcacaagacaaagagaggatattaacattccatattcccatgagaaggtttttcaaaatatttttgtctttgagttttaaagtaagttcttcttaacatgttatatgtataatatgatcatgtgtcgatcaaagttcgagactaaattcaacaagcgaatcaaaacttgtttgttgatactcatcacccatattatcaaaatattctatatgtataccatatttggattatctcatgagaatgtgtcactgtcatttgataattcaaatatggtcaacctaaaatactttgatattaagactgataagtatcaacaagcgaagttttgatttgcttgttgaagctagtctcggacttcaaatgacacttgatatgttcatacatgtaacatgtgaagaagaacttattttggaacccaaagacatgaatagtttgaaaacctttctcatgagaatatgcaatgttaagatcttttacttgtcttatgacactctataggtcagtcccatcttttttgttaaagtttacaattgacaattagttagtgatgatatagttaacttggtttttgtttcacgaacttaatgactgaagttaaacaatacaggtattcaacaacctgattcagttaactattttgccatgtatagagagggaatcactgccaaatctactcaagaattttccaaatctagaaaccttcttctatgaagtaacatacacattcttgatattaacaactgacatgattttacacagtaataaattttgaaacggtctcattttatgtttcatggtgtgcaacacgaatatactaaaagatgtgtcgacgaagataagtgcttttgaaaatgttcggatgattatggtggagggagagatggtatgataggagaagtcttttgctcatagaagtagagtgctaacagttcacaatgactttacaatctatgtggctccttgaaacaataaactatggatgtgcataactaatggacaatcttcatatttaggaatgactaaaatatcttaactaatgcttaaacactcatgtgtcaccaaataacaatacatggaacatgagtgtcaataatgaccttgtattgtaatgggtcgctggtttagttgaagttccagtagcacataccgaaactacattccttttttatggagtaattctgttttaggatatttttagggtttttggattttgtataagacaaaaaaaaacacaaacacaataagctacttaactagaaaataacatcatcatataatttgactaaataaacaaatcacttcttcgtggttttgttgatgagagacatgtggatgtgagagactactccttatccaccaattgttactttgataaatggatcaagatccctatctcctgcgatcaccaactataaatgcattagagtaatcctctttattttcttatcattgattgtgtttttcggtaactcaataacctatgaagttaggcactctaggattgaagccatgtagtcaacaacaatagcaccaagtcgaccatgttgtagatactctagtcttgagttgcatgtgaatacgacccactagaaattgaaataaacaaagaaatttcattttttgtagtataatttgataaaattttatactgatattgtttctttgtttctttcagtttcaagtggctcgtattcacaagcaacttaagaacagagtttctgcacatagtagtgttggtgcgactgatgttgtctacatgacttcaatccttgaatacctaactacagaggttcttcagttggccgaaaacactagcaaagatttaaaagtgaagaggataactccaaggcatttgcagttggcgatcagaggagatgaagagcttgacacactcatcaaaggaacaattattggaggaagtgtgatccctcacatccactagtctcatcaacaaaacaaccaaggagtgatttgtttcttaagttaactaatatgatgtgatatgctagttaagtagcttatggtgtttcagttactctagttttggatcggagaagtagtttaagtgttaagtcttgagacatcataattttacgtctcatctcgtaaacgataggagaagttctttgctcctagagttttggtgctaaacaattcacagtgatatgcattccatgtggctccttaaaacactcaaccatgcatgcacaagcagtggaccatcttcatattcatgactgactaaaatattgtcatcaatgcttactaatatgtcaaattgtagtaactcggtggtttaattgaagtttcattgttatatatatggcgtataggcctaaagttgtatgaagttttgattgatgagttaagacatcgtattatataaagtaggattttcaagttactaactcaactgattaagacacaagtcaagtactttgaggagatatcgacatgtatcaaatttaattttgttaatatatttaaaataaaaaatagaaaattttctaatcctttcaaaaaatatatacataaatcacattattaataaaatgggtttaaaaaaaaattaggaacctattcaaaaatgtttttttttgggtgtatattttaattcgatatatttcagcttgacatattacacaactgtatttcacgaagcgagacatatttcaaaatttcaattaatcaattagattttaatgcgtgttttaatatttttcagttgtgaaacttaaataggcttatccttttattttcttaagaaaaacaaaaaataatattgaatacatatccatgtaaattacaatatttaattataaaatatatatgtaattgtgaaaatagtatcaaaatgaatgggggattaaaaatttagtcgtcattttttagtaagacatttaagataagctaatgatttcaatgttttccttacatagtatagacgtttagtaaagattttttttaaaagacataatagatagatagagtagactaattgagatgagagttacaacattaaactaactatatgttggttaagttttttttttttaatttaaactacaaaaccttttatatataaaatcaactcatactttttacacaaactgaaaagaaaatcatttgggcgcgcgcgttcaaactcaaatatataataaagttgagattgttctcatatttgaatcactgttagaaatgaaaataacatttgaaagacataaatttctatctaatcaatagaagtctcatatccacaaaagataaaaaaaaaaaaaaaaaaaaaatctcttatcaaatttctatctaactaatttgacggatattatgctaattaaaagtctcaaataaaaactaaaaaacaaaaacaaaagaagacaagacgtaccgtaccgttgacacaaagcatccgtgcatcatttctgtcactttttccgacaaagcacgtatattctgtctactttcatcacagatctacgcagtaattaacaaaatatctattaagaatcaaaaacacatagaaaaagagaataaaaaccaactgattagatctaaatctgtatcgttttcgctaaccatatcgacagtgtaatccattggagaattctttcagtttttctttgcttgcttggtcttaatcctaaatcaataaaagttaaatagtttaagacaagtatatctgaaatttgatcgaatattttatattgcttgcctgaaatggattccttcttcccgtactgctacaaaagcaaatctaacgttgacacactgccgattacaccgagagctatatcttctcgcctttggattctgcttcatcttcaaccatggatcagagaagtttttggttctttgggcggctgtgttcttgtcttgctatgctacgatatatatatctatacagaagaaacaaaaggtttgtaaaccctaattatcttttttgtcagagggggcatgtgtcacaacgtgtttggacaacaaataatctaaaatcttatcacaaggtttgtttggacaacaaatgtaaagatttctttccataaaaattaatttgaataataggactattctaattttaaaagatttctttctatgtataacaaactattcgaaaatgtatgaatgaactgtgataccaaaaaaaaattctgttgtgaaatagagtaataaattttgcagtggtgaattttacagaatccagattgtctgttaaatgctaagacttcatacgcttggagatcgttgttgcaaagtcgagatttgcaaagacaaggtctatgatttgctatggagacgactcgatgatcaacgcttggtccgatccctggttgccttcacatccaccaagactgccacggcctcgtaatcaaactgatggaaattatatggtctaagactgtgtgaaagccacaggaaacagctggaacgaaacaaaaatttgatagtgcttgcagaggaagatgtcaaagaaagtttagcaatcaagctcagccacatttccaataattagccatgtggatcctttggagattgtggaagagtaggaatttggtaatgtttcaacgaaagagtctctctgcgtaaatgttatttttctggccaagaatgatatgaaacaatggaagtttacagaagaagcaacaaaatcatcaaagaagcaacgaaataagccatacgttttggagatgacggccaaagaattagacaaagtgtaactatatatgattgatcctttgtcaatggaagattacagtcaaatcaggttgagttatcaaatattatttggttacttatcttgtatcaggtcaaagcacatgcagagtaactatgaatgctctcgaaagctaactacaagcgctttgatcatggtaatgcaacactgttggactaaaggatacacgaaggttattttttgaaggtgactgtctagttttcagtctcacttttatgttccttctattatcacgaatgccttatattgtgactattgaaactcttgacaccactattaataacgtcagatgttaaaacaaaaaaaaaactagtggtgaaaagaatgaaaatgttaagagtgatatataataggtaggtgtgttaattttaatgtcaacataaaatctatcttttaaaaattatatgatccaacgtcccactatggttaaaagttttagataaaattttaatttattatccttcacgaatcaagcacatctaacattaatgttaattactatattaatctccacccgtattttttcacgtaagagttttggtcatgggaatgaaacattgttggagtagaggatacaagaaggttgctttaattttgaagatgactgttggggagcattggtggatatactcaatcacaaaacgattaactttggagccaagttattggaagatgcaagatattgaaagatcaagatagactaagtcaatcagtctcacttttgtgttccttctatcatcacgaatgccttacattgtgactatttaaactaacgacaccatattaataaagtcaaatgttaaaaaaaagcagtgaaaacagtgaaaattttaagagtgataataggtaggtgtgtttataaatactaaactgtttgaattcattaataaataagtgagaaaagttttaaaataattttggcatttgacataataatggttttgatacattatataagatgtagataacaatattgtaagaacacatgtttgtatatgtgtttataaattgtttgtactttggtttatggttcatacttatcaatttatcttatcagtgatttacgctgttttctgtatcgaaattatttatcattttcatctgactatttttgatagattagaccataagcaacgctagtcccttataagatgctatttcaataaatcaaaaaaaaaaaaaaaatagaaaggaagggactgaggagagaagggctccaaaaaccctgatgagggacaatctcaacaccaattatacacgtgtaggttttttagtagtcaaacaatattaaaaaattttaaaatataattgtaaaactaaaataagagaaaatcccgttttgatattttcaattggattagggatgttcaagcttcgaagaaacgatttcaggagtgcagattcacatgggtcaatcgaaaacagaacaaaccgacggatattcttgccaagggtcgcttactccagaatgaacaatttaaattttactcttacgttccgattgtaatttcctcagccttacagctggacaactctggttcataatatcaatggaaaagaagatgctaaaacaaaataaaaagttaaaatatcaccctgtaaagtcacaaaagtttaaaataacttaaaaattaaaaatctatctagctagaagctatattatatcttatatgtaaaatagaacatattttagtaaaggttttaattttagttttcagaaggaaatccaattttttaaaattatatgtttagtgtcactaaacatataaagacactaaacatataattttaaaattttagattttcttctgaacactaaaataataaactttactaaattagtgtttaattttccatgtttcaagttttgcaaaaccgtttgtttcttccaaaaacaattttgtcatctagactaaaggaggcctttcatgagtttaagaatgactttaagattcaaaacctaattttgcatatttaattgtctcatcttttccaaatacagaatcgtgggtgaataaatgtaatttctaatggtatcatcaaatgatttggtgtatcgtagcacaacatcaattgttcaagattcggcattgtcttcagaaagtggttgacctacttgatttgatcagctgtgtcttcgttgtcatcacaaagttcgttaatctctattatcaagtccggtgaaggtccttaagatatttaagtttgaagaaatttgtgatgacaatgaagacataaaggagcagatcgagcacgtcaaacacttcctaattaaagcaatgccaaatcttgatcaggtgatgttgtggtaggataaaccaaatgatctaatgaatgtcatgagatggtgtagtctttttagacgactacgtcatctccatgatctgatgaatgtcacttgcaacatctttcccgcttctagtatcctagctgagcttgaaaaactcatggctttgggcttagctagaaagacttaatctcttcattttcaggccaaatttcccaaccaagcttctttagctaaccttctaaagtgcaatgtaagctaaataaatagtacatacaatgcggaattccggactttagggactctagcagagactttgttcataacaatcaaaccatggaatccgtaacacttgatccgcccgtaggcgtctatcaaggttttaaaattcactccaactgtggtgtcgagacccgctttctcgctcttaatgaggtttcaagacacgctttcctgatagttactctagttcttgtatcgagtttgttcacattggatatttcatgtcgatacaaggcaactttatctctttttctaacgttcatctaaaaattataaaaccagaaattttagcaaaaaactttagggacatagtcggatgactattttagtttttcagtgaccactagtacatgaacagaatgacctacaaccgataatcatttcaactacaaccaaaaactaattataattagaaatgcattactaggctagtcttaacataatatatgaactcagtggcctacatttactatcatcaattgctttttccaacatcagagaagaataaagaaaaaaaatacccaatgtattataaaatatagaaattcaacttaagtagatttatttactgttttaattaagctagttctcgctttcgccacacgagacatggtagaagcatccattcaacatcacaagttggcttatcccctttaaggacttacttattattattcaaagcacaattgagatgaaattacaagccacaagagtcacatacaattcatgtatgaagaaaaaggatgattggcttgtcgttccatctagattgtgctttcaatagtgataaatcaggtcgcaaggatgataagccaagtttatattggtggatacttccattgcttctcttgtggcaaaaacaacatcaatctgagtaaaataaaagagtctatctttttccaattaggttctacatttaatgcaactctgaatagacttttagtttttatattttcccttacttaagtgttggaagaagcaattgattatcgtaaagaaatacagaatagtatatgtactttgttgtagtcctctcttagctcagaagcttgtaaaggtaaaaaaaaagtacataacactatctgaaacgtagagaaagctatgaagatcatttgcgtctagaggtggagtgctatacatagtgacatacaatccaagtggctccatgaaaaactaaaccatgtatgcacaaccaatggaccatcttcattcattgctcatggaataaattccattcattgttttaagatatttttaatgtttttggattttgtataaaaatcccgtttatgcatagatatgtattgactttttatatattgattaataaagctacgttgagattgttctcccatatgtgaatcactaatgaatttaacatttgaaagacatgaatttttatctaatcaataataagtctcatatattaaagaaaaacaaaacaaatcaaatcaaaaatagtcttttatctaatcaatttttctctaaccaacttgacagatgttatgctaactaaaagtctcaaatctataaaaacaaaacaaaacaaaagaagacgtaccgttgaaagtgtatcacttctgtcactttttcccgacagctcgtagtgcactttcatcacagatctacagagtaatttacaacaaatcttttaagaatatatatatatatatatatatatatatatatatatatatatatatgacaaagaataaaacccaactgattatattggaatctgtattgtttccctaaccatgtgagaattcatttagtttttgtttgcttgcttggtctaacaactaaatcaataaaagttgaatggtttaagacaactacacaaatacatgttcaatctatatgtatcaaaagttgattgaatatgagttgaacattaagaagaaaaacaagacacgtgaatgtaccttgtatagtagaagattcaacaccctgtaatcaaaggacttcaaatgaatttctctcatcacatgtatcttcaaatgtaaagcaaaatcaaagagacaacaatatactgaaccagttaccttgttttagattgaaagagcattaagctttctttctaacgccaatactcttcacccgacttaacctcacgttgtattctaaacccatgcaacaaattaacgacatatgtttgtccgtttcctgataaaacagtaagaaaataaaataaaaagttatagcaaggaattatcttacctgtaaaaaaaaaatgaattacatgtgtgtcaaaaaggccctcacgttcaagcagatatccaagcggcttttacgggttagcttcaaacaaaactcgtgattcagcaaaccacatatatataaaggactcaaaatcaagcgattaaaacgaatctgtacctttaatttcgctaaccatatcgacattttaatccattggagaattcttttactttttgtttgtttattacgatctaacaaataagtcaatagaagttaattagtttaagacaagtatatatctgatatttgatacgaaaataaaatatgtcttacctgaatttgattccttcttctcgtaaaatgagatcttcatttccaccattctcgccttcggattctgcttcttcgatcttcaacaatggatcagagaagtcgttgcctctttacgcggctagggtttttctttacatggtggctatcaaaaaggtgtgaagtgtttgatatgtttggctatatatatgtatacagaagaaaaggaatcgtaaaccctaattatctttttctttctagagtgtgtcatcatcctgacaggtgtcacaacgtctttggacaacaaaatttcttaccctatatggccttatcatttactcagtgtatcttatcccaaactctctttatttcagcaaatgctatatattaatctaattattgttattttttcttttgatttttatttatttttgtttgtctttttttttttcttgcttacaggattggttttgtactttgtctataaaataaataaatctaatctaattttaataccttttcttaattaatttagtgtcaaaatatttttttcaaaaacaaactatttgaaaatatgtgaattttaatatgaaaaggattcaatggtgaaaaagtgaaaatgtaagtgccgatgagccgaaagcttaaaaataattttggtgtctaatgtaataatggtttgattataaaaaataaattaataatggtttgaatatatattgtaagaaaaatctttaaattattaaaaatatgcaaaaaaaaaagaatatgacttagaaatattaaatgcatcactttttttagtgttcatacgtatcgttttatccttcccaccaaaaaaaatacgtatcgttttatcctctccctgattgatgccttattctatatatgttgaaactttcacattctccttactatcttttgactcataacaggcacacagtatacataatgaattgttttgcgcaatcacatagtatacaagttaagatctcacctctaacaaccacaaaagttaaaacataactgtaaatattaaaattctatctagaatctattttatatcttatgtgcaaaataagctctagtttataagagaatggtagaagatttgcttataaataattaccctttttcgacaacttatagaagcattagcatgtaccctttattcgaaatatgaggctctatgagaccattagagcaactgcatagaagtttgaagtgctttgacctaaaaatagactaaaccctcaaacttttgtgaaatttaggttatagtatgattttgacaaaaaattaggttcttcagttagcaaagaaccatcgagctggatcttccgacttcatttattattcttatgttcctgattgtatttcagatgtttttcacaatgacaacattgattatgattaataaatgaagttgattgttaaaaacaaaatctacgaattcaattgtgaaatagagtagtaaatgttttagtggtgaaaacattgaaaatcttaagaatgaatataggtaggtgtgtttataatgtaagtgacgaaattttaaaaataactttagcatttgttataataatgatctgaatattatagattaatatataagataaatatattgtaagaacacagttttaaattataaaaatatgtgtctataaaacgttttataaattgaaatttttacatatatatcactttggtttaaggttcatatgtatcgttttatttcttcattgattggcggctttttctatatgtcaaagtttatcgcctttttcttacgatttttaattgattacacccaagtagttaccatatagaaaatcttttattgcagcgataaaatttatggagagagagattatataaactaaaatctcaccttctaaagtcacaaaagttgaagaaaactaaaattatttaaaaactatctaaaagctatattatatcttatttgtaaaataaatttattaaaacacaagttttatttttcttttcaaaagaaaatttatcttttgaaaattgcatgatccaactgtaaagatagtagagtccatattagaacaagaaaatgagtttttgttagtccatatttgttctctttgtttgctactccaacaacgcatttatgtggtcctagaagaactaacttaagttccatggcgcttgatttttatacttgcctccatcaagtcgatggagttatgttatatatatgtagagagtagtgaccatcattaacacatagttacaattacaaattggttactttcctttagaaattgagctctttcgttcttaagtttaagaggtatcctcttatccaaaaacagggggaataaaagctaagtaacttctactggtatcactcttaatgtcaagtacagtgaagtgatcggactagaccctagctactttcaagtccaaaaatagttttttcagacgattgtattatctccttgatcagattaacctcgcttaaaacagttccacagcttctccaatccaatcccattggagcttgataaactcatagggctagaaagactcaacctcttcactttcaggccaaattccaaccaagcttcttccgctaaccttttaaacttagggatggacggatgacaactttcgtttttcagtttcagagacccctagttgatataataaatgaacacaataaaatacaatggataagcatttaaattatggattaagcgttcaaaaataaaaggagttacaacaaatcatatatatgaaagttggtcaactctctccatatgagtgatacatcatcacaccaatgagtgctacatgtcattctaaattaatatcattaaaaataataaaacttagtgataaaaaaataaaagttttacattgcattgaatcatccattaatcccactcttaactaaatatcttcatctaaaagaaaaaatataaaaaatcatgttaatgtattaaacactactttcatcttacttttcttattttgctatttttaatagtattacttgataacgacaagaaattttcgggtattgcaatttatttgtttgctacttaactttcttagtttagaatattaacttaattgtttcttattattacattttttggtctacatgatatggtttttttgtgctttatgataaatgggtaacattaataatgacatacatgtttttttaagtaatggtattttgagatgttatatatactaaaaaattcaatatacgatactctctccaatatagttatatgcaaatgcaaagagagaaacctaaaagtgttgacttaaaatactatttaatttttgcttcttttttttctctttcatatgaaaacttttaaagcaaatgagtagttagttatacatttgttattcaaattacgtaaattcaatatttagctatgagcctatgattggaatactagattaggagagaatacatagattgaattttttgcttagaatcaatttaggcaactttcaaaccaaataagtaaacataattgcataccattgtatcatatattgttgatttaagtatttcatgatagtgaaaaaagattataatcttgggtatatagagaagaagatttatacatgaaaaaaatataattgatatttgaatcaaaaatgaatctaactatacaaatataattacaaaaaataaatataactttattaactacataataacatacacaaaaataacataaattaacaataaaaatagttaaacataatttttcttaaacaatttttgaaacaataacccacgctactaacctagtagaaataaaacaacagaaatgaattactatatatgaacatgatatcttacaacagatataataagtcgaatcgttttagttatcttgatctgaaattttacgatgccatacattgtaatatatgatgttttctggtgatgaagatacttcggaaaaataatagagtgagtgaagaaccacatgaacttctcgaaactaatcttcattgatcaggtggtcaatttcgaatcaaacaacaatgaaagaagaaaacaattgtagtatttcttgatcactagtggtcaaggaatagtactttgtttttttattgtttcacgtttcgatatagacaatgatcagcgaggatgttcatgtgacttgagacttcactcactctatatacttggttcccaataatcttcctcaccgcaaaacacacaaattaccgcatatggtatcgtaagatttcagaacaaaagaactcaggcgattcgacttatgtatctatatgtgtggattgaattataacttaacccatgcaacaaattaacaacgttaacgatcggtttatatgtttgtccctttccaaataaaacagttagaaacaaaagaaaagtaacccattattaatgaataaagatacataggaattgctctcatcaaatcttcgagacaaatctaaatgattgagtgacaacaataaactgaaccacttacattgtttttgattgaaagagcatgacaaaaccttggtgtcaaaagtccctcaagttcaagcagatctccaagcggcttcaacgggttagtttcaaacaaaacccgtgattcagctaaccttataaaacaaaaaatcaaacgattaaatcgaatctgtaccgttaatttcgctacccacatatcaacagtttaatccattacagaattcttttagtttttgttttcttgcttgatctaacaactaaatcaataaaagttaaatggtttaagacaagtatatcagatctttgatagaaaattaaatctggcttgcctgaattggattccttcttctctaacatgtgctagtaaaatgagatcttcattccaccatctcgccttcggattctcctttatggatcttcaacattgggtcagagaagtttaggcggctatgtgatggctatagaacttgatatgttatgctatatatatatatgtgtgtgtgtgtataggtgtcgtaaaccctaattatcattttttttagagtgtgtcagccttgtcaggtgtcacaacatctttggacaacaaaatttcttacccttatcatttactcaatatatcttatcccagattctctttatttcagcaaatgctatatattaatctaattattattagttgattattttattttattttattttgtcttttttttttcttgcacacagaatggttttgtttataaaatataaatgatttttaaatttaataattttagtttcaaaacattttttttcaataacaaactacctgaaatgtatgaattctattatgaaaaatgattcaattatgaaataaagtagtaattttgtagtggtgaaaacagtgaaaatgaaagtgccggaagcttcaaaacttaaaacatatgatgccattatgactccgtttaagcttggtcttcctttatctcaatatgacgctcttattcgcaaacttatgccaagtttgtctaatgagttcattcatgtagtgtggctacatgacatttttggagcaaccatctctgattttcatgtagtgtggctacatgacattttccttaccattaatctcatcttttagtatcacttacattaaattcctcctttatagaatgtgttcaaccatctctgattttcatgctttggaagagctctttctgtagaagattctcgattaatggtggaatcggcctcaatggctattgttgatgctagaagaagaagaaggcaagaagcccaaatgcattattgccttatatgatttgtaaataagttttgaagcgttcgttaagcggagcttggcatgctcattcccgcatgatgaacgaatctatgaaagatccctttttggaagaaaaatatttggattcacctttatattcactttatttattttagtcaattaaaatctgacacctaataataataaaaagaatttaatttaattataaaatctaatttttcactaaaacgaaattatgtatcggtttagatttattagaaaagatcagggtttagatatcagtttgagtttagaaagtacgattagggtttagatttatagttaaacggattatatattggtttacgtttataaacatatttagattttacaattaaacgaggttaaatgtcggtttgggtttagaaaatatccaagtttcagaataacttaaactgatgtgagatgttttaaatgcacggattagttcatttaacactcataaaattaatatacatagtataaaatatactcgtaaatttgatcatgaaatgatgaaaccatatagttagtcggattatcatgactaactcatattcttttctttttatatatataatctacaccatgaactaacatcacacaatttttccaattaattattttatcaaaattaaaaattacaaataaaaatcaaaattgtgatgatcccttgccacaccacgttatagtgttttcgatcattaacatttgttggttttaaattttatgtctaaagtatgtaaaccggataatattagaacaatagctttgtactctgagtactctcttagaaactagagattttggttgacaaaaaaaaaaaaaaaaaagaagaagaagaagagattttgacttttcttggccataagttaatcaacaatttatgtccaaacctaaaccacccaaatcggcttaagtccccaaaaatataataaacaagtgatcgataagagaacaagttcaacaacttctcaatcctaagaaatgcaacaactacacaaatcttccgtatttatacacctattgatcaatctcaaatccttcaatctttcctacaaaacaaaaccaagaatcatacaaaacaagcatcctccaatatgatgaaacaatcaccattctcacttttaacatcaatctttctcatagctgctctttttactgcaactaccgcactcgatcctgcacccgaagacccgatttttgaattgtacatgcacgatatacttgggggaagcagtcccacagcaagacccattacgggtttgcttggaaacatctacaacggtcaagtaccgtttgctaagcagatcggttttgttccaccgcaaaacggtgtagccatacccaacgcaaatggggcaatgccaacggttaacggtatcaacggtattccattaggtactggtttgtctggaacagcgttttctggtcagaatctaaatgggattcagactcagttgggtcctgatggtctgagtcttgggtttggaacaatcacggtgattgacgacataatcacatctggtcctgacttggggtcacaaccacttggtaaggctcaaggtgtttatgttgccagctcagcagatggaagcacgcagatgatggctttcacagctatgcttgaaggtggagagtacaatgataatctaaatttctatggaatctataggataggaagcgccatgtcacatctgtcagtgactggaggaaccggaaggtttaagaacgcttgcggatttgcagaggttaggccgttgattcctgcgggccaacactttgttgatggagctgagatgctgttgaggatcattgtccatctgaaatactgagaattatgtttaaaacttgtgaatgaaatgtgtgtgaaatgtgtgatgccatttgtaattaagaatgtttccttcttgtgaattattccaacaactattctgagaagggtctggtttattgctctcatgcttgattccgacaataaaagtaagaataagaatattggaaggcttgtgaatcgccggaacaaacaccgttcactcagctcagaacactccaaagaatgtggctgcagcaaaaactaagaagagagctcccccaacatagcccacctgcatcaaaagaccaccaattttcattagcttgtgcgctattcggttgctgtgaatggacttgtgtaagcattaactcataccagtttctcagagatatagttggcaaggaacgcgccgcccatgattgcaagcactgttgctactaagtgtccagcaatagctccgctcgcaactcccaatggagactataacacagatttgaaacagagaaatgtttagggtgtagtgagctaaagcttgtggtgttgtgggatggtgtgaatcatacctgtgcagcaccaagcgcaacagtagcaagcattgatcgatctccccattcctgattagacaaagaaccctcaattatcaaaatgtggatggtttaatttaagttcttgacaaacgcaaaggggttcttctttcttaccgcaaagaacacgaggctgaatgacttccagaggatttcaagtgggtttgtgagctttttggacgccttttctttcacgagttcctcagcttcggagtattcaccaagttctataccagtttcctcaccattcttggcttccactggtggaagatcccatgcatctttaatggatttcaatccaaaaaacatgagaagcgcaattgcagcatattctcctatcggtagtgctgttcaaagagagaaaagtatctcatcatatattttccagaaaatggtttgtttgtatgagcaaagtaacagcttgaagataaagaagccttaggtagcttactcgtttggaactgagcaggcacggattgaaatatcttcccaataacaactgataagatagtcatcaaagataaagcccccattgaacctaaaaggaccttgtcaagaaattcaaggtcaataacatcagcgttcaccgaataaataagtacaaaaggatcaaagagagtgagagagaaatattagaagaaaacgtaccagtgttttctcatactgcatggccaacaaagcagcaatgaaaaatgtctggccaaccgaaaacgacataagtgagatcacagaatttgggtaacataaaagaaatctaaaggtggtatgctacaaaatagcggcgacatgattagatagatatataccttgtctccaatctcagaaacaaatatgagtgagaaggctgctgtgaagcctgactttgctactgctgctaaaactgaagatggtcctcctttcacaaaagtgataagagaaaataccaaaccacaactcagtagtacaagcgctattgacaaagaataaggaaatggccctcgaggttttaagctgcaggatacaatgaaaatacaaggatcaaagatcacatacacaatataaaagagaagtataaccacactagcttcaaattaaccctattacacacacacacataaatttagtgtggcataattcacagagatttgaagaaattcttctactaaaagaaacacttcaagtatttcacgaacttcaacttcttatgtttttttttcaacttcttatgttattcctgagcctgcctatataaacaccaataccacaaaaaatcctaacttactaagctttcttgccaaaaaataataagagatacatataatcaccatgatctataaagtaatcacttatgcccccttaactattgcttgctcatacacctaaaaagagtcaaagagatgataaactaaagttccaaacacaaaattaccagtaaatgttgctacctatatccaagcggacaacgccactacagatccatgtcgatttatttcacacttaaaacacaattttcaacagtaaattggatcttcacggtatatattggttacatgtcatagtctatattcagagtctaaacagtcccttgttaacaagaagaatatactcataaatgacacaagtatgaactagtaacctttctgatgaagtggcaggagactgatcaagagaactactctgagatccatcctcttctccaccactataactcccagatccaacaccagcatctgatgcacgaactctaaattttccccagagcaaatccaactttggtctccgtctacatcttactacaaactagttagtactagaaatctttaaatcgaactctaaaaaaattcatttccatatgaacaagtaataagaaatctttagctaagctcatctctacacaatccatagcaaagtcgtggactttcaagtcgtaggaagagtaacttacaaggaagaaacgtgggttttctcgaactcttcggacaaggcaaagtttcagacagagacagaaacgggagtttctgtattgaagatacagttactgctgttgctgtggaattagcattcttgctcaagcttgtgagcttcatgatctttttattcagaattcacggaagcagatatattagtgaaacattgcttgagttgatttcgtttgataaagtagaaacccagaaagaaagattgagacttttttccgaattttactgcaaatcgaagaagagaagaatggtttggtgatggagataggatttgcaatttcgggttctctttgtctgtgcggttgggtttgactctagattggccacgtgtgttgtgagttctcgaagataacgaaacggcatcgttttatagtttactgagaagtgagaaagtatgatatcatgttatttttttattttattttttgtcggcgatatcatgttaaaccacccacagtaaaccgttttttgttttttacatgaatgtaaaccataattaattgaaaatgaaactatatataattatcttagagaaagaagaagagaaaaaaaaattgttgaaaatgaattttctgcgatattgcagaagttataacctagtaatattaaataatcatacgttaaaaaaagagaaaaaatagaaataacaatatcagttaaaagtttaagatttgattttttactctacaaaaaaattgtgttccttaaatgtctatagaaaagtgtatgtatattattgtaaataacaaaaatcactttattaatcaataaaacagaaaagttcaaaaacattaggtagtaatttatgtgtgtttcgataacgatagagataaatgtgtttttactttttagcaacttaataacatctgaatcggttcaagtacatatgtagtgattttatactaaatgttgtaagaaaaaaatggttcaattggataaaagagcaagttagatggaagatacccaaagacaaacatccgtagaaagccgccgcaacaatcttcgctacatacttataattttgtccgttgtttttctcgtagaagtcttacgtaggaaaaaaattggcaagatatgtaaggttatgagtctataccagaatattggatatgttaaggatgtttgtctttgctaacattatttcggggtttggtagattttacaaaagaaaaaaaaaactattccatcctatatcgatgggctgatatgattcatttgtgctagtggattagcaaaaaatgtcatcacacgttaacactaaaatcatcatttttgaactcctcaaaatgacaattcttgcaaatgaaacccaaaagtactaaaaataatggaatcgaatggggcagtgctgtcaacaagctgacaagaggtttgggctaataaaatcgagaggaatcctccggacagcatggagctcaacaaatgggagatcctttctttcttttttatgcatttgtgggttttgcttggaaccaaagtaagtctattaatttagatctcaggttattaatttttcttatgtaagtctatgtcataggcgaactgaagagggagtacaaaaatcatatatatgaaagttggtcaactctctccatatgagtaacacatcatcataccagtgaatgtcacatgtcattctaaattaatattattaaaaacaaatttagtgataaagaattaaaagtttcacattgcattgaatcatccattaatcccactcttaactaaatatcttcatataaaagaaaaaatacaaaaaaatcatgttaatgtatcaaacactactctcattttacttttcttattttgctattttttaatagtcattacttgataaggactagaatttttcgtgttttgtaacttagttgtttgctatttaactttttttagtttagtaattttaacttaatcttttctttttattatattttttgtctacatgatatggtttttttgcgcaaaatatgattaatcggtaacattaataatgacatgcatattttttttaataatggtcttttgagaggttagatataccaaaaagttaaatatacgactctctctccaatatgaatatgactatatctatatatacatttttgcagccattttgtgaaataaatcctggagttggaacttatttacaatagatgccactggcttttaattattggggttttcagcaataaattgattaacaaacgaaaaacattccaaatatattctaatcccatatatcacgcagatttttccaaaatttgaaatagatttcggtaactatttaaaataaaaaatgtttgacaacccaaaagacaattgcaatcccttaaaatgagcaaaacgcaactaaatatatttcttatcaattcactaaatcttatttctccaaaatttgaactaaatttcgacaactatttaaaacaaaattttgtttgacaaactaaaacacaattgcaatcccttaaaatatttattttaattataaatttaaattagcggggtaccgcagttttttttacaggacgggtttggcgaaacaggtttggaaggacgttacttaataacaattgtaaactataaaataaaaatattttatagatagatataatttgcaaaattttatatatactaatttcgaaaaacaaattgtctccgcggtgtaccgcgggttaaaatctagtgcaaatgtaaagagagaaacctataagagttaacttaaaagactatttaatttttgctttcttttttctctttcatgtgaaaacttttaaagcaaatgagtaattagttatacattatgttattcaaattatgtcaatccaatatttagccatgagcctatcatgatgtgattggatactagattaggagagaatacatagaacaagaaattgtttgcttagaatcaagttaggcaactttcaaactaaataagtaacataattgtataccattttatcatatatggttgatataagtatttcataatagttaaaaaagataagaatcttgggtatatatagataaaaagatttatacatgaaaaaaatataattgatatttgaatcaaaagtgaatctaactatacaaatataattacagaaaatgaatataattttattaactacataataacatacacgaaaaataacataaattagcaataaaaatagtaaataaattagcaataaaaatagttaaacatagttatttttaaacaattttcaaaacaataacccacacgtagtttgggtattcacctagtgtgttataaaaaaagaaaacatattattgattctaaacacggctaggctcgagtaaatgggtcgaaagcttaatggcttatctttttagtggatgttcatggtaatatgttatagactcatagtcaacacaacaaataaatatcttctgttttcaacattgaaaccgatagtattaatggccataaatctggcatttaattcgtgattgctaattttaacggagtggttttactttcgcatataaaaggtagaagaaagagtttcttctgatacccaatctcattcattatcatagacaacaaaataaatcttcttcatgtctcttttctctatttttttctaagtcttgagattatgcacatcatgaatgtttgttagattattttcggatgttgcaaataagaagatctgcagtgatggaggagggtaagttgccttgcaagaccagtcaaccatagagtctctttcaatagttgtggttcttatctttgtttgagtgagcaaaaagaataagtttttttacaatcctatttgataacttcaacagaaatatgagttatagatttgatgaagtaaaggtatttctgataatctataattcatcatagacagaaatgtagtcttatacatgtaaagttatcaaatgggctcatggaaaaacttattccttttacttaatcaaacaaaactaaagaccacaacgaagagactctatgtagactggactcgcaagacaacttataaaatagtgttttagttagacaattagaatcaactaaaaagtttataaatttagaaaatctaatattataatatagtttaattcttatttttataatataatatatgcataatacggaacatatatctatatctactaaatcaaccgttaagttaacaaaaattgcaaccctttctgtttgacaagtagcaaaaatctcaaattttactcttttactttcatgtaatcctattctattattcttgaaaataaaattatcaaaaatagaaaaatattttaccattttcttagcaaccacccatgatctcaaaatcatctcatcttccaaactctctcccacatatcttttttgttaaaataactctttcccactttattcaataatttgtttgttttataattttgaaatttacctatctatattttttcttttgatgaaatttaactatatagctaattaatgaattcaatgcacttctattgttaaaaactaatggcaacatatgtttgattttcccaaaatattttgatatatgatgtaaattggcatttattttgtatacgcatagcatggaccataatgctagtctagttgtattataaatgtatctatgacttgttgcgataagttgcgatgaggaagaattggatatagacttcacggattaaacaactgaaaccaacaaatgaaataccctaaatgaaagagtaaaacgttttttttttgttggctatttacctaagaatcacaatgcaattgtcaataaaaactagcagaagtagaaagccttatttagcaaattattagttaatctttttcagaaaaaaacttaattttcttgagtaaatgtttgtatttcttaccaataattaacacaaaaagggtttttatgcaaaaacacattcgaaaagtatttgtttgcaagttaaccctccacctcaaataaatacacgtcaatatcacaatctcaaaagtcacccgcaatataacctatagacgtgtataaattttgcaaaccgtataagtcagtatatatgttatcaaaactacgtcgttttgaacatttttattttttcctaagctaactaggaaaaatatatctaaaacaggaaacataatttaaggtggcctatgatcatctatatttatgaacaacccagacctgttttcacatatctgaaacagaaactaagaacacgagatttacaaagttccctctgttgcaaatcacaacgttgaggtacgtctcggtgaggatttgctcctcacaagccgaatccaccatccaaagttaagagattacaatggtgctcttcaatggagatctctcaccaactctcgtctacaaatctctctctaagaagatgaagaagaagataaagaacaaggagcaaaacccagagaatcactctctctcacttctctctctctaactctcaccaagaacccaaaattgagaataagaatttatccatcattaagctcacctctctgctcttgtattaagtgatgagctgaatctaacaaacgttcgcacgtgttaacatccacacttgtgacttcttctttattcccttcaaagcctcttcttgaactagaagcttcacttgaacatgtaaactccaaatactctagttgctatagagtctttgccaaacttgaacttgttttatccttcttctctttcattagcttgagcaaagcttctttgagctttctccaagctccactttaaagttgaatcatactttaacataatctcttcttcaatttaatggatttgatatatttgccagatcttatatataaaaaaataaagttctttttttttctatggacattcttactctctacacttgtatgatagaaaacaacaaaaaaaaactactacgcgtcacagttaatttccgcgaatctgttggattgctgctgtggtaatcaatttatgtagtacaactagatatggacccgtggtacatcccgggttgatattttctttataagttaatttttttattttaattaatattatttatatatgaataacatattaaagaggtagattacgggtctatatttttaataaataaaaaaatgattttttatctttaaaatgatatatatatatatatatatatatataggctattcatttttaatgtatgatacacctcgtgacgatttttataactaaaactatatttaattttaaattatatttgttttgttaatattatttgttttgtttagtgtttacaattgtataattatatttttattattaattctagggtttcacccataatatatcatcccataataatatcaatctagacatgtcccatgaaattaaacattattttcttattttcttataaagttcaaatatttataatatttgaaacttgaatttttttaatattgatctaaacttaatagttttattttgattgttatatctaggattaatgattgatattataactacatgttaggattataattttagccaatcattttgatcatttttatagtatgactctgaaacattgccagatttttaagcaatgtgggaccttgtacacatattttatttttttcatcgattgagtaatatatgtcagttttttaaaatttgaattacatcatatgcagaaaaaatcctaacatttattaactatatgtatttatacataaaatcaaaatcaattagaaataagaacaaataaaaaagtgaaagaagaatttatatatttatatttactgtaggtaaagagagtttagacaattagcaattaattgaatatagtgcaataaagatgaaatttaattaaggatataaatttaagataatatctccatggaatagattttgtaaggtctaaaaactaaatagtatttacttttaggacaaaaattttgctgaaagatattttatgcaataactcaattgtaattattcacaaatataaataagtgtttaatgttgattgatgatttgtaagttttgtactttagaaaattttgtttagatatttttgtaaggacttgaaagttaataatattttttaaaaagattttttacacaaaattttaccaaaaatgtataaatagataatgtacatcgaatgaaacacattacattccatatttccatttaaatggatgaatcattgaacaccaaaatcggtggaaaaaaaaaagacctcgcaactcacatcaagtcatcttatttcaacaatttcatcatattttgtttcttgcaaatgaaagcccaaagtgtgctaatgtgcaaggaaacaaagaacaaaaaaaaaataaaaaaaattgcgatctaaatttttgtttttcctattccttttgtgtataggattacagagatagagaacctaatgaaaactagcaaaatcttcccgattgattaacgaatttaacaaaaatgttatagccgtacaatatacctataacgagaatctaaatacctatataaaccacaacagtaaggccacaaataaagctatagagacagtactcttgtttattatataagatccagattcatcggtgttagttgtagtagtggttccttgtggattaagcccaccgccacctattccaaacggtgatgtcgtggtgccagacggtggcctcaatgtcgtcattgggctgtttccgacggttgttgacggcgttcctcccactgtggtagttgaagctgaccctccagcgttactgccatgaccaaaccaaaactttaactaatatagtttataaatagaatgttcttgttcagtaattaaatatataaatgcactattcacgtccaaattttaatatgatgataaatgtattgattatatttagtgtttctagcttacctcttaaaacgaaggtaataatcttttcttacaatagacaatgacaatatttgaaataaaatttataatgtagatattgtttaaaaaaggattaaagtcagaattggaaatggagaaaagaaacaatttatcttcctaagtaaatgcaactcatcaacttgtatacgcttgttcgtcacgaaacctctaaagtagaacactactgcaacatgctttgttccttttctttttgccttttaatttattttcttttagttattacaaacttgtaccattctgaccagaaaaaggctagaccaacggacagaaacagaataatagaactaaagaggacatggatctctaccgttgaatgattactcgtaaagatcatccaacggttcagaaacattgaatgggatatgcatataataagtcatgcaaattagtacgacgcatgaaatataatagaatcacaacatcctcagtcaaatgaatgaaaaaatcgtgaggtggagttccttatcagttaaacatattgaaatcagaaacgaagagaaagttcgtaaatatattaatagaaaaatgaaacttaaatccagtttttactgtttacgagtaatatatgcaaaatatacagatagcataaaaaattacgtaccgcacagaatttggatacacgcatgatccataacctacacaataataaacaaaaatagagcgagttaaaacacaaacaatcttatacacaaagcttattgttagtaaaaagtaaaaataaaccgagaaaatgtatgcaacatgaataatgcaaaattctcaaaacgaaaaaaaaaaaaactgcctaactagaaacatcgtcaactattatgacagttttaccgagttaaccaatccggttaagccatgtttctgtaaaatacatactaggatcggttttggcgatagtggatgtgccagcgaagttacatgagccaggagccatggctgcacgttggaagtagctattgaaagcgtaagatgcgtgtgcctgaacggtgttagggagaaaacagagaccattgggttggattggagcacagtcagctccagcggcacatgcgtagtctagagccgcctgaagcgcttggctcgtaacatcgaaccgagcaacgcaccacatcgcagcggaggaacggaagagaagaaggaggaggaaggagagagtttggagacagagagccattgggaagtggtaagagagaaaggaaaggaaggagtgagagtgaagagtttgagtgtggagccttacctctctcactctcttttgcttttgctttgttttctcttttcttttcatttacattaattctttttgcgtttctttgttcttttttttgcttatgttgaatatgagctttccgtgttgattttaaaataaagcttaaataaaagatataaggactagttattatccgaaaatatttatgaaacaaatcaaagtaactagagtgaaaagcatgcaattatgtggaattacattttcataactagaaggattttttagcctctatatcgcgggtctatgataaatagtgcaattttacagctagatgaattgtttcctctatactgcatcgatatacaacattatcataagtgttccgcgaaaacattgttgtcaaaaagcacaaaaaataaataaattgagtacataactgggaaagggtcacacaacacaagcactcatcagtaacacatttaagatctgagatattacacttacacaataacatgtacgtctgttccgatgcatcaaactaaaatgtgcatctccgatacttattatgggatcctatcaagcttttactaccacggtctccaccatattctagaccggatttataccaattattaacttctaagccaccacaccaccactttaatcatatatatgcatatctacatcacaagaacattgtacacaaaagtattgagtaacttacatccactctggaaaaatattgattaccgctctaagtgaaaaattagtgttcaatttatatttaacctatgatgtcctattattagtactaagctggtgatgtattaatggatataaatggattattttctttatttgaatgtcgttgttgataggacaaatatctggcaatattgtatcaaattagaactgtaaaatagtatgatcaaagaaatacatagatatattaattcattgctctgctacaaagaaaatagcaatctaaatttagagtaaacatttaacgttctaaattagcaatgcattgcaagataaatagatatacgagtaataatattggagcagctcaaacgctcgtctctcgtagggtatctcaagaatgattgaaaacagcatgagagaaaaccagataagtttcacattcaagagactttgctagcccatttgagagactcatgcaccatttgtttctttttagtggtagcttttgttttagtactaaaatattagaattatatcattaagaaactcgagtatctcatcattgaggttgttcttagctaaggagaatgcattcctacaagtgacaaccacttatggcctaaggcctattctgcgattaattttataaacaattcttcacaatatctaagataatagggagcaaatagtgatgaagatagagaactagtttttgaagcaatgtgtgctatataatacaatacattaactattgaaaatatgagatatgggatatttcacaaaagctaaattacaactcattacattaatcaaaatctgtaggtacaacgtatcacatcatttgtgcgaactctagcatgttagttttagaaaataaataaagagaataaaatattttgtcatttttctcttttaaaatgggtcaaatttatgtttatggaagatataatctcattgttaaaaagagtaagaaatcctttaatataaaatggtcaaaaaaaatttcaatcttcaactaaaatctttatcttttaattaaataatggatatatatatatatatatatatatatgatttaccatattccccaaaagctaaatttcaattaagaagaaagaaaagactaaattatagctcatcacattaaatgaatttgtaatgtataatgtatcacaagattttgccagccctaaaatgttataaaatttcaggggtttctttgttctattcgaaaaaacatagtcattagctcctctgtcttgttatactactctcaccaaacgtaagttttgcttgtttcatttttctaagtttttgttgatatcaaactagatttgaaggattttataatatatgtgacgatctatggcatgtcgatataatctatgtgacatagaaaatactcatttggagggttttcttatgttcatgcaaatttttttatgtaaattgcatgctaattatttggataatttcgtttcaaaattaggtttttcttggaaatgaagacaaaagctgggaaacaaaagaagagaagtgttgactcggatgatgatgtctctagggaaaggagaccaaagcgagcaacatcaggcacaaacttcaaggagaaatctctccgtttctctgaaaaatatgaaactgttgaagccaagaaagagcagatcgtgggtgaggagatcgtggcgatacagtgaacttcttctttggagagcaatgatgatcaacctcggccaaaccggaggctgactgattttattttatatgattcaaatggagttccacagcctgtggagatgctggaacttggtgacatatttattgaaggtgttgtcttacctttaggtgatgacgaaaaggaagaaaaaggtgtgaggtttcaatcttttggtcgggtagagaactggactatatctggttatgaagatggttccccggtgatatggatctcaactgtgattgcggattatgattgccgtaaaccttctaagaaatacaagaaattatatgattatttctttgaaaaagcttgtgcttgtgtggaggtatgtaagaacttgtccacgaatcctgatacaagtcttaaagagcttcttgctgcggttgttaggtcgatgaatggaagaaagatcttttctagcggtggagtcatccaagagtttgttatatcccaaggagaattcatatataaccaactcgctggtttggatgaaacatccaagaatcatgaaaccaaatttgttgacaatcgtgttcttgtttctctaagagatgagagtcgtaaaattcacaaggctttctccaatgttgctctgaggattgatgagagcaaggtcttgacatctgatcaactaatggatggtggtgaggacgaggacctaaaatatgctaaactactgcaagaggaagaacatatgaaatctatggatcggtcgagaaataagagaagttcaacaacttctgctccaaataagttctacattaagataaatgaagatgagattgcccatgattatcctctcccatcttactataaaaacaccaaagatgaaacagatgaacttgtactctttaatgcgggctatgcggttgatgcgaggaacctaccttgcagaacacttcacaactgggcactttacaattctgatttaatgttgatatctcttgagtttctcccgatgaagccatgtgctgatatcgatgtcacctatttgggtcaggtgaggtggctcaagatgatggaagggttttttttctcgatgattcggagaactctacgcaatcacatgatcatgatggaataaacatattccttactcagataaaggaatggaagattgattttggggaagacatgatatttgttctattacgaacagatatggcctggtaagcttactacaatttattgcatgtttctgtcttatttgttacggctgctgcttgctgaccaagctatgtttatgttagagaaatagaaacttccgctaacggccagtgtttagtttaaaattaaaagctcttaatgtttgtgtattaaagctagaaatagaaacgtagtactttaagatattttgtttaacttgtttaatagaaccacaatgatttattttattgttttgctagaaactcattgttgtaaggtgctttgtgtgtaacaagccatggcatcgctctcttggccttcctaaccttgcagttcttcaattatgaattagaattagaatttgttttgctagaaactcatttattatgaattagaatttaaaactaagattaaaagtagggtaaattaaataataaattcattttttagatatttaatttaatttgtggaagcttacgtttttcttgtcttcattatttgtaatccatgatcataatatttatttatttaatatgtaatgaggcttcattagaaatttgttaagtgagtatttgatcagagataaattttctataaaaagagaatttgtgattttgcataaaataatgcaagataaattatgtattaaaactgatattttggttttactttagtggttctttatttattttgatacggttattgtaaatattattttttgaattgttttacatgaattgtagtttttttcaatacctctctggctttcgtaattctaaacaagattctattgctaatgtatcatatatatgcaggtatcggctagggaaaccgtcagagcaatatgctccttggttcgaacctatattgaaaacagtaagaattgggacaagcattttggctttgctcaagaatgaaacaaggatggctaagctttcatatacagatgtcataaaaagactatgtgggctagaggagaacgatcaagcttacatttcttctacgttctttgacgttgagagatatgtgatcgtccatggacaaataatattgcagtttcttacagaatgtcctgacgaatatatcaaaaggtgtccatttgttactggtcttgcaagtaaaatgcaggataggcaccatacaaaatggatcatcaagaagaagagaaaaatgttgcaaaagggagagaatttgaatctaaggagaggcaaggcacctaaggtatccaagatgaaagccatgcaagcaacaacaactcggcttatcaatagaatttggggtgagttttactccatttattctccagaagatccgttggaggagattggtgcagaagaagagtttgaagaggtagaagatgttgaagaggaggatgagaatgaagaagaggacactatacaaaaagctattgaggttcaaaaggctgatacacttaagaaaatccgaggtagttgtaaggaaatggaaataagatgggaaggtgaaattcttggagaaacttgtgctggtgagcctctctatggacaagcccttgttggaggtagaaagatggatgttggtggggctgtcattttggaagttgatgatcaaggtgaaactccattaatctattttgtggagtatatgtttgagagttcagataacagtaaaaagctacatgggaaactcttacaaagaggatctgagactgttctaggaacggctgctaacgagagggaacttttcttgactaatgaatgtcttactgttcagctcaaggacataaaaggaacagtaagttttgagattcgatcaaggccgtggggtcatcagtataagaaagagcacatggctgcagataaacttgaccgggcaagagctgaggaaagaaaagctaaagatttgccaatagaatactactgcaaaagcttgtactcacctgagaaaggtggattctttagtcttccaagaagtgatatgggtctaggttctggattctgcagttcatgtaagataagagagaatgaagaggaaaggtcaaaaactaaactcaatgattcaaagacaagatttctctccaatgggatcaagtattctgttggggattttgtttatcaaatccccaactacttaagtaaagataggggtaaaagaaggccagtgtttaagtatggtaggaatgttgggttaagagcctttgtggtttgccaaatactggatatagttgacctaaaagaacccaaaaaaggtaatacgacttcttttgaggtcaaagtgagacggttttataggcccgatgatgtttctgcagaagaggcttatgcttcagacatacaagaggtaacaactatttcttacgtgaaataaaaaaattatttcgtatgttacatatttgataatgttcaaaggttgatcttacagtttttttatctttctacttttggaaatttctttaggtttattatagcgaggacacatatattcttcctccagaagctataaagggaaaatgcgaagttatgaaaaaaactgatatgcccttatgtcgtgagtatccaattttagaccatgtctacttctgtgaccgtttttatgactcatccaatggttgtctcaagaaggtatatattaattaattttctaaatagtttttgaagataatatatttattgttggttccgtaaaaaagttgaaccgttgtttctcttaactattatgtaacagttgccttacaatatgatgctgaagttctctactattaaagacgacacacttctaagggaaaagaagactgaaactggttctgcaatgcttctgaagcccgatgaggtacctaaagggaagcgtctagctacactagatatttttgccggatgtggtggcttgtcttatggactagaaaaggctggtatgtatttatctctagtcatatattttatctttcaaaatgcttgaacaccatatattcatatgcatggtgtatgtacacaaggtgtatccgatacaaagtgggcgatcgagtatgaagagccagctgcacaagctttcaaacaaaaccatcccaaaacaacggtttttgttgacaactgcaatgtaattcttaggtaaatagccaacagaaaaatatactttactcttttaattaggtcatttcttgtgctaggatcagttggttgagattattaattaatgacagggctataatggagaaatgtggagatgttgatgattgtatctctactacggaggcagctgaacttgcaacgaaacttgatgagaaccagaagagtaccctaccacttcccggtcaagtggatttcatcagtggagggcctccgtgccaggtatatcttaaagttgttgttttacttcttcgataacttaattttgtagaataagtgttcttaatgatttggaaaatttggcaggggttttctcgtttaaataggttcagtgacggctcttggagtaaaaaccagtgtcaaatgatattagcattcttgtcttttgctgactatttccggccaaagtattttcttctagagaacgtgaaaacctttgtgtcattcaatgaaggacatacatttcatcttactgtagcttctcttcttgaaatgggttaccaggtaatatttatttcctaattctattatttttgtgtcatggtcgttcttattcatgattgctctttagtagaagttggctacatatgatataaagcaatggttttcatataacaagtttgttgaaacatgtaggtgagatttggactcttggaggcaggagcatatggaatatctcaacctcgtaaaagagctttcatttgggctgctgcaccaaacgaagttcttccggaatggccagagcccatgcatgtttttaataatccgggttttaaaatcccactatctcaaggtttgcattatgcggctgttcaaagtactaaatttggtgcacctttccgttcaatcactgtgagagacgcgattggtgatcttccaccaatagaaagcggagaatccaagataaacaaagaggtgtggtttaataattgcaccactagaagaaagtatctatacattacattaaatacaataacatgaagtcatggttctcgtgtcttgtagtatgaagctgttccggtctcgtggttccaaaaggagatgagaggaagcatgactgttctcactgatcatatatgtaaaaagatgaacgaactaaacctcattcgctgtaagaaaatccctaagacacccggtgctgattggcgtgacctaccagacgaacatgtaagtcttactcttatacactccggtaggaaattcttattaaatctacacatcattttaaacgcaattttcttataattacaggtgaatttatcaaatgggattgtgaaaaacattgttcccaatttgttaaacaaagctaaggaccacaacggttataagggactctatggtagactggactggcatggcaatttacccacttgcatcaccaatcttcagcccatggggttggtgggaatgtgcttccatcctgaccaggacagaattatcagtgttcgtgaatgcgcccgatctcaggtaataaaatctctaatgttccttccctattactcatctagcatcaatataagtgtaaagagtttctgttttggaaattgaagtaatgttagcttatgaatacagctctgaagtgaaatgatggtttaataaaatttttgcaggggtttccggatagctataagttttcaggaaatataaaagacaaacataggcaggttggaaatgcagtccctccaccattagcgtttgctcttggtcggaagcttaaagaagccctacaccttaggaacatctaaatctatatttaatccaaatgaatgatagattatatattgtcacttcatttgattttagaagtaaaaccctcttcttgaaactcaaagtcgttggtttaggatgacactatagaaggatctagaatattctctagtatatttgttaataattactatagtttgtacttaaggaaactagattaattaggttaccattctattctctatataaacatatgtaactgtatctcttatgagagtaaatataacttcttctaattcctaaactctcatcacattatcattgtatcagagctataatgatctaacgatcgactttgttcctgaatctctttttttttttttttagccgagggcttccaacatttattgttgtctttaagccgagtgcttccaacattcaagttcatcatgaacctcttaatctaagcagaaatgcttccataattcaagtctaatcatagacctctaaatcaagtctaagtgcttctttattttttatacaatcaagaaaagataaaaaaaaatacatctggttatttttcgttttcttaagccattgagcttcgttaataaagagttaaagactaaggggagcgaggtttgtttattccattttgaatggaaaacccttttatattctttgggttttgattatgtttgttaatcaagcaaagcaacgatgtctacggactatgcttgatcgccttgcgaattgggtaaagacagataaaagttttatccaacgtgtaagagttagtataaatggaaaatgttgagatgtattcgagaatttaaagaaagttagttgttgtattctttcctacctattttatccacttaagatgttataatttttagtcacgtcgccatttcgcaatacatagatggatgcagactcaatattatcattggtctatagagcgaatgtttttgaaacctatcattgttttggttttttttactatataaatgtttaaaactttttgatatgaattttttaaattaaaaaaaaaagataaattaatacataaaaaatttgtgtacccttttcaattttttttactttattaagatttgtgagttttggattatattgtgttttgtttggttggtgtgtataggtggatcatgttttgtgcaagatttatctgactccatcggcagcaaagaagaagaaaatgaggagctgaagaagatgatcaagtggtcgtaaaaagaggagcagctggatttgcattaatcgcagcctcatgatattgtgtatcagccgcatctttttccttataacttggataacatttctaagttgatcagttttgaacaacaaccagtgatcccagaggattttgaagattttttggctgacttcatgaagcaggatggagatgaagaatccatcgacactgaaggaatgatggaacactacactaactgatctcagccagcttatagttttttttttcattttggtttgcgtttttgttatacgggttttgttatcagaaagaaaaaacagagagaagatttcattatgtcttagttgctaattgctatgtttcctataggtagtgttctccaaaacaagagataattctccctgttgttattgcttttgatgcctagatacacaatttattcaacattttctaatcatcttagaatttcaaatatacactaacatgttaccgttgtaaaacaccagagtcttgttcttcttcatgttcttctcctaagcatttgtcttcctctgaaaaaagaaaaaatatagaatataccgggtctttataagtctgatgttcggaagattcatttagctcatttgcatcctcaatctttgtttttctcatctagtacgtcagatgtcaagagccattgaataaactcagatcttttcgtctgctctccctgatcttgtgttgagacagatgaggaagattaaccaaactatcccattcattgttaatctggtaccttctgaagaagataacaacatctttacccagagttcaatcaagtatattttgcaaaaactagcctagtataagtcacgtgtaagatgcatgtagaacacagaattttttttgttttgatatcaatgttaagtatttataccattttcgaagttttgacagaagttataaagaatacaagtaatggaaaaataaatctacagaaagcacaaacaaaaacaaacagtaatggaggaaatctttaaccaagagcggaaacaagaaaagaaacaccgattccgagaagctaaactcgaaaatttcagtgatttccacaactcgaaaataccaaggagctggaatctcatcttacttgccacgagcaaaccttagcagaggtccgtcctcaaaacctctcgagtaaggcacattaacttctcttcaaactaacgcaaaacgtaaagataatagagaacttaaacacaaatccgacgaagtcctcttgacaagaagatggagggttgttctcgtactcgcttggcgggatgggcattcttagttgtttaaaacttcaccaattgaagtcttatggttcatcatcatccgttgtaagttccgcttaacatcgctatcaccgacaagctgattttcttgtagatgcaagatttaccacaacaataaatcatctgttgactccgagaaaccgcttgaaaaatctgtctacaaacactgcaaaattggaattctataaaaaaaaaaaaattctgtttcgatacaaactaaaccgaggcataagcttcacctatagacctaacctgaagtctactccattattcattaacgaataatcttttggcaaaaatattaatcaaatggcaattttgaccaaattctcatttcatatccgctcaagttggtaataaaattaccaaatattttattaacaaaacaatatgaaaaagaaagaattatataatcgagaaaaatagagaatatggaaaagtagaggcgtacgacaaagaagaccttaacacacacaattcaagcaatatataaaaaaaaaatccaatctttgttcctcaaaaatcctctgcttcgcgtttttcttcggcattgactttaccaatcacaactttctccgggatcgccgatttatcttcgtttcaaccatgactcatatccttttgattctctctttgcttcaatctctttagattctctgtttctcggccgattgcagaatttagggttttggtttgcagaattaggggttaaagttttcaaatttaggatttgttttgggagaagatgcaattgtagtttcgtttctagattgctctgtttgtataaagactagatcttgttggatatttctcgaatgttgcttatggatcttataaggattctgaatttgtgaaactagaacaaagtgtgttgttttctttaattcaagcttttgatttttgatgcgtaatcgtcacgtggaagtcagagagagcgtgaccgtgaaagagctgccgctcgtgctggtggaaagggtaagaatggtgacgatggtttgacgccggagcaacgccgtgaaaggtataaacgaatctgaaaaaacgaatctttagttgggattgttctgatctgtgtggttgttgtgtaatgattcgatctgtgtggttgttgtgtaatgatttgaactttgtgtaatggttgttgttgtgtaatgaatgattttagagatgggaaagcattgcaagagaaagcggctaagaaagctgctcaagctgcaggtgcgagttctggtggtgcagctggaggaaaaggagctgctgctaagaagtgatgatgatcatttggtttgtcttttgagcatattgtagactttatgtttgaaattgggttgtttagacctgaagctttgactcttgtctgaaatcccattataatgtctttgtgttgaatttgcaatttgatgcttatggtgaaatcttatttggtctttctttgatctgttatgaggttaaagttacaattatactgtctcttatggttcttattactctgagtttatgtttcactctcagatatgtttggaatctattcatatagaattatagatctgagttgtcatagctatttgatgcatatggtgaaggcttgtttagtctctcttttggggcattgtagttcttgttaggctgactttatctatcactctttctctcagaatgtttgataatcaagttatgccgtctctgtacatcttacttggtgtttgatctgtacagaagtttatgacagttgtttgagtgtgctcagtgttaggtcattgaatggtttagtggaatattaattaagaaaactcgaaactaaagatctagtctaggaagcatttttcggctaaacaccgtttcgtttaccgaaagtgttatcctagtgatagacattgatgtctgcttgcgcagtgaatcccgtctctttgatgggtttaaggattttgcagttacatggcctgagctctctttctttaggagcaactagtagctgtaatatactaattaaacgcaacatccaagcaattacaatcacaccacaataaacatgtaatttaccatcatcatcccttgtttatacttgtaaactaatcttgatcattctacaagtccagtttaactttatgttcaatcgtatccatgtttcattttccagattttcaactgcaaggttggtagtctctctgactcatctagaccaattaaatgaagagagacaaccattgcattttggttaaatcggagggtaattcacctaggttccgagttggaaccaatgtaaaaaataatacaaatcgagtaaattgtaaaataataattttttgaaaattttatgtaaaatatagttctttattttatttttattctttgtagtcaaaattttgtttataatttgattctacttttataataaaataaattaattttattttaggtgcagttttcggcgcaccaaactataaagttaggatgaaatgtaaataaatgaacttaaaatatatatttttttttttacaaagatagtaaactaaaataaaaattaaatcgaattcaccagaaaaaaagagtttaaattaagtaaccacatttgagtgacacgtgattggatattgatggagagacgtgtcactttcagtttacgttattggttgtcgttagatcacagtctgacaagcgtttgctgtcccactctaatttaattattctttcttaaataaaatttggaaagtgagtattgtttagcataattttacttatttataaaggtacaaattttatttaataaaactgcagaaaaataaattcgagaatttaattgacacgtgtgtctttttttgttccctaaaatcatttgctttttagttattttggcttttctctatctgttacagaaattatacatatattctgggggaaaaaaaaattacatgtaaaatcagattttcatgcattaagcacatgattcgcttttgttctctaatttgtatgcattgagcacatgattcacttttacagaaatgctgtctgcaatatattctaggtattttacctaaataggaagaacacaatctaaagggttcacaaactatatgttcatgcaccataaattctatactataaatggttatgtgttttttcttatagtgtaacctacgtttttctttgttcacaaaatttttagtaaagcttctagatgtaatgttgaagggtaaattttagagttatttttcttacaattcagtatgtctttaggtgtaacaagttttgaggaaaaatataaaatcggtctatagaaaagttaacatattcgtttaccataatactgaatatcattatcacacaaaattgtgaggatataatgtatcatatatagagacagtaaaaaaaaatctgtaaatatagtttggatttgtgaaccgtttaaaataatcttttttaaaaaaaatttaaaaatcatattcccgttaatagactttttaaaaagcgaatgtgttttaacaattacaacaatagtctaattacaaaatagaacaactaaaaatagtgttagaaaataaaagaagaacggatcatattgttcactggtggcaaagaatccaaagcatcagttccgggggattcaaaatccgcagttttacggtaataataatgggtcaaaaattaccaaagaaaaaaacattttaaaataaatataacttatgacaaagaaaaaaatataaaaatcattttactgaaattaaaataaataatacgttgtatgtggacaaggaagaagacaacattgtatatatgtaactttataaacatggttctatatcttagattattaacaaaagtaataaattattaattagctcattctgatgtgcaattgtgcatgatgagttattccacattacattctcttgccctcttttactagcactcctttgtgcagtcagcctcacatgttctttggttatttttgtactaagacaaactaatatgaatgattcctaaaataggtgatatgacgtgttttccatttgccaaagctaaaaagcatttagttttgttctgtagttgtcttaagccgtggtaaaagaatattttggaaattaaactaattgtaaagaatcttacgagcaaacttcacctaattcaaagagttcaagaaattttatattagaatgcatatatagcatccataaattcacatggcaccttcgacaaattgactttaatattcttttttctttggtaaataatctttaatattctttatacactactaccatatgaatatatgattaattttaaataaaatcttccgaagtcacaaaaaaataaagttgcatctagtctgagtagtgtctatacgagtctcgatagtcgatatacgtgatgatctttttattttctttttcacagatgtgaaatttatttaaaataaataataaatttttactataattgaaatctttgaatataaaaaaatagtaagcaagttattttactgttataaataagcattctcaaagtgttgggttttgtttaactttttgaatattaaaagaaccggaaatcaacgatcaacatgatcatccaaaaatatggaaaccatgaagaccgagaaaaatctagataattgtcatatcttagtttaggaatatttacaattatctctaaatatattatttatatttatgtttatcatagtttgggaaacttaaatcagtctcctctttatataagagaatgttatacctaaaatttatcattgaaccaaatggtgttaaacctaaaatattatagggtatacatttactaacattgattttcatgaaatcgactagtgatcacttttccaagattaatggaagatgagatattaaggatagattgtatccaaaaaaaaaagacatattatggatagtttaataggtgtatatcaagagagatgtttgaacctaagattcaaaactttcttcttacaaaataaaacgattactagatagctttggctaattcattggacaaggaagcatttacttatctactatctttactatgcaacactacaactcataagttttttgatataatatcaactttaaaatagtcgaaatgtcgaatgattaggatcgataaaaaaaatcaaaaatggaaaggcacatgatgtatggtttttagtgtaatttttttttttttggtgtaaaagaatgcacatgatgtatgtttgagattctataccttagttattcaacttgcacttaaagcctttgtactgcaagctagctagattcatatcgttcaatgagaacaaaaagctagatatacgaaaactcttctagcaagattactagagtaagaaatatatttcaaagtacttgcgtaaataatttagatagtgaataaaaacatttgtgaccaatagaaagaaaacaataacgacaaaattaaaaattcagcaattgaaatagaggaatatggctcctccatcaacacaatttcttatttttcagctttaattatagtataaatctaacaaatgttttaatatttaatagaagcacaaatcgtatgtatatgaaatttatttcagattaatacaatgatatgtactaggccgtctgttgctattctctatcaacatttgtttttcttttggtctttgacaaaaaaaaaaaaaaaaaatgctctatccgtagattttgagttttaagctt

SEQ ID NO: 579 - DNA, 118718 bp, Arabidopsis thaliana
agcctttgtactgcaagctagctagattcatatcgttcaatgagaacaaaaagctagatatacgaaaactcttctagcaagattactagagtaagaaatatatttcaaagtacttgcgtaaataatttagatagtgaataaaaacatttgtgaccaatagaaagaaaacaataacgacaaaattaaaaattcagcaattgaaatagaggaatatggctcctccatcaacacaatttcttatttttcagctttaattatagtataaatctaacaaatgttttaatatttaatagaagcacaaatcgtatgtatatgaaatttatttcagattaatacaatgatatgtactaggccgtctgttgctattctctatcaacatttgtttttcttttggtctttgacaaaaaaaaaaaaaaaaaatgctctatccgtagattttgagttttaagcttaaacaattgtttatagacacgcttatctcactcggaagctcagccattaactttttattgaaacatataacggcaaaatagtggtatatatttcgaaaaaaaatcatgaaatctaatagaacatgtagcagtaaacaaatttttttaattatttatgtataaaataaaataattattggaatataacattaaaagggtagaacctgtattttcttcaataaagcaaaatcatagacaattgctaacattttttatatgtctattctattttatattaacgtacgaaagtaaaatgtgaaatgttttgagatcgagaatgctatttttatgaaaacaaataacgaaattggaaaaatgaattagtaaaccagataaagtcatatgttgtcacttgtttttttttttgtttttttttaatgttgtcacttgtcatcattttatattatgttttttatgtcctatctataaatgatagaaaatagagatattatttaataaacaaaacctccttaaatatttgtttttgagatgatgtatttaggaatgtcgtataatagcgccaacttgctaatttatattgagtattagtttttaaattatgagacagtgaccaaagcaatttttttatgaaaagttctaatataattgtagccttttttcattagatgtctggtatacatggttaaaaatgtcttcacggtgaccatcagtgattaaagcccatactaagacatacatttactattaaaatatgttagagatcaaattggatcaaattaatttacatgaaactggaataggttaaaaataaaaataagaaagaaatacttttttcctctgatttttttggtcaactgcttttttttttcctcttaagcctttttataaattttattttgtcgttaacattttgtttccataaatcaaataataattcttttcgtaaaacgacccaacagtcatctcaaaggacaaaatgtgcatcatctcaaattagaatacgaagcttccaattcgacccttatcttacctgtttgattcattgttaaacatgtttaatgaactatattatattaaaaaaagaaacttatatcttgattagttacttaaatttagtctcaaaatctaaattgacaatataaaaaattggagtaactaaagatgaagcaagagatgagtatatgcgtcggaaaaagtgttcttgcaaggaattgtatccattgtaacagtgactaacatgaacgaacagaataatttatgggtgaatccgattaatttaaaaagttaagagaccacatcagcaagttattacaatattgtaaaataaagaagcagacataaactgatgttctagagaggaaaagaagacaacccatgacttccgcattagttggattcaattagaggccaaaacttgaagctaatcattgtatttggatgataatattaataattatgggctcactaattataagcatttgtggtgattatctgtgctaaactatacgtggtttacaaattaaattttattctccaattagataaatgttatcatgaaatatcgtttcaataatgttttcttggtatcacatcgctccaataattagtcccgtacaactgtaattaagaagtttaataattactattcagtatgtattcagacgtacatatatatatatatagatatattttttgtaatttgcatttcacagcggatcactaaatatacattaaacatttgtgtattcatctatatatattactataatataatagtgaaaatttatgttttttgagatggaatctagcaaagaaaagtcctatactgtatggtccaaagtcatattcctaggtttcgccttaaaaactctaaagataactaaacagacgagaataataaattaaacacagttagaatcgtttgtttattgaaaaaaaaaagcttaaagaatgcttaaagattaaggttcttacaagaaatatatatatcttagtaagggaaaccaaatttacatataaaaaaaatataaaaaaaattggtacttctttttcttgctatgactttgaatatactacagatttaatgttctaagtttaattaacaagatattgaacattaaaccacatcctttttatttttcgtgtactgtatatacatatatattgaatatatatctcttattaacaagatataacaataatgtaatattagtacaaccatcaaattgaaaagcaaatttcgtatttatacaatatgaaaaaactagaagaacttttaaatatttaaagtgaccaaatgaaaacaacgttggtatccaacaacaacatcattcgtaaaatttaaatataaaaccctataccaaaaaaaaaacaatatatggctatatataacacctaaatgagttagggctaagctgtcacgtttggattgataagttataagaaaaagcgaacgtaaaatggaggccacgaacaagtcgcaagataagaaaaaataaaggtcaaattattgtttatgaaagaaaaaaatacaaaatattaacaataatattgtttaaccaaaagtgtttgtgagactctttaattctctagtttacatatgaacaaattaagcttggcagagcgtagatctgagtcagatgataatgtttttttcggacaataaagttaggttccttaaattttctaatattatctccacatgatcacaccaatacacacacaacactccttaattctcgtatatataaacatttattctccacctattttgtcaaaattaagaacaggcttcattctctggacaaacactcaaaaaacaaacaaaaaaaggaacatggaagatcagtttcctaaaatagaaactagcttcatgcacgacaagctcttgtcttctggaatctacgggttcttgagttcttcgacgccgccacaacttctcggtgttccaatatttttggaaggtatgaaatctcctcttcttcctgcttcttcgactccgagctactttgtgtcgcctcatgatcatgagctcacatcttctattcatccatctccggtagcttctgttccttggaactttctagaatcttttcctcagtctcaacatcctgatcatcatccttctaaacctccaaaccttactttgttccttaaagaaccaaagctactagaactttctcaatccgaaagcaacatgagcccttaccataaatacatcccaaactccttttatcaatcagaccaaaacagaaacgaatgggtagagatcaataaaactctaaccaactatccctcgaaaggttttggaaactattggctaagtaccaccaagactcaacccatgaagtcaaaaacaagaaaggttgttcagacgacgaccccaacaaaactgtatagaggagtgagacaaagacactggggcaaatgggtcgcagagattaggcttccaaggaacagaacccgtgtttggctcggcacttttgaaaccgctgagcaagcagcaatggcttacgatacagcagcttatatccttcgtggcgaattcgcacacctcaactttcctgatcttaaacaccagctcaagtccggttctttgcgatgcatgatcgcctcacttttggagtccaagattcaacagatctcatcttcccaagtaagtaactctccttctcctcctcctccaaaagtgggaacaccggagcaaaagaatcatcacatgaagatggagtcaggagaagacgtgatgatgaagaaacagaaaagccataaggaagtgatggaaggagatggtgtacaattgagtaggatgccttctttggatatggatctcatttgggatgctctctcatttcctcattcttcttgacttcaaattaatatttgtcaaacttattttacttacttctacccttttttatatcaaaagtttccaccaaagaaagaaattcatattatgatgccaagattggtttgcatttggggttgaacacattgtaattcttcttacgaccacataatcaagtggttctcctttttttgtctgctaattaattgttcttttctttgcggttactagtaaccataaaatagaaaagtgtttgttttctaatgagaaaatattataattctgttgcaccaactccaactttaaaagtccaatgttagaatatttcctacattctatactaaagctcaaaggtcaatagagaatatgaatagtaatagggcagagaagcgttaaagggcaaatatgaatttagattatcttttcttttgtcaacaactacaatatgagtttctacaaccaaataaaaagttgattatataactttagaaataattatgtcatttttagcttcaattgtatttccgaatatgcaaacaaaagtgaaaaatctaaagttttggcacagaaatagaaagaggacaagtatcacttatttggaaagagaagaaacttaaactttttaccgaccacaaaagcgtcaatttttgtttcgaaacgacgccgtttagagtacaaagtacaatactctcccggcaataaccaacattagagttttggcagagattgttacaaaactacacttgctcatgttttcactaggcgtataatcgtgtcgtgttatttcgagtaagtacataccttgcagttcaagcactatgcaggtccagtggcatagacatagcctttacctgcaaaaacaccatttgaaaccatacaagattcagccacttggtaagcaaaaaaccatggaagatttaactaccaagaactgtgaaacaaagagagcactcttagcaatttttcaaccctcatatcaaagcacacaacgatgaaactcaccattgtggatgaagggctagaagagtcaagatgtccagatcttctagcctcccaaaaccggcttgttttatctccacaacgctgtacctgcgatttgctctgatctttggaagaaaaactgatcttctctcttcccttttgtacagctcttaaccgacctctcagcaacccaacttcactctctattttcagtctttcatagtcaatagctgacattgaatttcttcgcatattggtagacatgttacttttcccttgtggaaatgcataacttgtatctgaaacactttgtgatctgtccagtttcagatcctgagtggcatggtcagaaggaacattcagttgccccttgttatcttcatcagtcactacatggatgtcatgtacatgacaatcaatgtcgtgagggtcctcacaaagcttcttagaaacagcaatgtcgctagttcttgatactagttctgcatataaagtttcaccttcctctctttctttcagttctatatcactcagggcatcaaatggctcacttcttgactgatcacactcagtattgtccatctgattagtgaagatctcaaatccagaagagacattcacagtctccatgtcatcccatggttcagtaatctgttgcggcgtctgcaatctttcgatttgagctggtttagaatctggagtattgtgaggttgctcagtctcaagaaacatttgcctgtaggtatcaacttccttctccagaaaatgtttctccctctccctcctaagcaaaatttctttaagaatactcatctcttccgcatcaaaagcagacttttcttctatcatccgctgatattgcctagcttccatctctatcgacgccttttcttcttgcaaccgtaatatcatacctaaagcctcatctgcagcagatgcagcagcatttctctctttctcaagttcaagagctaacgaagcacgtgcagctcgttcttccccaagcacttgttctgacatctcaaccgtcctctgtaccataccaggggaactgcatgcaccctctcccactccacacccaacagaacttagtgaaacacttttccgcaacgacacatcctccaatgcttttccactatctacaatgttacaacttgcatcaaaatcaacattcactatccaatataattgaataaagacaacaaaaaaacttaccattggagttcacaagaagaggatcattttcatcatatgatccctcaaagctcttaaggcctaaacaactttggtaatggttcttgaaaccatacggcgacctatggaagctaagccgcttactcttaactttaaagcttccttttttcaaactttgcgcagttaaaagatcgaaccctgaagccttattctcaaactttccaacagaaggagtagtactagatacctcatcttccaactgaacacgtctacgctcacattttctcttctttccaccattatacagaattgaatcaaaaggtgttctatttttaacagatctttgaacagaagagatctttttaaccggaagattccttaaactctcttgaaaacactcactgtatagaccatcacaaggacatggtaggtctaaaccaaataaaccgaggaacttcgatgttacataaacgataaacgatgcgcaaagtagcgaaaacgcaacggaaagatcgataaacgcagccactaaacctttaaatgtccatgattttacctcctggcaacgcattttatacctgcaagtatacaataatctacagaaattactcaaagtttgagaaattggttagagaatcaaattgttatttgaatcaattacaagcatatatccaaatctaagactaatttggtaagttaatcaatcaatcaatcaaattatatataaacacaatcgttaccacagagaaaactcaacgatgaatcaatcgttaacacagagaaactccttgcgatttgattaatttttagtaaattagagaattgaaactcacacgaagaagaagaagttgagaaatcttggggaagcaagcacaacgtaaacggctcttcctctgccgtttttattttctctctttgttcaaaaatcaaaacttcttttttagttttcaaaacttcagttgcaaatcaccgtacgagtgagcagatacgccgtcattttatcgccgaccccatcactctcttcctcttgagatttttttttttttctttgacattttattttacacacgtaatcaaatttgtgcatttacgcaaatgtgtgccaactaatttgtagacaagatccaatctatagcatggagataagttatgagtatttaatgagtattttttatgttatacaattacataaattctatatttaggtttgtccaaaaaagaaaaaagaaggcaagcttagaaaaagttgaagcaaatacacaaactaaaagagaggctacagattcaacaaatatatacatagacgctaagacaagtttgatgacagagtttagagttaaatacaacatagcaaaattaaataagctaaaatctggtctcgctctctctctctctcttgctaacttcatccaatgctactactaggcataacccatccagcatcatgaccaacaaccacactatctccatttccaaacactcctcgttgtctcttcttcatcaacgcagctgataccggacttcctacagtgctggaagtcagagagctctctgctgaacagttgttcttgtgctctattgctactgcaagctcggataaggatggaatcatcattttggttgtgtcgaaggtgcttgttgttccttggcacccattggtgatggaggcctttatggctagctctgaaagctcttctctagctgcctctaacccagcaaatgcaacagcttgctcctctatagccttgcaagctttctctagaattgattgcaggtacttcccttgtgcctcgatccttaactggagtcgcctttgcacctgcgtatactaatggatcttattaaatgtggaaccagggctcaaacattagtatatgcggtttctatggttctaactttcatgaaaagatttcctaagtagtaacgttctgataagctttaaggaaattcaatggaggtttctatatagtctctcattaaccaaagtctctctggtatttggtgaattcgaagaagaaactaacctctagttgctcgtgtagtcttctttggacttccatctgggcacgcaaagcttcagtgacctggtaactcctggctcaagacaaaaacaatgagtgttatagacagtgaatataacacttggaataaagagaacacttgaaaccatactcgttctgttcttgagcagccaatcttaaggatgatgttgaagatgaaccagtgtcctgactctccgcaacacaagaaactacagagatataagttcacaaagatataaatgcacaactgaatccataaagatataaatggattcttagctaaagatataactgaataccatccttagagttgtcaattgattctttacaagattgcctccccaagcggaatttctaccgagcaaaaaaccagagaacaacacagtcaaaaagcaatgaactttgtttgttataagtagccaaagaagcataatttgatattgaaggtagtagcatcaaaacctgaagatgagatttgagatggtaaagagtgagacccttcactcccattgttctcattatagttttaggcgttgcttctgacatcaaaccaaacacacaaaaaaactaatcttgtaaacaaatctcaaggccaataaaaaaaacctaaagaatgccacagtaattcctaaattgttctaagtgacataaacccaagaaatccattctatttcaggatgattgacttccaaatctgaaagaaattagacctaactcgttgtcaaattcttcgtactaactgaagaacaacagattaaaaaaaaaaacacatttcattctaagatccataaatttctaagaagggacacttactgtcgggtccgccgagctgagtgacggcgtcaacgaatctttcatggagctcagaggtccaacgaaggcgaggcttggggtcagtggttaggaccagacaagcgtcgatgggaagattggttccgtcagagtagtctcccaagctgccatctagaggaagcgaagaccgaatcgccgagtacattcttctttgatccccacaaaggaacaaacttttcttcgtttcttttattttctcggctgttttcccgggaaagtgaaagaaagtgtgaagaaagatattgtggatttctaagacagcgaagaaacgagttgatagattggacaagacaacactcggatagtattttgtgtttatatttgtgcattattgaatttatttagatattttcaaaaaaaaaaaaagagagagcagaatttatgttttggttatttgtactctttgcattgaaattccaaataacatatatgttttgaaaaagtagtaagataaaatttcttttagttattattttcgtttttcaatagcagaataaaacttcaagttctctatcttaagatggtgctaactgctaaaataaaccaaatgaaaaaagaaaaaaatagggtcctcaatttttttttaaatatcaaatcctttaaacctactagacatttttccaattatttttcttttatataattcaagagaaaaaaagtattctttagctttagttttttaatttttatattactattgacaaaatttgtttatgtaatagcagtttccaaattcagccacataaaacattaagaaatcagaagcacatcaatcattcatatgcataaagagagactctgtttcttggcaacatagaatctttattttgagacactttctcttaatctacaattcatcaattttaaagccatagatgcacgtatatatgtaatatgtacacatatataagcccctaaaaaaggatggggtatgaaagatagtgatagttacttagcaatggtagtagaaacaaaggagtggttcgttttgttaagtcatcgatggtctcctttgctcatgatcaactcctgcatcaactccaacttttcctcaagaacagtcatgtgactattctttccttcaggataatactctttgctcaagtatatcgtctagtatcatatcattgctgagaattcagcttacccgtaaggtttggtccatgatctccttctttgagcgagaaccagagctcgaactttggaacacagacttaaccttcccaaaagaggcgagtgagctaccaggctttggctcttaccagtaatctttacaagagcaagcacctccttcaaaatgatgaaacctatatgcatccctcactatgatttctcgatttgataccttagatacaaactttatccaagcatggcaatcgttgcaaacacgtaggttcttcattacatttataggcactgttgcaggcaagctaaggagtccaaatgaaattgctaatttctcgctgtggatgaaaattattggatctttttgctcgtgctgcagttcattcaataggctgaaacagtcttgcacatacccgatttcagatgctcgtttggtaagatcttggaagtattcatgtatctcatctgctaacgggtgattctggtcaccaacatagaaagagtgaattgagtttttaacttcaatccaactttgtcccggttctttcttcacacccttttctttcatcttttgtcttgtaagatccctagcatcccatttcttggacaccgcatacagatttgacagaagaacatatgttgctgagtcttcaggttctaactctaggagatgatgcgctgcaaattctcctatttccatgttcttgtgcactacacaagcactcaaaagtgttctccagaccaaggcatctggcttaataggcatttcctgaatgaactctttcgcacggctcaaaagaccagctcgagttagcatatccactacacacacatagtgttccggtttaggagataatccatattctgaattcatggattcaaagtatgcaatccccttgtccactagtcctatgtggctacatgctgatagaactcccacaagcgtcacatgattaggccttacattagaatgtatcatctggtcaaaagaatctagtgcttcagaaccaaacccatgtttagaataagcattaattatcgcattccacgaaacttcatttttcgtggagacttcaaggaactgcttctctgcatcagaaatgctcccacacttggcatacatagagattaaagcattgcaaacttcggtttctgaatcgtatccggttttggtgatcacagcatgaacctgcttcccttgtttcatgttagctgtctcagaagcagctttcacagcagacccaaacgtgaaattattattgtcaattccttctctgttcattcgaacgaagacacgaagtgcttcttcattgtttccactctgctgaaatccggataccagagcattccatgctatattatctccagcttcagtttgttcaaacgctaaatacgattcctctatttttccgcatctagaataaagtgtaaccagtgcattttgaaatggcaggtcagatgagaaaccagatacacaagcttgagcatgaatttgctgtccttcctttaaggcttgaagaccagcacatgcactaactgcatttgtcaatccaacttcatcagaccgaatccctcgatccaacatctgcctgaaagttgttaaagctttgtcgtcgaaattgtattgcgtgtaacctgcaatcattgttgtccaagacacaacatcttttccagcaaaccttataagtatatcccaggcagtatccaactttcctaattttgcatacatatcgatgagcacactacaaacataggcattgagctgaaagttagtttttattatttgactatggatttgttctccaagctccagatccccaagtcgtatgcaagttttcaaaatactcgggtaggtatattgatttggaacaatttcctctatctgcatctgtctgaaaatcctaaaagaatttcttaaatcgtctaataacccataagctactagcatcacattccagagaactacattttcaacctcagtctcaagaaaataatcaagggcggtttcaatatcagcgcattttgcatacagattaaggagcgcaccttcaatcttgttgtttgaagcaaaaccaagtttagttgtgtatgcatgtagctgttgtcccctaaacagagttccatcagctgaacatgcaaccacaaggctcgcaagagtattactgtctggttcaagtccatcaaggtgcattcttttgaacaattccatagctttctcaccataaccacactgagaaagcccgttgataagagtgttataagtaactgcatctctctgtgacatgttactgaagatgtgttctgctgatatcaaatttcccaaatgaaagtacaaagacacaagtgcattgcaaacataagtgtcggaggaaaaccctaacttcaatacgagcccatgaagctgctcaccaatctcaagagattctatcttcttacacgcacttaaaacacttgaaaacgcataaggcgttggcatgatacctaaaacatacatatcgcagaacaatctaatggcttctgcttcacattcatttttcgaaagcccggatatcattgcaacccaagaactatgatccttcagacgtaacccatcaaaaacccttctagctaaatccacaaacccattcctagagtacaagtcaatcaaaggattacacacaaccgtactatccctcaagccctgatataaaatccttgcatgaatctgctcaactacatcaaaagcaacactaccaccacgacatgcttccaaaacaccactgaaagttccttcattcggagtaacattctcactaaccattctcacaaaaagaccaaacacttctccaatcaaattcctagaagctaactcctttatcatcttattccaagtaaaaatcgttctctcaggcatttcgtcaaacaccttgaaagcaccatataaatctcctttaaaaagataaaaatcaaaaagcttttcagagaggcaaccattgctatccaaacccaacttcaaaatctgggaatgtagctttcttccttcatctaaagacccatttgtcttcaaacatccttcaagaagccatttcaaagtttgatgattaggtcgaattccacgattctccacggaatcaattctcttttcttgaaatgattcatcctcagagatataaacagatatagcagcaaaactagctctcctggtcccacaaagagtctacaaaagaggagcatagttacaaaatcagaaccatgttaaagcaatggagtttcaatgggatgatttagagaacaagaacgcaagcattacaggaaagacagttctggtcttgagcttacgaggaacaccatgaatgaagataaatgaggacgacactgagcgaagaaacatgggttcctccttagaatgccaaagacgaaccaaccaaatatatttattcatgtggaaaatattatcttcgaaattttgttttggttttggtttttcaatttaaagtttactaattaggggaggaaaaattccataataaatattatgtttttttcataatcatacataaaaaatttacatattgaaaagtacaccgaactattgtttactcaatttacaacctatatatatatatatatatatatatgatgatgttaagtgagagcgtttaatagcatgtgtaaagttttgggtttagtatctatgatgatgttaagtatgaaagatagctaatctcgtaagagtttagaagagtggagtcaggaaatgtgaatcagtgaatggagtatgaagtagggtttgtgctggtaatattacaataaaactcgtataaataaatgagatggtggtttgtgtttctctttgttcagcccatattcactgtatttcgtgtaacaatttatttgtgactatagtttggtacattatatggttcgttccatctagatattctagaacaaaacgaaatttttaggaataattaaaaattgttgaggggattcggtaatatgtaaagtgtatagaaaaagatctaaaactatagtgaagtagtttgaaaaggggacataagatacaactttcggctgtatatttaataaacagaatggatttagtattaaggagtttataaaatatatattcgaccgttcagaaggatatatagccaatgaaagcccaaaagcttgtgattggtgaaaatttgttacaattttttggtgaagttaagcttagacaaaagtaaccaaaagtctaaaaggtttattgtgcaaaaagaagagaaaagaaaacgaagagatggagttctaatacatattatatatctgatgaagacggcgaaataaaaagaagaggcaaaagtatttaggagaaaaatgtaaatgaagacttttatatttcgagttaattttcaatgtacatactgttcagatccaatctaacaactcttttacctctagttaaaccacttaacacagctacctcatggaccatggtgagtcaaaattggtgatataaaggtgtgtttacttttggtgatttgtttttagctattaaaataaatatacgattttttattttttatttttttgacggcaaatatacgattttgttttgattgattattttttataaatcaaaatattattacagaaaaaaaattataagacaaactaaagggtcaattgcaaaactagccatatttgataatttaattaagaatatagcatcatatacatataaattaaaaaaatagcatataagggttgggaaaagacaattttgatgtgcaatagttgatgagagatgatttactaacacttcatttagttttcatctatttgtatgtttttgttatatatcttttccaaaaaattgattctaattatgaaatttataagataaaaatttctgcttttttctacatacaacatagtttaaatttttaaaatcggatttgtatttataaaatagtaaaaaatgtttgtaagtaaatttatattgtactatttatgatgtatagaaatagaatgttgtactatactattttcataaatcattcgtaatttagttttaattttagtataaaacaaaatattttaaattaaataaagtaatagtggtggtagtggtggtgagatagtagtttatgttgcaatattacctacgataatcgtaaaagataaaacatagacgatttaaattaccgagttaaagcgatatgatccccattaaaaaactataccctaagagatacaatattgggaacccaagcaagcaaattaactgttgtagtgacggtaatacgattgtagtgacgacaatacggttatagcagtgagccactgataaggataatggtgacttggtagtagaggtaatgatgtaataatataggtgataattgtattatgaattttattatgtgtaatatttttttttgttataatagaatagaaagtacatatagaaaatagaagtaaaagacattaagagagagattaagagatagagaaagggagagagagaaagagagagagggagagagaaagagagaaagagagaaagagagaaagagagaaagagagaaagagagaaagagagaggaagggagggagagagagaaagagagagaggaaaagagagagagggaaagagaaagaaagaggaagggggcaaaattgtgattaatacacaaaatataaagaatatcatctagtttttgttttgatggtactttcttaattataaatttttttttgttagatttataaattaaatttccccaaactaaaaggttagaccaaatataatttcttgcagattttttctttgttttgagcattaatgtattatttttagtgtatcaaggcaattagatggtgatataagtctaagaatttgaagtaaggtaaatggttaaacgtccaactacgaaattcgtgtaattaattataatataccttaactgcctaccaaatactaaattatagtgcaactttactaaagtttacataggttcgagaagtcattagcatttgacatattaggatttcattttacacaagctttcgagaagataaacatgtttgacttgtatacggctgttcaacgactcttgacgaaaactcaatttttggtatttcaaattgcttgaaaatctgatgtaaaagggcaacaactacacgatatgattcaaactactatcaattttctttataaaaaaaaaaaaaaaaaaaaaaaaaaaaaactagactaatttttatttgtgtactgtatacattattttctaaaacaaatgtctagacattatagtattttataaacacttacacaacaccaaatgtttgtcttaaccccgactaaaaaggacatatgtgttgttaatgctggatcaccggtggttttgttagtgtctacccttatttgtatggaaaaacactgccatagcccataaggtaacttataaggacatcaaagcttttggtgtttgactgcttaaatgttcagtctccagattccagcacatgcatttctcgaatacttgactaatggtgaagctagcattttttaataactttgccttaccaatcatggtggttggcggaattaatcatggtggtaagcgagagactttattttatccaaaaaaaaaatgagagacgtaaaattagaactatttttagttataatagttatattttattattttgtctcaattattctccccgcccctctatgtagacgtgtgaatattagagagattgataacgaactcctcacaacatcatatctcaagttcaccacccaaaagaaaaaacacacacacatcttagagagatgaaagagactaattttggcgagaaaacgcgcgttctggtagttggtgggacgggatcattggggaggaggattgtaagtgcgtgtttggctgagggacacgagacttatgttctccagcggccggagattggagtggacatcgagaaggtgcagctacttctttctttcaaaagactcggcgcacatcttgtggaaggctcattctccgatcaccaaagccttgtctctgccgtaaagcaagtcgacgtggttgtctccgccatgtccggtgtccacttccgcacccacaacatccccgttcagctcaagctcgtcgcagccatcaaagaggccggtaacgtcaaggtaaaaggactcatacatcactaaacacttttctttctagtgtagttgttacctttttcatcagagtttaaagcaatttaaaataccgattatcgtagctggtattccaaaaaagttgctttggcatatatacaacataaattaatagtatatgtgttaaaaaaatatgaaggtacaatgtatctgtctgcatcaatgacatatgcatcttttgaaaatagctgatatattacggctatattttgctaacaatcgcaaatgaattgaatttaactctatagacatatactcatttttaaaaatttaataattttcttggaaaagataaagatccgtttgtaagataattgtgtaacacaaaagtcacctttttggcttaccaataacaaagttttaataagcttgcatgcattattgttcaaagactatctaaaggtttttgaaataataataaatcattttagaaaaaaaaacaaaattatacaaccaatcttgtcggatgtttttttaataatattgactgtcttagcttatgttcggtggtgcttacactaaaaaattaaaatatttcagtgaaactacttacaataagttaaaaaatatttcagcgtttcttaccatcagaatttggaatggatccgtcacgtatgggacatgccatgccaccaggaagtgaaacatttgatcaaaaaatggaaatacgaaatgcaattaaggccgccgggatctcccacacatacctcgtcggtgcttgttttgccgcatacttcggcggaaatttatctcaaatgggaactttgttccctccgaaaaacaaagttgatatttatggggacggaaatgttaaaggttagaagaactcttatggaacgctctctcttcatatttttcttttttctatttgtgtcacttttataatcatgaaaattctaaaaaatctatttttgttcccattggttttattatagtggtgttcgtagatgaagatgacatggcaaaatatacagcgaagacgcttaatgatccccgaacgttgaataaaactgtgtatgttagacctaccgacaacattctcacacaaatggaactagttcagatatgggagaaactaaccgaaaaagagttggagaagacctatgtttcaggaaacgactttcttgctgacattgaaggtaaatctaatcatcatctagtaaccaaattaaacaaacctagcttttggattatagatttctatcacatctcttaaataaagcattggattaatgtaaggttggtttagtattaaaaccgaaatgtaaaagttggtcatgccaagtatttattttctatatatcacatctcataaattaaagtagacgtttttgtcttttagattctagtaaattatgagaaagagttgaatttagaccaagtatttattttctattaaatgtgaaaatgtttattatatacatgcagataaggagatatcacaccaagcgggactaggacacttttatcacatatactacgaaggttgtctcacagatcatgaagttggagacgacgaagaagctactaaactctatccggatgtgaagtacaaacgcatggatgaatatttgaaaattttcgtataatgttacatatatgtgaaacacatcgccatttccttatttttatgttttaccatggccttttgttttgtttgcttgaagatgttttccgaatttattttaaaatttaaatgtttcagttatggatatgtctggttatatatagatatacatataatctcaagggtccgaaaatttccaaaagtaaactcaagggtctgaaaagataatttggaaatttaagtccttttcctagaataccaccgataatataagggctttatacacaaatacacaagagatacttcgagaagagattaaaaaataaataacataaaaaaatggaaattatcttcccgccatgtgtatgtggtaactaacaaaagcttcgattactttatcctctcactctctaatggcttcttcttctctacctctttctcttccgtttccactccgatctcttactagtaccactcgatctctaccatttcaatgttctcctctctttttctctattccttcttcaatcgtttgcttctccactcaaaatcccgaccgcgaagaggtccggtggctccgggaagagcagagatggattcgcgaggagcaacgatggattcgtgaagaacagagatggatacgcgaacgtgaatcgcttctacaagagatttcggatctacagctcagaattcaatccctagagtcacgaaattcgcaattggggaattctattcccgatacgatttcgaatatcgctgctttgcttcaggttttgaaggagaagaatcggatttctgagagtggattgagcgcaacgccgatggtattggagagtacgagagaacaaattgttgaggaggtggaagaagaagagaagcgagtgattattgctgaagagaaagttagggtttcggagccggtgaagaagatcaagaggaggatattgaaagttggaagcgaaggcgacgatgttcaagctttgcaggtctgctctcagttttaaaccaaaggcgagtaatttgtcaatttagttctatcatcactgagaattagcttaaaattgagagattaggatgatgatttgaagtagtttagccaatatgcataagtttgaggttgattttagttgaaagtgttgggagaatgtttatttttttgatggtttctgttgtggatttggtttcctctatgtgataggaagctctgttgaaattaggattctattcgggcgaagaggatatggagttctcgagcttttcaagtgggactgcaagtgctgttaagacttggcaagtatgtttttatgcatttagctcgcagtgattttctcatgtgctcatgtagttttgattttgacacggttcatgtttatggtttaaaaggcatcgcttggggtccgtgaggatggggtaatgacagcagagcttcttcagaggttgttcatggatgaagacgtagagacagataaggatgaagcaagtacaatgaagaaagaggtaaaaactgaaaccactaactacagctcagagaacttgttctatagcatggctcgtttctaaccgacttatataatatgatagattttagctgtgtagtaagcctttggagtagttatgaagtctctctttactttggtatgcagtcttcttacgacagaatatggactcccattgtatgcttttggcaagcttgttagctaagatgatgtttctgttgctagtgagctttgttcggaatctgaagtgtctaatatgagtctgaaatacaattggtaaatgggataaatactacattgtcttgtttgaggttttagggaacatgaatattctgaaatttctcttaatttgcttaatacacctgttaagactggttctttatactggatctttcttttaattccattgattaaggaagctggtaatggggcggtatttacttcagtgacacaagtccctgagaagaagcaatcaatcgtgaaagatcaaagtgacagagaagttgacgttactcaaaatcgggtttttcttcttggagaaaacagatgggaagatccctccaggctcattggcaggaacaaaccggtagacagaagtgaatcaacaaacaccaaaacgaggtgcatcacttgtcgaggggagggtcgattgatgtgcctaggtaaatcccttctccctggttaagtgaaaatcatccgttctttgaaagttaagaatgatttttcttagcaaattgagactgctaatagacaccaaccttagtaacacttcaagcactgagttgtagcacattatttgatgattataaaatgaaaacttgatgtagagtgcgatggaaccggtgagccaaacattgagccgcaggtgagtaaaatcaaaataaccccgctccgattatgtgtatgtatgtattatcaagtagcctaaagcagagaagctcttgtccaatgttgtagttcatggagtgggttggtgaagatacgaagtgtccgtactgtgaaggtcttggctatacagtttgcgatgtctgcgacggcaaaaaaaacttataataatgattcatatttaatttaatgaaaaaacaaattagtttgttttccaaatcgcataatatggttgtttaagagagatatatatataaatttagtgaacaagtacgtagttagtttgtttttcaaatcacacgaatggaaatcgtctttttaggataatttcgcataggtgctatcaaattttaaattcaattaatttaaattaatgtcaaaccggaaataacattttattttatattttcatttcatttaaatgttttttatatatatttaaacatgaagtccaatatcttatattttaattatcaaataatattcactttgtaaaattaacaataataactattaattttaggcatattattttcgtaagaagaaaaatattaatatcaatttcctaataataataatatttaaacacatcattcaatttagaaaaaaaaacaaacaatattattcagttgaatattaaacatttatacaatatattttatttatacggaaaacttcttataaagtattttataaaagatttgtagattgtacgaatattttctacttttaaaattattatttaaaatcttttagttgtgaaattttgtatggatagtggagaattaattgtgaggattgtttggatactttgatggtagagataaaatatattttcttcttggagaaaacagatgggaagatccctccaggctcattggcaggtaaaatcattggttatttgaaagttaagaagaaaagctagtattcgttcttagcaaactgagactgctaatagaaaccaaccttatagcaaaaggttggatcttttaatccaacatgttcatcgtcccaacataatcgatgtttaaaaggtttaaaagaaaagacaagactctaagactcttaactcaattcccatttgagatggaatagtgattgactctaacaatcccacttttgtttagccagcttgaaatatctgtcttcgttgacatcaacgattttgacgaagttaggtcgacccaggctgagagaggagctcgaagggaaacagaaagcttcagaatttgtgagaaaaatgctttgatctccgatgtcttgagtgtaaacagcgtttccttcttcgtctagcctgaacaccattattgcttctgttttctttctcggaatacctttgtcgatctctgccgtcttcatgtacaacttaacaatgaaagtttcactggtggttattgactccaccaagtgttcacttgtgtagcacgactccagaagttctcgttttgtctcggacagcttgggaaggttttgaaaccgcaagatctgcaacttggggttgttgctatggttttggagatcccatgatccgatgagttggcctccagagccagctatgcgcaacatctcatttttcttggacaacatgacaggggaggagaagaagcaggggtctgtcattctgatgttgatccactcggaattgctttgagcgggtctgcaaaagctgagttgaggtcccaggaacttgacagccacaacacagtcctcttcttcaggggaagacgtagacatggccacgttggtgacatattgtgtttggcaatgaggcagagtcacaagaggaggcagcgaaatgcgtttccgatccgtttcatggtttagattcacttctcggagacgcaacacgccgtccttcaaagtaggtagccatccaccgcatgatcctatcgctcccatttccttgagcagctctgcacaaatcttatcttcgttctcactcatctcttcccacccttcgaaagaaagggttcgaagaaaacgactagacctcatagtcatggctattccccgattacctccacatggatcagcgcagagcaagacacgagtctgagaatcagtttgcaacgacaaagatgagaggccattagaaagatgaggagaggatctcaccagcacaggtttccgaaagcagagcttcgagtgctgattgagaagcaaagacatgaataatgttcttaacggaaagcaagatagaagagaaaaaaaaaaaaacctaattgaagaattggtgatcttctccacctagaagtaagaccatcaataacttgctcaccaagtttctcatctccaaaattaattacggtcttcataaatggtttcagtttttgtaaattatattgctcctttgttattgattttgtgtatatttttttttttggtaaggattgattttgtgtatattgacttcgtcttaaggaaatgaaatcttcattctgtttttctcactcgattttcttggattttgtgtgatagcgaatccctcaggtctattggttcacgcttctcaatttctcttatttcaattctggttaagttaaaagacgtcttgtattattaccttaaaatctcgtttaggttagccaaaaatcataagatgttcaatatgttacgtgtaagtagtgaagggctctttttgtagcctgttttttcatcgtatgtaaagtacaaggaatgattcaaggtgctaactggatatagattaaacataattattcgggagactgatgagagatgatagcaagatttcttcaagacttgaattgtacaagagaaaagacagactcaaagtcaattacaaactccaaattcgtgggcatccaaagatttggactcttagaacaacaataatccacataatatttaactatactcctactaaaattgagcatctaattatataatgcctcctcacttgaaatgtgtaaacgcgctggtctctgttaccttaaaggctacttacaccatttgaaaatattttcccaggcttaaaaccgtagtaaaggaccaaatgtgagagataattgatcgaccgggtttgttacctgttagtgccaatcaactatatctccgaatgttgtcgagccaactccttcccacacttctctatgtcccacttcttccgagtcaacaccttccatatcacagtcccaccatcctgaaccatttgcatctgttggcaagtgcataagtatcgattacataagagtatctgtttcaagtaaataaaaaaagtgattgaaacttgttgttacttacaatggttgtatatgggtctctgcttcttactattgttgttgcttcttctttctctttccctttgcattggctttgatacctttgaattgtctccaaagaccataacggactttcccgttctactcatgctctccatacctagtgatcaatgtatactcttatcaactactgagatctcaaaggtcattaaacattagtatttaccatgaagactcagatcttaagtctaagccaacaagaagtagaaaatgcatgtgatctgaggaacagtgacatcaagtaaagttctcaattcacaccattctttcaaaacctaatctagaaaatcgaaaaggaatttgcttgagccaatccctgcaagaattatttctttgctttgtgcttccaaagcaattgttgaactgatttggtgctacataataattcttttcacaactttgccacagtcaattgggtcaacaaaacccttatgattaactgcgaaaacaagtaatgatactaaagtgacataccttcaaaaggatcttttcttttctttgatgttttatcgtccctcacaatgatatcttcattgatttctgtggagtacggagccatgtgatccgtttcttcagcagctgtttgatccacgggctcaagattcacatcacctgttacatctctactcacttcttcactaatctgaatctctcttggcttgaactgctgaagcatcatcttttctagaccaccatctccgtttttcttttcttccctcgcttttctctctatgagagatatgagtcgatctttagagctaaccaaagaagtaaatggtcttagccgctcctgttcaaaaaccaaagaccaaatcttatagattatgtccacaatctaaatctgtgacaaaatttgcaattgcatcacatactacgcatattatgaaacttttcaacttcagaagtcacaaatttgacccctcctgttcaagaaccaatgaccaaatcgtaaccatctgagacaatttgcaattgcatccccaaataactaaactataacaacaacataatccatggaaacttaatctgtacatacatttcacaagcaaagaaacaaaaacattccacaatctctaagcattagcaatttaaaggtttcaaataagaaaaatgaaaaccattttccaccaatttcaagcaatggaccttaatgtcacagttcctttagcttcacttgtcaccattccaaagaaaatcgttacctcaaagttgtttggcttaaacagcactgatttgttcagcttgctgcgattctccactttctccggcggattttccgaagtattatcgacactataaaacaatcgcacacgaattcagttactcaaaatctaaaaccttattggcgaattagggagaaattaagagagataatagattgaatgcttacggaatcgagctgagattcaggaaggaagaagcaatcgatcgctgaccaaaaaccctaattttaggaattggtttcttcatcttcttctcccacttgcctctctctcaatgaagagacgtttttacactttttttttagtttctcaatatcgataaattggtttcttaattttcccgccaactacaaaacttttattgaaaaggaaaataaaataaaatttaatagtgtctttctaaaaatcttttaagttgagggaaaaaaaaagccttttgagattttcttttatgcaaaaaaacaatcttaacctgaaattcgatctgatggtcaagattcagagaggaagatgatgagttaatttttgtgtgtttctgtaaaaatatagacataatattaggcaaatgatataattttacttaagttaagtcatggggttcatgggctgttaatgtaaagtttgactttaattttgaaggggaatctaatttgcaagtattttcggcttcactttttgttccatgtacctgaacatctaatttgcaagtaatttgtagtttcattttatattgggtcaaaagtattttacattgttttccacttgaaagttgtaaagctttccaaatatttttctcataaacttaacatttaaaagataacaatcattcactcccactaagaaacatttttatttcttttttctcatgtaattcatcttcaaatatgaatattttatacagcttttttcaaaagaaataatctctgataaatttaattgacagcggtaaacaattaatataaaacccctatattaagaaaaatatcttaatgtatttatgatatagtggggcttattaggaaaagttttcaatataattacacatataagaaaagaaaaacaattacctccactaattatagaaaatgttatttctatttatttattcgtttttcatgtgattcttcttcaaatatggatatcttctacaactttttctttatgaaaatattttaaaacaatttacttgactgtcaaaaactaatataataaacctatattaagaacaaatgtatttatgatatagtgaggcatattgagaaagtattttcaatataagtacacatttaagaagaagaaacaaacgtttactcctagtaattataaacaaatttatttctatttgtttttcgtctttcgtgtgattcatcttcacaatggatatttcctactgtttttcttttaaaaaaaataaataaatatatattaatgattttttttacttgaaaaagtaaaaaaattatgttattgaattttaatttttgagaggtccctaattgtaaaattattaactattggtcctcttgaaatcatgaattagcacacaatatgcgaaatactttaaataaccgttatttattattacagttaacaacgcaatagttataagataaagataactggcgcgagacattttaaaaatccgttatctattgatatttgtttgttatttaagatcaacaactaatcaacctcatatgtataaaattttcacattatttagctagtgtatgtaactatgttcttttaactaaacaaaggtcttttttgtcaaagatatacttaactaataaaaccttgtctatataagtgtgagttccattgtggagttttacagtaaaaaataaaacctttatttttccatgtcaacctttatttcaataaaaaaataatgatgaagtcatttttccaatcaaaatgaggtagtctgaaaaggtattaattagaaagattcaaagaattgaaaaaaaaaagatcgtaggaagagtgacacttcccagggtcatcagcaaagtccacatcaactttctcaatgtttccaccatctcctattgttatgtaaactggtccacatgggtctagtgtgtagttgtatatgcggttcattctctcgtatgcatgtaccttcggtaacaataaacaccacttttagtcaatacattgcataaaagaaaacaaggaaaaaaaagatcaaagagtatcaaaactctttttcaccaagataatttgagaacttacatgtcctgcaaaaactatgtcaacacggtattggtaaagaagctcttccatttcctgcctcatgcattcaaactcctggtaatgcgaggagtagctgttgtaccaaggtggatgcatagttgcaaccagccatggtgtcacagcgcgatcaactttagacaagtcttcctttagccatgcatattgcagccctaaaacaaagacataatcatcatagaaatgagatatattgtagtaggagcacaagagacttcaagtgtatccatggatttaccagtgttattgtaatcaacatatgcacccaacataacaaaatgcactcctccggcatcaaaagaatagtacaagttgctgttggagccactctcacttgcaggaacagcaaacctttcagaatatgacttaaaggtgatccctgaagcttgaggctcaatctcatggttgccttcaatgaccatcgttgggaccttggaagtcaatggctccatgaacctgcacacaaataaaaaattaattactccaaagctgatctcgaccaacacagagttcttcaactcctaacttgttaacccacatagtaagttttaccttccccaagcatcccagcgaggttgataagtctcccttataggtgcatcaggaaacgaacatgagaagcatggaactcctttaccaccaatagtacgatactggtttgcataagttaagtccccaacaattataaccaatgagggatcgttttccatcaaatggtcaatggtggttgtagtattactagtaagacccaaatccccaacaaaggcaattctatgaggatatgcatctttacttggcaatggcaaagtctcaaaagaaatctcctcactcattgcaggaacagagctatcaccacacctataataatacctagtttctggttccagacctacaagtaatgtgaactctttagaagttaaaaagcaatcaaaacaaaatgaagtcgcaacggttcgttattaccgtcaatgaggacatgatgtatgatgcctgatgtgtaattgagaagaccatcagagggatataactgactgtaaactgttgcgtttcctttcttctttagcatatagtttcctttctccttcccataccaaacctcactagcaatagaactaggatcaagcggtttcacatctttgccaactatagcatcacctgaaaatgaaacatataaacaaaactctcaaaaccctagttttaaaataggactcaagagacaaaattgaattaaaagacaaaactttgaaaacagaatttaccagtgacccaagaaacccacatggaggttggtgtagagagagctaaagcaatctgttctggaaaatcggagctaacgtttctctttctcagccttggatgatccataggtaagtcgtcactgcctcgtcgtagagacggctcgaaccggcgggttaatggcttgaacgggccgtctaaagttgtcgggattgtttcggcggcggcaagtaacaatgatattgaggttagggtaatcattattagtaaagtcatggtttcagtttcgcatatgtgttgttgagttttgatggttttgatcgtagacgtctaccatgccgaaattttgattattatgtacggagaatatgccattgatgctctttgggttattcacgttggacgtgtcaccatttatttggagctctactacttactatagagtttttttgttcaagaaaaatttaatatcacaaatttaatgtaaaattttctaaccaaaatttaatttatgtttactcggaagaaccaaagttctttgaaataattttttttttataaataaaataaatttttaccaaaataataattgaaattattcatcatctataaattgatgaagattaagttggaaaaaaaaagagtgtagagaaataagatagaaataaaacattggtggagttgagtgagtttaatgatataatattagagactagctatttttatttataatggggccgtgatcaacacaagaccattaagtcagacatgatcttagtaatgtatagattttgctaagaaaattgaaaaagctcagattaactaagatggttcattgactctccaaacacatgaaatgttctcttgtgcaagattgaaatttttcttctaagacactactatatgggtatatttgagttttgagaaaccttagacttgaaccaccagatagaccgtgaacaagtctaataccatcttaacacatagtggccatatggaatgttgggacttatttgattttttagtcaagatcgatttttatggattttagcttgaggggttccgtatgtatagtaggtcacaaacttatggtcaaatatgaaatcaagtgtctaattaagtcattatcgaaaggttttattatttgagaagttttaaacaccatgattttcatagaaattcctaactgaaagaaacaaataaagaaaacggttatacacaaatttgtacataatttcgttaaacttcctccaaattcgatggaaagaaagagtcatgcaccggatgacaaacccatacatgcgtgtacagttcgatagaattcgagaatgggaaattccattgtcggcatttgttattttgtttacttgcacaaaataaacctttactaagctatttcatttcgatctcattttgtatatttctatctagcttaataagctcacttgtgcatgaatcctattaactttggattctcctacaccatcctcagaaaaatgagttccacattcttttcttttatactcttttagttcccctcttgttttcattaaccaacaagagaacataactaatttcttacagcaaaaatcttctttctatacatgatttgtatacacaattagtttcataaatacgaacgaaaatagtttcggagttacgaatattgcaaacaaagagaaatgataaaagaagtagagatctaagaaaatgacgggtaaaggagcgtgaggagagtcgatgattggctccggtggggttggagaaaggatgcacaagagacataaaagtgtctccctaataggttaactaaagaattgttgcatacgttttcactttcccccacatcttttctaatcgaaatttgttgattttgacatataatgtttataaggttaagaagattaattttaagtatattttgtatcaccatccgtataatgtgagtataaatcatctttccttcaagatcattctgaactttaagctagctctcaatcaggtgagctttttaatttcttcttataatcatatttctaaaccaataattaacaaaaggccaaaacttattaacagtttcctccaggaattacgaaagaagaaaaatcagaaagagtgatttgcatatacagatcaatcacttgtctcatccttaatattcactcaacgaaaaagtttgtattgattgagttgagtattgtataatgtctaataatgatatttacaaaatgtatatttatatatggttgaaatcatgagtacgacatgattgctattatgagatccacaactatatatacaactaattcataaatattttacctgtttcaaaataataaacaaatagaaaatgttatagcatgaattagagttatggaaaaaaaattatgaatgaaatttatggataaatgaacaaaacaaacattaaaacaaaccccccccccccccccccccaaaaaaaagatacatttaaatccaccattatttatgtaacttatgttttttagattgatgcatggactgaaataataatccaacaacgccgtacgtaatttaacatttggcgaccatgcatgatgatgtggctggtcaactagtcaccgtaattggtgcttcagaacaaaccaaaaataatcggaaattgagaaaatactattccaataaatccggcataaaaccagtagtgacccatttagtttccgtacggaacacactgccttttgatgacttggcattttcaagctctctaattcgttaattgcttagttaattttcgttaaccccactaaccaatcacacttctgcgtttcctttctcggtaaacacatctgcttctcctactttaggatagtaataatatattttgtgacaatattatattgtcccatatttgatttaacttttgcttagtgtagaccaaacttgaagtggtgaaaaaataattacccagaaaaaggctgattgtagtatagaaaatataaattttgctaggttgatttggtttaattagccgtttaaaattacaaaatcttcaacgttttattttttcaaacatttgtgtccaacagtttttgcaaggtatttgtttggtttggggtggagatttgtctacattgaaaagaagcaactatcactggaaaaaaatacgtaaacctaaaaatagtaggagtaaatttatttttactataaatgttgagtgacaaagatattgaaaagctttcaactttaattttggtagctaggcgccaattgcaggttctccaatttaaaattttctcttttctctttattttttttacgtctaagacatttttaattttctcctttatcaaaatactgtatataacttatttattttagaaaatgttctcttttttatttatttacagtatcttgaatggatcaagataataatcattcgattaggaaacctaagcaaagttagtgagagtaagtactaagtaacatttgattatacagaaatgtaaaaaatcgatggtttaattcttctacggaacgaattttaataataaggattaataaagaggattagtactttatacacatgagacaagaggcggttacggcagttatgaggatttggttaataattacggcgttagaattaggggaacggaagggatccgaggatctcaacatatcaacggctaagattgtaagatcaaaaagtagcaacaaacatattccgttaagtagcggcgtgtgttaacgttaacgttactttattgcgtatatataaacggagacggtttccttggagcttgtgcacactaaatctgtcactcttcttcttcttcttctacttttctctctcccggttattttcccagaaaaagtgcgagaaaattccgttgagctttagagaagaagaagaagaaagcttcaatggcgtcgtcttctcagaaactgatcagtgtttgtgtcgctgtgctcgtcgtcttagctctcacggcgatgattttccggaacagtgaaatctctctctctaggtctttttctcttctcgaatcttccttttttctctttcgatgtttatttatcttctgtttcgttgtttttaagtctcctttttaagctgcattgttaatttctgtgaatgattttgagaattttccatctctgtttgttgaatctcgcttcacgattcatctttgtttttttcttcttagatttgctttctgtttatggatcttgaaattttaggactgttattgtgaaagatttcaattttaagctccagatttagaaataatactctgttttttcggtatttgatttttccaggaagctgaaaacagaggtgattcagagctcaaatagctcaacaatggcggcgataaggtaaaagggaacaaaacataacacgcgctttcaaccgctaggtttatcatttttaataaaaataaaagtggaaattgactaacgatcttagccgttgatctttactactgttcttttgtgagtgtactgaaatcacttgtccagatttcgtaataatactctgttttttcgttttttgattttactaggaagctgaaaacagaggagtttcagagcttaaacagctcaacaatggcggcgacaaggtaaaaaaagagaacaaaacttgattttcattttttttgccgccgctcacaatacatgaaacgcgcctttaactgctagggtttaatgtttatcctttttattttatagtattaaagataaaagtagaaaatgaactaacgatcctagccgttggattaagatcgtcggatccattttccgttaaaccaaacctttttgctcttttgattcctcgaatgtagcgttagaggtttgcattcatcgccgctcagtcacacatgctctgtctcttcactctttagaatattttttaattctaatattccacgtcaatagagttaatttgtacccgaggttaaattagtcaattcactctcttgcgtgtacagttatcgaaggttacttgcgttgtgatgtgaccacgtgtcataaagtttggttggttaattacgagtttatggttggtcgcgtcatttgtggtttttttgggtttcaggcttgatggtgaaccacaacaacaacaacacgccgttgctgatgatccagatatggttgctgatgaagtcgctaagcttgttcaaatgtgcgtttctctctctttttctctataattatgtgaatgcattaataagcgtttttgatttctgcgattgcattttagacgcgactaagtcccactcacgtgaaccgtaaaataaaattaattagagaacacataaacaagtactatgagagaaagaacaaaaacctttacttttttgaattattttttattaatgggtaagagaaaaacttttgcttttaatttcatcgtgaaacgacaaaactgacacaaaacccttctctctcgcataaaactgacacattgtcgtttcttcaccatgctctcgcgattgtcagagtcgtttgcttgcttgcacggacattgttttgtttgttttatggttttaagtttaaacggcgttttcttcctttactacattaattgtatttcacttttttgttctctctgtgactgaatttggggtttacacgaagaggttggtttagtaactgcttctgtcgtctttttgttgcattcaagtttcgaagtctctttcatttggatatattatggtctggtctattttaggtttttcactagccgaacattaatggaactttttctcggatttattcgacaaccactttgttgacctcataaatcaacaaaaattggaaccgttagttattacgttaggtgagaacaaacagaattggcggctgagatatttaatcagcctgtagatttgggtgaaataaaagaaaaagtcatttctttgattttttattttctcagatttgtctctgtttgtgattgattataatctatcaagcatgagatgtaactaacttcagggttatgaaattttcaggagtgaacagaacaggacagcaagaaggaagctaggattcttctcatgtggaactggtaatccaattgatgactgttggcgttgtgaccgtaactggcacaagaaccgtaaacgccttgcggattgtggcattggttttggaagaaacgcaattggtggtcgtgatggacgcttctacattgttactgacccgactgatgaagacgttgttaatcccaaacctggtactctacgccatgctgtcatccaggaggagcctctgtggattgtgttcaaaagggatatggtgatagagctgaaacaggagctgatcatgaatagtttcaagaccattgatgcccgtggctccaacgtccatatagccaatggtgcttgcatcaccatccagtttatcaccaatgtcatcattcatggtcttcacattcatgattgcaagcctactggaaatgcaatggttagaagctcgccatctcactttggttggaggacaatggctgatggtgatgctgtctctatttttggatcatctcatatctggattgatcataactctctctctcactgtgctgatggccttgtcgatgctgtcatgggttctactgctattaccgtttccaataaccactttacccaccacaatgaggtctcatttgttctctgccctcctccaaaccactaacctatttgctgattctgttttcataacactgtatgttcgtatgtttgcaggtgatgttgcttgggcatagtgactcgtacacaaaggacaagctgatgcaagtaaccattgcttacaaccattttggagaaggactggttcagagaatgccaaggttactacttgttctcaactagttagactaaattggttgccatttgttctgacagtagaaaattcgttttgtaattgtaatgcaggtgcagacatgggtacttccatgtggttaacaacgactacacacattgggagatgtacgccattggtgggagtgcagagccaaccatcaacagtcaaggaaacagatatgctgctcccatggaccgcttcgccaaagaggttcaacttcttaaacctttgtgtttgcttaaacagagtaataagatgttgttatatgtataagaaagattaaattatggatccacaggtgacaaaaagagtagagacagatgcaagcgagtggaagaagtggaattggagatcggaaggagaccttctactgaatggagcattcttcaggccatcaggagcaggagcatctgctagctatggacgagcctcaagcttagcagctaaaccatcatctatggtcgacactattacctctactgcaggagcactaggttgccgtaagggaagaccttgctagtcgtctctctctataccactaccatagtagctaaccctaaacccctttcacatatctttggaaagcgcatatatagtagtattactattcttcggcttttaggacggtcatgtcccgttttcttccaggtggtaggaattggtcaacctcggcttgcttcttctccgtcttcttaaaaaaaggtgggaatatagagaggagcaagcacagaagcgttgttcaaaaagttttcttatagtttacaaatctcttaaggttttagtttttgctgttctttttagggattgttaaggtcctttggttttaatggatcctcccttacttctagagtctgtctgtttgggtgtttgtttttgttaattccctttcaagttagtgatagtagttgcaaaaaattgttacaaacgattgaaaagcttttggtttgaatgcaactttcgttggatcttatgttttgtttggttttgtcaattgtttcaatggatgaagaaactgtttaaatctttttatgtaacctaaagcaaaccacttgtgagatgagaggtgagtaaatcaaaaggagttacactaacatgtgatgtgatcccaaacccacaaataatttgatgcgatctttgtttcttcttttggggttgaggttttagtggttctgctccctgcgctgcacgttacgtgttgggatcttctttactctttctggatccgattcataagcttttttcatgtgaaaattctttttagatccgattgataagcttttttcatgtgaaaatatgataagagaaaatatgaggagctttacctactggttgttctctcataaatactttgtgtgatcacaaacggctattcatgtgaaacatgatatcatcccattcccctttagatttgccatccaacatttattttagctttctggtcggatgggcttatcagattcatataagtctcaccgcgagtatttaatgaacaacacgaacgatacaaatatattatttcttgcaatccatggtttctacttgtatttgaggaaaaaaaaagttacaatatcaatattcccaaaggagcttagaataggaacaagaatctggtgagtgattggtgctccattcttcaaacgcagaagacaatgatgaatgagttctggttctctttaaatggtaccatcatctgtctggaacacatagccagcctccttaaagtgagatttcaccaatgctaaagacttgtacctatgtgatatcttgttcttttcttcctttgccatctctgcatacctacaagcaaaatagagaatatcaccaagcactcttagttttctctttaaccaatatccgataaatcgaggtttaatacaatgctttctgggatataacagaaacgtacgtttggtcatatccatcaggttgaaacactggatcccatccgaaatcagttggtcctctggctggaactatcttaccctaccacatcaatcacaagggacaaaagaatcaaactttgacaataaacaaacagagaaagaacaaaactaataaaagagtggttacaatgttgaacataccggagttttccccaaaaatgtaagaggttcagcacctggaccacgcgagaaagagaatgcgcacaatgcataagctgatttatcttcataggccatcagtaagttgttcagacctgtacatgagtcagaccaaacattgggtgttaccagtgtaagagataaatgaaacaaatgctgtagtgagagaaacaagtgctattacaaaccttcgtgaccaagcttctctagaaaccactttctgcaaatatagaaagaagattaaaagtgctacaaagaagaactctagagataacaacatagctccaatacagttagtcctaggctaattagatctaatatcgaccagaagtagattccaaaaaaaatatagaggccacttctacaaatcagtccagtaataaattatgaatcagaacatacaataagatgactccatttggctactcactcacaccacttagcaaccgcctagaagaactaagaacaggtattgatccaacccaaccagacaattttccaacacattaccactcaagaaagaggtcaacacaacaaagtggaactggagaaactctatccttcaaatgaagtttgacaagcacagaatcaggagaagaatgaagaaacaaaacttacatgtatggccctgaaaaatccaacataaaacgaaatcaacaaaaacttaaacactgtgtaaccatttgctgtacatggagtaaatgaaaaaaactagaatctaaaagccaatcataccaggaagccctttcaaagcattgaaacagagacatgtatcttccacaagcactggtccatccaccttctcatttacaatcaaaacactctttatatcagtttctactatccttagtcactaacttactattactagtccgtccacattcaaaagaaggaaacaaaaatgcaacagtacataagaagcaagcttacacataaacacaaatatgatgacttttgtaatcaattcaagtaatatatctgcagattagaaaaagctaaaagcttgtgaacctgaagagcagccaaacgagccttctctttggaaatatcctcaggctcaccttggagctcaggcactgcaaggaaatacacaatgagcctagtgaaaatgagaaacaaagtaatgtcaagagagataaatcgaaaagggtacgccgtacgcacaatcgagtttgagagacttgaaaggaatggaatttccgatgatagctttgacttcttcgagcttcttagcatttccagtcacaaacgtcaccggccgtggcaaaaccaccgctgctttcgccgccgccgccgccattgtctgtgtctcagtctcagatagcgaaagcaaagtcattttgttaatttttctttgcaaaaaatgggcttaagtccattttaatttaggcccattgaaacttatactcgttcgtccaaagtaaaattacgagtaaaccgatcattggtttaagtaaacccatttttcattcaattagggtccgcagcgattttgtataatcatgactgctaagcgttagccggacggtaaaagagggtctagcgcctagtaaaaaaattataattatataaaaattaatcgaagactagttttatgattatttaatgttttgaaaatatatttatctattataactaagaaatttatataatacttttttaaaaaattgtaattaaatatataaaaataagattttaggttaaatttataattattatgcaaattacgaacataagttgaacattttagattttatatgcaggaaaatataggcatttttagataaatgtttatatacataaggggaaagaaagtacatgtagtaattaaaaagtacataattagtttgcttgtctcaacttttcacatatccttttctagtaatgagaaaatcacttataacaattttttttctttcacaaaatacataaaactaattagctaatttaatttgttttatattgtcttccatgtagcaaaatgacaatgtcagattgaactacacagtgtcgatgcaagaactctctaatggtgcatgatttaatgaggaaaacaatcagacagtagaacctgtacgacaaccagactctcgtacactaccgcttctggccctaggaccaaaaaatatgcaagattctagttcatgtgttacttttacttgtcctcaatatctacttgagctttcgttctaaactacactatgtttgattgttttctaaaaactatagttttcttaagttttctaaaaagaccattgaaaaataatttcacattagtccatagaaaaatgcgtccatggaatattaaactgctgaccttatacacacttaagagattctctaccgttaagctacgataataatttaataatattcgtaacaaagtatatttatatactaacaaatatcactatttaagtaattaaaaacttatgcaataaattaaaaataacgaaattaaatttaaaaagttggctatttttttttacattattccccttccattttacaacattttgattttgtattgttttttaatttttattttaatcatacaaatgaaaaacaacgccctgaccaaagaagacccagctgtaccgggacaagattgcacatttggttcaactttaacctctccgtctccgagtagagaaataaagaaagagagagagactcatcaaaaacatttccaaaatcaaaatccatggccaagaaaggtatcccagagtggctcaacagttctctctggtcctcctctcctcccatcgacgatcgccacctccgcaatcctgccgccacttccatcacccctccatctcctccgatcgtcgagcgtcctcctttttcttcctctccctccgcgatttccaccgcaccagctcctcctcttcctgttcgtcctccttccaaatctgagattaacgatttgcagaatgggagtggtaacgatggtgctggaattgaaactcccgcagtttcttctgttgaagatgtttctcgaaaagcgcaggtcgtggctgaggttagttgcttaaaatcaacctcatgctctatgcattttgattgatttctctttgtgatatacttacatcttgattttttcagttatcgaagaaggtgatagacttgaaggaattgaggaagatagcttcacaaggtctacctgatgatgctggaattcgatccattgtttggaaggtaacgccattcgcatagtttcagtctagcttatggatcattattgttactgtgcttttagtaatgcaaatctattttgagttgttgaattttctttgaacttgcttgtggttttcatgaaatccttaagagtgtatggaaatggtacaatttaagcaagatgaagaagatacagtttcttctccgattactaattggtgttcaaaaaaaaaaaaaaaaaaagaatgcaatttaagcaagatgaagaagatacagtttcttctccgattactaattctgtcagtttatgcttcatgctgttttcttgaatttgacagcttttgttggattatttgtcaccggatcgctctctgtggtcttctgagttagctaagaaaaggtctcagtacaagcaattcaaagaggagcttctgatgaaccctgtaagtccgttttggtgatttgatactccaacattgtattgattggtttgtgaagagagttacacaattggcttaatcggcagtctcttttgatcaccccttcgggatattccatcaaatttctgattagagtggatgccattcttgtaaagtaatagctagctagattgatcgattagacacagtcgcatttctgttaaccggagagaaatgagcaatgaagttaacatagtggcatactggcatgtctgttgccagtagctaagggtgttatgatgaaaacgcactgccaatagaaaatgatgactgtcattaggcgttctgctagcctagtagaattcggtgatggtgtcatgatggtgttatgatggtttttattttattttattattttgatccagaagcttgtacgtataacatcatgtcagctaaatggtgtcatgcatttgactaagaagactgatctagggccactggtcatgtgatacctcctaaaggtcatattaaaacatatagtagttaatgataaagaattcggtcattgtagaggtgcttatgtaatctggatgataattcttccttttttcatgttccgttattgttttctgtttaaaattaacctggtttctatatatttttgtggctagttagtcagaagtaacaaggaaaatggataaatcaaagggcggtgatagtaatgatccaaaaatcgaaagccctggtgccctttcaaggtcagagattactcatgaggatcatcccttaagtcttggaacaacaagcttatggaataattttttcaaggtattcagattttgcagtttgagatatctacaaatataatcatttttgtaagaaatgacaaggtttagtgttattaactccttattgaaatgtacacttttcctgaaagattagaaggtttatggattatgtagctgagttatatgattctcagatgttgggatgtcattgcttaagttataaatttgatctatacagctttactaactattcatgatttgcgacttctcacttagttcaacctatcacttagtgtctgataaacaactttcctgtgaatatttaccttcagttcctatgtgtttggatagttaaggtttgctacagttaaatatttgtatagggtgccttgtcaaaagtgtgcaaaaatgcttaggcagactgttatcacaatggtgtttatttcatatgcttagcatgactcattagtgacgcatacgaatatgatcactatgaaaagatccttttctcttcctgttttagtaaagtaattccgtttttgttgcatataaagctgcaaaatgaccttcctgatttcaacttgatactgttcaggacacagaagttttggaacaaatagaacgcgatgtgatgcgtactcatccagatatgcactttttctctggggattcagcagttgcaaaatctaatcaggttgggtgttggttttgctatagtttaaagcctttgggatgattaaaacatcagtatactgatagtttttcttgtctttttatacatgttttgcatgtctaggatgctttgaagaacattttgactattttcgcaaagttgaatcctggcatcagatatgtacaagggatgaatgagatattggcacctattttctacatcttcaaaaatgacccggataaaggaaatgcagtaagtacttgtccttgctaatgtaccatttttttcttattttatttgtacacatattgttctacctcttttagttctttttgggtaacacaccactagttctcctcgtttgcttaacactggcattttaagttatgcaggcatacgctgaatcagatgcatttttctgttttgttgaattgatgagtgggtttcgagataatttctgtcaacaactagataacagtgttgtgggtatacgttacactataacaagactgtcgttgctcttgaagcatcatgatgaagaactttggcgtcatttagaagtcacaaccaaagtaagatatttcacacaaccttggctgatgagacgtcttgctatattcattagttatgtctctgtagaatattttgccagtatgtattgctactggttcagagctatgtgttgcatgaatgttgtgctgaaaaattcttaatccaccttaactactagattgataacaaccaaaactgtaccatcgctttcaaaatgtttaagttttcaagtttctgtatttctgtttaaatgtttcagcattttgacatttgagacctgtgtcaattttcagataaacccgcaattctatgcattcagatggatcacactcctattgactcaagaattcaatttcgtggaaagccttcacatctgggacacactcttaagcgacccggaaggtcctcaggtagtattcagcttactactattcagcttctgtaagttgtgaacgagatcaatttcaaatgttgcatttttataagtcattaaacgttcaaatacctctgagcaggtgggttttaggacagtaaaacatatacacgtagagatttgtatatgttatagtcctagagattggttttggtttgcatcttactgtaaaaaatttaaattagcagaattgagttaacgggcgcttgttatcttgcgagatatgaaaaagcttacaagtgtaactgaattttattttgcaggaaacactactgcggatatgctgtgcaatgttaattctagttcgaaggcgtttgcttgctggagattttacgtcgaacctcaaacttcttcagaactatcctcctacaaacatcagtcacatgctctatgtggcagacaaattacgcactaaataaaaatcttcaggttaataatatttcactccctactcctttataaaactctgcaactttcgtctgtacattattgtgtaaggtaattttagctgcatgagaaaatctcagatcaaactttgcttcagtgttaaagactatgatgttttttgtgtgtaacagagttattaatagagagagggttttaggatcggtctttcttatatttttgctttgatctattcacgaaagtttcttggtttgatttggtaaattattgattaaaaataaccgtaaagcttaatcaacaagtagttgctgataaatatttgtacaaagtcaaaactgttttttcattttttctttccgtgaaggagaatttacttgcgaagaaacaaagaaatgagatgtggaacaatttcactagtcttattcttgattatgatccttctttatccatactcttatctcttcttcctcttcgcttcttttctggtttgctttcttcttgctgcttattatcttctttttggagaattctaaaactgcgtccaagactcacaaatggatcggtgcgttgctcaatttggtacatgttcattggtcgaattctctgttcgaaaacttgcaatttctcataattttctaatacaatgtgacctctctttgtatttttatttgtatttttttgtattcttctcatcttatattcttatctacgacatagtcaacattataaaactatgtatcaaatattaatttcaaagtaactacaccataatccagttctgttaaacccgtccgttttggtgatataaaacaataattgttttttgtctcgaaccaattcactatataaacatcatatacctcttcaaggggggttaccaaccaaacagcttgacacgaaattgtctcgaaccaatgaacccaaacaaaaattgtcctggaaatccggatttccggtttactcaattgaaacaaaaaccggataaacctcaccctaaaccctaaccctccgaaacaaacagagagacacaaacccactctcagcgtatataaacagaactcaagacagagacgctcttaaaccctttcttcttcaacccataccgttttctttcttcttctattttgtcacttttttcctcgccgacgaatgcaagggaaccacgacggttcgtggtctctacacccctccaccaacaatggaagcggcagagccaacggaaacatcaacatcaacaccgttcccggtggaggataccttcctcaggcaaatcctgtctttcccaatttcaatcaacccattagatacccaattcctcagtttccggcgaatttttaccgccctaatttccctgacttctctctcggaaaccctaatttccaaccccatcaaaatctcaacttccttcatcaacaaatccctcaccaatatggctccgctgctaatcacttccttcaaaaccataaccaaaacagcttctctttcccacctcaatctatacctaataatgatatcagtatctctcagaatcacggagctttcgaaaactcttcattgaaacgaagacgacaagaggaggttgtacaagtgactgatgtggttccaaaatctaattttgcttccggtgagagtgctaataactccttcagtgtatctctaccgatccctatagcaactgatgatagtggtgtgtctcgagtccatggagagaagtcatctggaaaacccaagcgcaaagttgatgtcttgcggattgataaggctgttaacaagacgcgtaaattatttgttgctgctggagagagtgtttcttcgactagagtgtcgagagctgttttagaagagcttcaagctgattcttggcgttccttgggtgtgcaaatgcaagatgttccttctcttcgtcaacttatggccattgaaggcaaggtaagcgttgaaattatgtctatatcctgcagagcttctatgttcactgtcaatagcgtatagatatatcttttgatgtcttgtagatcaatgcatttattcactgcttcgttggggctagaagaattgtgaccctgcatgatttggaagtggcaatatgccggaacgagtttgttgattctttcgatgatctggaattgggacctttgctgcagcatccactggttttgctgtattttccatcgatatccagttctactggaccagttaagatcactagtgaggagataatatcatttcttgatagctatctgcacacttatatgacagaagatgttaagctcgatgaatttctgaattttgttgcaagtcaaaagtcagttacaagcaaggaaaagcttggtgtgcgtattcagagcttgcggtatgatattgttcttttttggattatctaaacttggttatgagttaaataattttgatattacagtaaggttggtattaatgttggatctggttgttcttagtatgaactgcattagctgattttatgtgatttaatgcatttttataggatgtatgtatctttcattctagacgcgaagagacaagaaggtgaaacactgaaagtcttactgactgagctgcatcagaagtatcacatcccctcatcaaagaaacaacagcgagataaatctctaactgtctctgagcgagctgactcatttgctttacatcataaggattattgtggcaagcatataagatttgattcttcaagctcagatgaaaatgataatgtttatgaggttagaaatcttaatagttctgaccatatcaatagttgtccatatccatctgttgcggaagagatgaagcgtcttgggggctccaataagaaaaggaagggtgaaagacgtaatcatgaaaaatctgattcctccaaactgcttagaaaatccccctctaaattacaaggacatgcgaaacaagagatacctaaattggctgatgattctgaagctaagaaggttttcagtgtcgatgaggctgattttacactttctgaaggagatttaagattgttcatttcaacttggaaggacacatgtaaagagctaagcatttcaacggtaagttcatgttgagattgtatgactgttttaatctgagagtgaattatcttaagtgaggtgtgagggggcttcatgtttgtttattttctaatactctcttttattattgtagtttgtcgagaaaatgttgtctttttacaacttggggggctctgaaggaagagctcagattaaaagagctaaagcgatgtcatcatttccgtttgttggattactaaatgtcgctgtgagtggtcatactacttttgtttaaagtgttttgcatttttcttgttttcttgctttcattaattcaattgaagaattttgtcaaaaatctctgttaatgcctcctatttacttttgttcatgccattcacattaagtgtacttggaggtcaaatcctcctaatctgacgtcttttttttctttgcaacacttgttttttctctctctgtgaaatagctgttttctggtatctcctaatttggatagaacagatggatgtttggttactactttttttttttaatccatcaaatgtttatgaaaaataactgcacatatattttcaaagtgaaggatgcgagattacgtttgctatatatttacatccatactcattttttgcttcacctttccgtttttactttttttttctttacccatttttttcccctcttattttgctttgtgttgcttttcccagtttgaaaagattttttgtagtttcaccgtgtaacacaggctcactattttctatgatatctccttttaaattctgaagaaatgctgaatttaaaagttagacgattttcactcatacttttacagtgttttaagttgttgctcttgttgtttttctatctctgctcttgaactaagacttagcacccagttgcaaagtcttggagttgagctcagcaaatgtggaaacttccctagttcggctttgctctttgatacatcacaatgtcactgaggcaagctggataaggacaaaaatactacagactgtggatcattcaaaactcgtgccccttgtcacctccagacccccacttattaaattaattaatggaaaccttccaacatctcatgttgcagatgttgctattatgaaaattcctttgttattcctgtttacacctgaaatttaacattgcatttgtagcatctcaatttttttacctggttctgtgtcttgtgcaaaaatcttgttgttcaatgtttgagaagtgtctgcattgtcgttattcgattctctttatttattcctggcaatcagaagaaaataaaaccacaacagtgcaagagtctcttaggtgcagtgggaaatttgtttcaggcaatagcatctcgtgtttcttatttatgatcaattcatttcatttactttgctgattgaaaaatttgcacatgtttgctgtgattgagtagtaactttattttaccccttctattcaggagtttctttatggactttgtttacttcgttttttaatttggtttgtttactataataaagaaatatgatgcattttcaaatgtaggatatagattagaaaattgaaatgtgttacaccttgtttggcgaaagagtgctgttttgtgttgttctgaaaggctatacctttttatttacgttgagcaaaaaaaaagtgaaaatattctctgttaaattgaaagctaacttgccctggaagcatttcatattatgtttaattgtaataataaatatatgaacaaaaagaaatattgatattctctcatttgcttgcatggattgggttctaacttgcttacagatgagcttcctatacccattgtctcttatttttgctttattgtttttcttcctatgctacatttgcaggtaacttcattaagacgtggtatgtgggatagcatatatgataattttcaaatgacaagcctaagtgatacgactaatacaggctcaggaaatcaagttggtgaaattaacccaattgaaaacagtgagttaagcaagactcagcatgttatgcctcctacacactgtgagtatatttatgttctctatcttcatttgttgctctctgcatgtgaatttcggtaattgttgttttaaacacttattcaaactatggtcaagctacaaagtagcatcatgacaagtacattatttatccaagttatacgatctaaaggaactataatagaatgggaactgttttcttggaatgcattatctaacaagtttctatggtagtcttttggtactactcttatctctctagcactttgcaatctgatcaatttgatctattaggtaacactgtcgaagaaattattagaaggctttccttgtattttgagcatgatctttctggagcgaagcacattggtatctttaggaagctacagacttgcgagaatttgttggcagagcaatttcaagtacaggattttgagtctcttggttggggtgggttttttgctttcttggaaaaacatatgttactgctaccaacacaacttcaaaggtttctatctagagaattacaggaagagtttcctctggaggtccacgtgaatgagaatctgttgactcttctgctttcgcaagcttctgaattttcaagtgataaagtactatctagacaaacattagctcgactggttgcagaacaatttccatcaatcagtttcaaggttgtcggaagagattcagaggaaaatttctctgaaatcattggtaagaagaagtcttcttctaaatgtgtcctcttttctgcaacattgttgggagctgaaaactctttgacaagtaaatatctggaagaatccctgacagtgggaaatgatactgaagcaagaagcaccactcttaatgctgttgcatccaaagaggttttagatgttttgcttagggttccgttgttgtcagacttgaattcatggtgtcactgggatcttaggtatgctccacagtttggtcctcttatgggctgtttaaatgagattaattcaacagatctgttgtgtctagtgacaagggatggtaagattatcagagcagatccttctgcaacagcagattcattcttagaggctgctcttcaaggatctgcttaccgtactgctgcacagttgttgtcattgatatcattgaatggaagaacacatctaccattttcccttctaaaatgctatgcaaaacgtgcatttgaagtttttttttataactattccgaggagatggagctaaatgataggaattctcttgtgcaaatgcatgggccagaaaagctcagcacttcttttgacaaagtgatagttgtaggagagaaagctaaagtggctaaacgtgactatgctgcctctaagtttcttcttgattgtctgggctatctacctggggagtttcgcagtttagttgttgatatcttgctaccaggactacgttctgttgttaaagatgctcctacaagagttttgtctgcatgcgagcaaacagagcaacgcatcatgctgcatgatgccggattgctgctaggcattgttgagtggattagtgattaccataagttttgctcatcatgttctccaaactcttcaatagtggagaatgcttcgtccaacttagattctggcgcaggttttgtgcaaaacgaattggaggacccagttcagaccaaacaaagatgcatgatcgtatcagagaagtcgtgcgaatacaaagaagaacctcatgaatcttgtcacacttttggtggttcagggattttatgtgattctgttggggaggctttcacccagactgcacctgaattttatgataatcgagcctctgttattgattcaatcagacgggatgagtttgggttggatttaacttcttctggttctgagatgagtatgctgcagaaacaacatgctcggttaggaagagcacttcagtgtttgtcccaagaactgtattctcaagattcacacttcattcttgaacttgtgagcactcttaccttcttctttctttgttcataatcttcttacaaccatgttaattgggttcgcttgaataaatatcttgaataaatatctggtgcaaccttatgcatatgtgtgtatcataaggccgagttctactctgcctaagatgattagtagttcagcaatacctatatgctgtcaacttgtagatgaacctgttatcattgttcttgtaattgtaagggttaatgagtattaaaatgtttggtagccatgtaaggggcaatatcgtaggttgttagatgtctctttataccatttctgtgaacaggaggaggtttagtggacattccattttgtcatcctcttactctcttgctattgttgcttcaggttcaaaatgctgatgacaataaataccctgaacacgtggaacccacactcacattcattcttcaaaagaccgggattgttgttttaaacaacgagtgtggcttcatgcctgagaacattcgggccctgtgtgatgttggtcaatccacaaagaaaggatctggtggatacatagggaagaaaggaattggcttcaagtcagtgtttcgggtatgtacaacccaagctttaatgagtttaggattatagtatgttaagctaagaataggccttggaatttctttctattccaaaacattctctagagacatgccagcttgaaaggcttatatgaactttaagctcaattgttagacgaattatagcaaattctttctcaaataatcccttgtaacgcttttgcttgggtccactttccaggtttctgatgctcctgagatccactcaaatggtttccatttcaagtttgatataagtgagggtcagattggatatattttaccgactgttgtgcctcctcatgatattgaatcgcttagcagcatgttatctggccgtgctttacacctgaaggatgcaggatggaacacttgcattacacttcctttcagagccattgattccgaaagaacaacagtgaatcacattgaacctatgttttcagaccttcacccttctttattactcttcctacatcgcctccagtgcatagtatacagaaacgtgcttgacgattctctcttggtcatgaggaaagaggttgtgagcaagaatatcgtaaaggtttcatgtggggaaaatagcatgacatggtttgtggcatcagagaaattaaaggctaccaatcttcgtgatgatgttcagacaacagaaatttccataggattcactcttgacatgctggaagatggaacttacagatcatgtatgattcaagaacctgtttttgcttttcttcctctaagaacttatggtttgaaatttattatacaaggggatttcattcttacatcatcaagggaggatgttgatgaggatagtccttggaaccagtggctgttgtcagaatttccgggtttgtttgtggatgcgttaaggtccttttgcagtcttccttctttcacccagaatctgggtaaaggtgtctcctcatacatgcagcttgtacctctcgtcggggaagtgcatgggttcttttcttctctccctcgttctattatatctagattgagaacaaccaattgcttgctgcttgagggagacggtgaagaatgggttcctccttgcaaggttttaagaaactggaatgaaaagattagggttcttcttaaggatggattgcttcaggagcatcttgctttgggctttttggacaaagatatagttttgtcagattccctgtcaagggcactcggcattgaagactatggaccgaagactttggtgcaaattctttcttcattgagtcacaagaatggttgtctacaatcaatgggctttacatggttatcgtctattcttactgaactttacctactattccgttcttctgggcatggtaatgtagagttaggtatagataagagtcttatagatgaccttcacaagatcccatttattcccctctcaaatggtaagttcacctctttagatgaaggcgcagtgtggttgcaccatgacaccactgggttagatcttggtgatgtatttgaagcatttcctgtgttatatggaaatctccgaaccattgatcattcccttcttttggcgtcttctgttgatgaaaaatcctctgtggatgaccttgtaaacatgctttgtgcaattggcgttcaaaagctgtcagcacatgaaatcgttaaagctcatatattaccagcctttgaggcaaggagtacaggtgcagtggacggtttaatggttgattacttatgctttgtgatgacacatctacgatctggctgtcatatttgtctgaaggagaggaagtacattatttctgagttgagaagcaaagctctggtattatcaaattatgggttgaaacagctaggtgaagggtcaattcatttcggtgaagaatatggaaaccaggtcaacatgaagaagcttaccaaaaacttggatatatcatggcatgtggttgatggtacctacttgaaacatccagcatcaaaattttatgcatgcggattgaaggagtggcgggaattttttcaagagattggaatagctgattttgttcaagtagttcaagttgaaaagagcattgctgaattctattctgtttcacactgtgaaaagtatgatatcaacttgttatctcctgatttaactgttaaagactgggaatccccggaactagttgatctcttgtctctcttgcacaaaagtaatggccgtaaaggttgcaagtatcttttggaagtccttgatagactgtgggacgattgttactatgacaaaacaactgttaactataactcgggtacgcatggtatcatcagatcatcagaatcttcatttatgagggtaatttgtgattctctatggatagtttcaagcatggacagcaaattgcatctttcaaaagacctctatcatgattgtgatgatgtgcagtcaatacttggcatgaatgctccctatgcagttcctacggttagtttggttttgcttacttatgttataatgtgcttggtactacaactattagttctaatatacgcagtgaataattggcttttgagtattttcctatggacttataaaattacatggatggtcttgaaatttatttagaggtgtgggttctttgtgggtcggggtgttgtcttaatatcttaaacttcgctacaatgtcttactcagcggaggagttctttcacctatttgtttaacctctcttttttcatcctctctattggggcaactgtgtaacaggttacaagtgtcaagttacttagtgatattggttttaagaccaaagtttccctcgatgatgctttggaagtcctagaatcttgggtacactgtggagactctttcaaatcaaggtatgttttttaagcacagcatcttattttttctagctgaattttctgattttaattccattcattttttttttttacatttttctttccacattattatgaatatagaagctcttaaactactgttcactgtcgtgcattggatgatttactgctgataaatgatattctgctggtgatttgtttctatttagcactaaaatattaggtctgataacataataactgagttctaaacgtttttctaaaggccttttatgtgtaaggacgaacagagtccatagacttcagataaattgcccatgtaatttattttgagatgagctgtttttctttctatattgttacaacatgcttcttctagtcaagtgtttgttttccacccctttttgtggctccaaaaaccctagatgatgatagtctctgctgatgtattttctaacagcaaacaaatttgtctttaattttgcagcatctctcagattaccagattttacaaatatttgtggaatgaaatggctgattcaaaacagaaaattactgaaaagcttcatactcttccgtctgtgtttgtaccacatggaattgcaagtaggcagaatgatatgatatcgggaatattcttgtcacttgatgatgtttactggaatgattctgctggcgttttagatgagataaaagagatcagttcgcagatcagcagtgttgtggaaccattgcgtagaaaaacattgggcaatatctatccaggtctacatgacttttttgtgaatgggtgtggagtacctgagacgccttcgtttcaagagtaccttaaaattctagggcagtttgcacataatgtgtcaccctcatctgccgccaaggctgtaagtgatttacttaacttatcagtcttgtcctgtttatcttcactctattcacttctttgctaaagtgtttaatttatgtctaggtcttcaaaattttcctgaagtggagtgatgacttgaactctggcaaatcttccgaagatgttattcattttaaagagagactttcagaactggagtacactgtactccctactgaaaatgataagtgggtttccttgcactcctcgtttggtctcgtatgttggtgtgataatgagaagttaaagaagagatttaaaaacaaggataaaattgagtttattagctttggggaaaatgatgacgaagggcaagaagtgcttcaaacaaaagtgtctgggctcatgcacagtttgggcattccaagtatttctgaggtaactaatcttctccttcacaaaaataatttgaaatgcaagccacttagttatacatgcaaagtgcctcttatggacattagaattctgatggacaagagtaggcctttcttgaactgtgttgatgcactaactctaaaaccatccgcagaaccatcatcttgtagcttatatacagggtagaactgatatatgtgtctccgtttctactataacactaccgtttctactataacactagtttccatggcctcgattccaattcactctgtggtgtttatgtaattgtttcaggtggtaaagcgtgaagcgaaatatgaaggtttgcaagataatactgtaacagtgtcacttgttaactgggctctgccttatgcacagcggtatatctttactcttcatcatgagaagtatacccaaacaaaaaagacagtccatagtcaagtcaaacgtctacaagtctttgttgttgataagttatcctataggaatgtcataccgcaatatggcatcagctctaaaaaggagttcaaatgcagttctcttctgcaggtatgtcttctttcgttctgtttcttgcgacaatttaacctaaatattttgggattgtatgggctgtgacattgtgctttgaggctatttgaaactcatctctgtttatatgcaagtagacttttgccatatcctcttgactgggacaatggttttgtaaaaatgtggttttactgatattatatgtttatttatgttgtcttcaggataaagctctgtacacaacaccaagtctggattcccattccttgttcatggaactgtctcgtttgtttttcaacggagtgcctgatctgcatttggcaaatttccttcacttgatcaaaacaatggcagaatctgggttgagcgaggagcaaatggaatccttcattctgaacagtcagaaagttcatcaggttcctgatggtgaagagatctggtccctcaaatctgctgttaaagcgaagaagaaagctggaataagcttgagctggttaccttcaagttctaaaacaagacatggttctagcaagaccaacactgatgattctaaacaagagctggacactagtagcagcaaagaggatgtaacagaggctcttgaagaaaaaataccgattgagatgaccaataccaacttggtttctggatatgataattgtgcaggcacaagttcacgagctagtgagccaaacccgttgcattctatgcatatgattagtggctcaacctcagggaatcaggctgctatgcatctcaatccaaatcttcctcatgaatggaacaattccttcacagctaatttcagcgatagagaccagcttcatacaggcacaccttgggctgcacaagcgcaacagaccggtagaaaaggtgaagaaatcgcttacagatactttgttgcaaaatacggcaatgaggcactggttaaatgggttaacgaccagagcgaaaccggtttaccttacgacctcatgatcgaaaaccgaggtggtaagaaagagtacgtggaggtgaaagcaacggtatcgacacggaaagactatttcaacttgacagtgagggaatggcaatttgcaaatgagaaaggagagagttacataatagctcatgttttgttaggaaacagtaatgcaatcctcacacagcatagaaacccggtcaagttatgccaagaaggtcatctccggttattggttctcatgcccaaccagagaaacgaggtcaacgttacattttaaacctcaatcaaataacacaatgttactatttaatattattaattttgaaattcaattctttcaaacggagatgggtattttaacagaacccaaccaaacgagaatccatgcataaactgacccaataacacaacctgtttattaacctatcaattaaataaagaaaatagttagttattattactccttccatttcaaattagattttgttttagattagttgtcattttatatttataatataaattagaaacaaaattttcagtttaattcctacttttgaaatgtacaggatattaaccaatcaaaatcattgccaataaaaagcatcccaatttcagttgttaactagtaacaataatcaagttcatcgatggagagatgctaactctatataagcagataaagtgggctaacacttctcatcatctctttataaacaagtattgataaacaacaagttctttttttcttccatatacctaaacaaaagaataagatgacaagcgttgtttttgcgtttaaagttttgtgtgtgtctttcttgttcattgttgttgcaagtcgtcctactatccgaccaaaaatgttcaatgtgcaacgtcatggttctaaatccgatggaaaaactgataacaccaatgtatgtacacaagaactaacctaattttatttttttaccactaattacttttcagatgaaaatctatgaatataacctatgtcattttaacgtatacgaataggtatttacaagtgtatggaaccgtgcatgtagaaggaaaagtggaagtagtaaaatttatgtaccaaaaggaacattctaccttggtggtgtagagttcgtgggtccatgcaaaaatcctattgagtttctcatcgatggaactttattggctcctgcaaatcctaacaacattaagcaagatacgtggatcaaatttaagtacatcaatgatctctctatctctggttccggtacacttgatgggcaagggaaacagtcttggccactcaatgactgccataaaaatcccaattgtcctaaattagctatggtaacatttcttcaactttttcacttattgcttcattttgaaaaaatgattattatttatttaaaacgtatttcaaaatgcacatgttatttttatacaaaaacttatatgaaattttctagtcttttttttttcatttgagaaactaaaaactattatcataaacttgattttttttaatagactatgggatttgcattcgtaaacaactcaaatatcaaagacataacatcactcaacagtaaaatgggacacttcaacttcttctccgtccatcactttaacattaccggcgtcactataacagctcccggcaatagccccaacactgacggtatcaagatgggttcatgtagtaacattcacatctccaacacaaacattggtaccggagacgattgtatcgccatactctctggaactactaacctcgatatctctaatgtcaattgtggtcctggacatgggattagtgtcggaagcttagggaagaacaaagacgagaaagacgtgaaagacttaacaataagagatgttattttcaacggtacaagcgatggtattcgaatcaaaacttgggaatcttcagcttcgaagatccttgtttcgaacttcttgtacgagaatattcagatgattgatgttggaaaaccaatcaacatcgatcagaagtattgtcctcacccaccttgtgaacatgagcaaaaggtttaaatttctattcaaaaaccaagcttcactattcttttattttatcacccaacaacataaaagaaaacttttgtttattttcttcagggagagtctcacgttcaaatccaaaaccttaagttaaagaatatatatggaacgtcaaagaacaaagttgcagtaaatcttcaatgtagcaaaagatttccgtgcaagaatattgagctaattgacattaacataacgaataatggacttgtagatagtttttccactttggtttgcgagaatgttgacggttctgtaagcggtaaaatggttcctcaacattgtattaattaattcgacgctccatcaaaacaataacaatgtgttgtatacttgtactagataaggcccgcgttaatactcatgttagaaaataagtgtaaatttttattgataatatatgaaatctaagtataaaatttgtatatatatatatttataaattgatcttccatgattatttttttaaaattatatatgaaaaatacaataaacgattttcaactaatactttttcgattgtaaatttttaaatatctagaaaatagttcgagcatagattaaaatattttatattttaattaaatttaaatattgctatccttaaaaatgaaccatattctgggatttgtttcaaaaaatctagctaccaattattgttttccttcaaatgcattaaccctaaaatatattaactgactttctaaccctatcaatatattttgagtgatacattttgagtgtcattacttttaacagtttactaaatttatttacataaatgtagttgtaggtaaatgtatacaatttcattctaaagtgtaaatgtttaagtttttatctttttgcaagcaaaatattactccatatgtttcttattgattgattttctagaaaaaaaaatgtatacttcgacaatctaattggttatttttatatgattgtttggttccgccttgtaattcattgatttatttttaatttttttttgtggttaaccaaaactaaaaccaaataaagttaaatcgaatcaaactaattttagctagattatttaatcgaacccgaggcccaaaataaaccaaaatctcctctatcaaagcttagccacttcatacgtaattagttttatttttgtagccattcagtgaaatatataaggatcacaaaagacatcatgtgaatttgcttccttcatatcaaaatgtgaagagaaagatagagagacgattgccatttaagaaagaaaccaaacattgaaacagaatacactggaggaacatatactatataatcagagaaggtagatttatttgatatatattagctaatacttgttcactttctctggaacaagcttgagatgctgcgacttgtgcatagcaagaccagtcatgacatccatattgatatcatctggtttcatcccattaggaagtttaaagttgaagctgaggagaaggttcgcataaggaacctcaagcatcgcggccccaagacgcattcccgggcacattctccggcctgacccgaacggtataaactcgtagtccgtgcctttgaagtcaacttccttctcaagaaacctctcgggcctaaactcatcagggttcggtccccattctttctcgtcacgtgacacggcccacgcgttgacgttgaccgttgttcctgcggggatgtcgtaaccggcgatcttggtatcttgaatgcaagcacgagggataaggagaggaatcactggttcgatccttagggtttctttaactaaggctctgaagtaaggaaggttcttgacatcgtcttcagtaacgaacgttgaacctttctctttcatatactctctcacttctgcttgagctttcttcaacacttgtgggtacttcattagatacgtcatcccccacacaaccgccgcagctgcagtatctgttcccgccactacaatatccttttggagccaaaaaaaaagaaaagaaggtgaaagacaagcaaacggtttcttgaagcgcaagcaacgatttaaaacatatttatacttaccaagatgacggctttgacattatctacagtaaactcagaagcgaaaggttgttctttgtagatccccatcaagagatcaatcatgctctcggtttcgggcttgactctcttaggatcaagcgtctcattgacaacctcttgaatataagtgtcttgtctttcgaaacactctttcatataagctgtgaggcctgataaatcatcaagaaagccacaatatgggaaaaaatcagagaaaaagatcttccccaaaacgctttgagtcccataaagaatcttgatgaacctcttcatctcttctccatcttcattgtacttcttcccgaacgcttgtctacacacaaccgagttcgtgaaggtcaacataagctcacttatatcgactacttcggatttatccgcggccttgttgatcttatccatcatcctcctagcctcttcctctcgtacatgcttaaaggtggccacacgtgttggtgagaacaagtggttcatccccatcttccttatctctcggtaatacggtgtgtagtggtttaatgccatgtcacgcctgccgtaggatatgaactcatggccacgatgtggaggccggtccgcaaagttgacatcttgcgtcttgagaagctctttagctagctcagctgaagatatcaccaccattgttctgcttcctatcctgtatgacaagattggaccgtattttttggcccatccagcgaagaagcgttgtgggttaagcttctgaagctgaaggaggtttccgatcaccggaagtggtgatggccctggaggtagcttgtaccgtttggttttcggtttttggtagaggaagaaaaggagaaccgcggcgagagccaccacgccgatgatgatatcttccattcttagttgttactacttttgagtgttacattgaacagcaaagctccttaatatataagaattatatatggactacgtttcttatttttttcttaaccaaactaaaccaaatactaaaaccgaacttaaccgacatcaaatttttaatcaaatggttactcccttatacctacttacgaaacctcacgtgttagaattaataaacaccttcacctacccaacatccctctaacgtcgtatatgttttagtggttcatgcagtcacactcattcttgtttttatctatttgttatttacacaaatctttgtttaactttgttcgacgaacccaagacttatatcaatcacaatccatttctatatcgaaaatataacatattggattattggtacgtacccaaaattctaaacagtcgtcagtcgcaaattgtagagtaagagtttttcaaaaatcaacttgctggttgaccaaaaaaaaaaatcaactcgttgatatagtaatgatatggaatcgcaaaacatcaacacagatttgaatccgaagggttggtgtagttggtaacttggaaacgctcagtgaactcaagccaataaaatgccaaaatctcttaaaggtcaataaaaatagaatgcttaaaatgttttcaataaccaaagatttaaatttatgattgaattacatgatcacttcaaacgttcgattgtatacaaccctatacagtattacaagggaacacaattacgaaccgccagaaaaaaagaatgatgcgactatttttaaacacgagaactagaatattaaaaaattaagaaaaacatcaaccttcacaaaacctcaactagtaccataaaagatttgaaatcgtaagttgtgtggttgctttgcgtctgggcccaattttaaaaagctgaatgtttctcacaacatcaatcaataacaacaattgtaccaagctttaagtttacaagaacatgtttgtaattagaatcaaattttcaaatgaaaatctccgaatttcgtttctcttacagagaaagatagaaatggagaatattagtttgcttatggctcaagtaagcttttaccggatcgtgccattgctgatggatgaaactttgcatacacctgcagatgtagtgaagggcacatctttgtagcaagcaactagattctcttttgtgtttagatcaaccaaaagcgtctcccatactttcttctttgggtttaagacatcgtctggctcgccttcaaacccgggaaatgtaactcgctctccaatattagcagttttagggggctcaactaactccacctgaaatgtttccagcaaaaacaatttgttatatacaatcgaaatgaatttagcagaactacaaacaggtcaaagactcgtatgaactctaccttgcttccatcactactggaagctgcaagaaccattgcttgtgacacaatatccctcattttcgccggtttcaagttgcaaagaacacaaaccatacgattctgtccagaaacaatattagatcaattggaatgtatattacatactgatatcgggaaggaaacaaatgactaggttgattgaacaaacctgcatttcctcaagaggtatatatttgaccagtccactgacaacagtgcgaatttcaccacccccaacatcaatttcttctacatacaatgcatctgccttgggatgtttctcagccttcacaattttaccaactcggatatcaagtcttgccatagttatttcacgatcagcagctggttgaggtttgggttttcctccgccttttgatgatgccttttgtttcttggcatctgggagaataaacagcagttcagtacataatcaagttactaaaagcctaaagaatgtaaaacagtattttgagaatgataatagagaacctgaaagttttgttttattaagttgatccgccaaatttgctgcttcatccctagcacgtctatcagactgacttccagcaaacttttctctgtaccgtgccacttcgtcgttttcctgtgatcatattgtttcaatataaataaaatgctacatggcattataacatacaacaagtctggctttctatcgataaaatcagagagctacgtaccaactccttgaacaaaggttgaggggtgcctatcctgtggctaggaggcagaatatcccatggtctacttgctagtaatacctctcccctctcgtcggagagagaaaattgtggaggcaaatttagctgtttaaatacctacaaaatgcaataacagcaataatcacgcttggcattctactacaactaaatagaaacaaaatttaccaaacaaacaatcaaactgacctcacaagaaaaggatggcatgaaaggttctaacaattgagcaagaaggtgtactaaaccagcagcagttcttataacaactgcacacaaaggtttatcttccttgtaaagtttccaaaattggcttgcctacatggacacaagaaaacagtatagttggtaatatgcaacaaagctaatatctagtttgttaatgagaatagaacctgcaagtaatagttcccttcgcttgaaatcagcatagcagttttcagtccctgcttgagcttaacctacatcaaatgaacaggggatttattaagaacctaaaaacccaggcacagaaactcagatagccataccacgccaaggttcatataacattcctcaccttttccatggcttcaacatactctgccacaaacttttcaaccttttccgccagtgattttgttaaagaatgagattcagcatcatgagcatcaggaatgacagacccgtaaccttcacaaaacatacaatagtaaggtattgaaacatcaaagacaaataagaaaagtcttgccctagttgtcaagagtatcacaaagcaggtatctctcacttgcacaccaataatagtaagccagatgcacctttctatcattctagagtttttagactatctatttgtcccgcgattcaaatatctctcacttgcacaccaactggctggttacagtagaagaatacaacacatcctatattttctattggatatgccagactaaaaagctatctacagctaacaccaaacacttgagtattgaatttgaaagaaatataaccaacctgcattatcaggctttgctataaaactcagaactcgattaacaaagttgcctaggttgctcagcaactcgccattcagttttgcttgcaaatcagtccatgaaaacgatgtgtcagacacctagaaggcagaatccccagaatcaatcagtgtatgtgatatttatgcatgcctatgatgaacgaagaaacaatgtttctattttgcagcagcaatcagttacctcaggcctgttggtcagcaagtagtatctccacacttcgacaggtatatttgtatcttttacatcattaccaaacactccaacacctttactcttggagaactttcctgaaaacccatacaaaacacatgtcctcattttctataaatggcataaaaagtaaatcaaacaaaaataatttaaaataaaatcactcagctatggtgaaacatcaactgaccgtcttcatagtttaaatattcagtcacactgattgtcttcatgagtgtccaattttcctcagttccaagctgggtagagggaaacatcacctgcataacaaaaaatttagcagttgaaaacaaccaaatacaaaagataaacatttcttaagaagaccttgaggatagcttcagaaaagacaagaaccaaacaaacttttggtgttctatttcagtataaaagaaaggtaaagaaaaaggaaataattaaaaccattggcacaagtccttggtggtaaacaaatttctgaaatgttatatactcacagtgtgaaatggcacattgtctttccccataaactgataaagctccacattctcaggattcttccaccacttctcccattcagatgtgtagcaagacgttattgagacgtatccaataggagcatcaaaccaaacatagaagacctataaccatgattggaattagtagttgatctttaaatttttatgaaactggctggcagtgaggttcctactttgtccttgtatttctcatgtgggacaggcactccccacttaagatccctcgtaatgcatctctgtctaagcccatccctaagccatgcatttgtcgtttgaatagcattttgactccaagatccagtaacagaggtctttttaatatacgcttccaacctatctttcagtaacggaagctcaataaacaggtggtctgtgtcgcgaattcggggtgtgttttgacagacctgtttgaaaagataaatcattagtattcacagtaattacaaacatagtcttgcacctctgtagaaagctatatcaacaaacacaatggcctatacagtgaactctgtgaaccagaaaaacaaagtatgctccagacaaacaaaatcagctagccattaccagtaatatattacaagcatatgcaataaatctgtacggccacaacactagaactgcataataactgtcttcacttgttaactagtgcaattgcgcctcatgtttccacatttaagttatattgatatctctacaatagaaggtacccaagatcttttttgtgaacgggaatttgtacaggcgtgaagaagcatgcaatgtcccagagagactttacgaatactgtaatgtattgctataaacagtataaaaccacacaaatacaatcccttaatgggatgatggccatgaagaagagaagcatagcccaccttgcacttcggatctttaagttcagtaggattcaggagctttccacatttttcgcactgatctccacgagcagaatcataattacatccttcgaacggacaagaaccctcaacaagccggtcagctaagaacttcttgcatgtatcgcagtaaagctgaagatacaatgggccacaaagacatgagagttaaaaccccgctaactgagtggtgtagatcttttacttacgaagaacatatgtatgcacttgcgatcaaataagtctaactggcattggagtaaaagcattcacctgctgcatggtgttctctgaaagccacttgttgtcccacaacttgttgaaaattgcttggcacacctcagtctgttctggagttgaagttcgcccaaacttgtcaaaacttataccaaaccagtcataaacttctttatgaatggcatggtaccttaatccccaacaacaaaaacaaaagaaaagatggtaagcagtataaatgactaaggtccagacttctctgatctagaaattaagattcagaatccttgtcaagatacaaatcccataaacctacacattgcaaatccgctgataaaaaaaaacacttcaagacaagtctaaatcccataaaccttcataacagacaaattctatctacttttaggcagtagatgctgacaaactgaaacagaaaaaaagaaatcaagatacattacttgtcacagatttccttgggggtgcaattctcctccaaagctttggtctcagttgcagtcccatattcatcggttccacatatgtaaatcgcattatagccacggagacgacagtatctagcatacacatcagcgctcagaacacctataagaaaacaaaaacattccataaactcaaaaagaacctggaaatagcaatcctcgcacactcaagaagaaaatcatccttatcagtcgtgtgtcacacactagtccacacaatgtttgcatttccgtagattaatcagtactaaaatattgcaacagattttgaaaaatgaaacgcaaaattagattacgatgacaatttcaaagctaaattgatttctgcatctggttctagaacagaaattcataaacgaacacacgcgattacatgtattagcagagaagacgaagacatgaaatgatacagataaagagaggagagattcaaattacatccgatgatgtttccgagatgaggaacgttgttgacgtaaggcaaagcactggtgattagtatatttctctttccagggatcggtaacttggggctgctcttgccgtcgtcttccatggcgaaaacaacaagaccacaaagctaattagggttttcgcgaagagtcagagacagaggagaaagacgaatcagagaagctgagaaaagagaagctctttagctgatggtaaacctaagtaacggcggcctcagatagatccggttaagtttagaccagacagaaagttggtcactttccggtttgataactgaattgcatttgcaagatattgatcttactggtatggatggaattaaaccggaatctaaatagctttactatagtttagtgaattattaaacttttgtgaaactaaagtaaagtgactatattaattaggaaattaccattaacaaaaaaaaaaaatacaacatgaccacgtcctatattacatggaaactttctcctaaatcattttcttttgttttacaacatgaccacgtcctatagaaactctttgctaggtgactaggtctatcttttatgttaaacaaaacagatttaccacgtctatcagcccaaacttgaagcgaacttttttcatattgttggacttcttcatctttctgttattatatcatttcacaacatatatttcaaatgctacatatggataacactatggttaaaataagagagttatgtaccaattctctaaacaacggttgaagaatatctatcatatgactaagaggcagaatcttccaaggtatacttgtcagagagggaaaaatgtggaggcaaatttaattgtttaattatttacctacaaattgcaatagagtaatcatgtctataatcacaagctaacatttgacaacatgtcaaagaagtgtttaaaggcactcgttagtggtaagattctttgtataatttatttcgtataaaacaaaattataggaatatttatgttaaatctctataaatatgataaatcatatcattttcttcatcgttaaaacttcatctctagtagatttttttttaatgattaaacttcacacaaagatttcgacacagagaacgatgattttagtaacatttttaaataataacaccaaagtttaaaaaaaacttttttaaaaaaaatctcatgattgaataacattagacattacaaatgttgttttactttttagcggtttgaaatatattctttagcgggtttgtttgtatttccgatttggctaaactcagagagtataactagccttgatgaaaatactaaagtggagagcctataataatatttaagcctttcgtggctgataaatggagttacggactaagtaaatatagaaaacgaaagcaaaagatgttcgttgaattattcttctcatcagtatgtatataaaagtatagtatgtacaatgtgtattttcttctataaataagagaatgtaaaaaagactttaattattgtatgggattaacgaatctgagaagtgacagtgaagaagaaagcttcgtcgcatggtaaactcaaaccgcccgttggatgattaaaaccgaactcttcttctgctttcctaagcaaagcttggaaagatggcttgttcaagtaacaaaccggaacaagatatctcttcttcttcagattttctccaacatacacagcaaagaaccctttaggcgttgataatgattccgtagtaaaagaccggcgaatgatatgcttggtagcgaaaaaactccttaagaaagccatttcgagtattagaaagaaaaaaaaactttgaattaatggctaaagttaagatatcttgatcttgtttgatgataagagaagctttgagtttggtttatgagccaaagggaaatgtgggtctatatatattggtggagttagaaaggttttattgaaaataatatgtctacgaattgtgagtgcgacctacaaggacatggttttgacaaacagattagttaaagcgtttggattttaggaagatgtagtttaataaatgttggggtgttgagaaaaaatgagtgtcctacatgcatgtggccaatggctacattagttctgtcttcagctgctattgtcaagacaccgatattttatttttttacttaacggctgaatcaatggtccacatttaaactaacattaataacggtaatagaatttgttgtaacagcaaccatagcaatgcatgttaacgctacataattctatctatattgtgatgatattgacttttcaatgttggtttttacgtgttccaagtaactaaggtatgagtggtgaagttattgacgtaaacgttgtacacgtgaacattataagcattttatgttccgtatatgttatctgattcatatctagtctgaaatcaagatattaagatcgtatagcaagtatccaacttggagtatccatacctaactaccaaaatcctattcacatgcaaacgtgaacactgaacactagtattcataaaaaaatcggttatgttatatgttatctgattaatatctaataggaaatcaagatatccgaacatcctaaggtatatatcgtatacgaagtacctatcaaaagactcgtagtatccaaacctaacttccaaaacacatagttttcaatgcattaatgcccaagatccgattcaaaatatctgaaaatatctacccaagagacaagaaaaatacgatgattttcctttacacaaaacaggtcgggccaaagtacgtacggttctccgatttttatttttatgggcactagtctcatcctgagaccccttttgagttttgtcaagtggtcaaagaagggttaaagtggtacttaggcgagtgtcttgaataaatgatagccccaaatgtgtgaaagaagaagatcacatggaaaaagagtagaagagacgtggaagtttgttttagttagggaaagtcaattttagtattcatataaaaattaaaaaatcgaccaaactctcatgtcccatcttcacttgtctgcttctcttaaatcacatccacgctacggaaaatgatcaccataacacacaaaaagatactttttattaggtcttttgtccggtctattgtttggaaaatggcataaaaatacttctttctaagacaataacatgtgccattttatctacaactcactagactaattaacctctcgttttttaaggacatacacattcgttgaagctaaggctaattaggttttaattttttatagttaactgttcttctcattaaatctcttttgagattcctaacggtcacggtcacattacgtcgatgaaagctcgctagagaaaagaagatatatggttataccgttctttgtttcaagatttgccaaaaaaaataacctttttgaccaatgtgttcttgattagtatttagaccaaattacacgaaataagaaagaccaaaagaatgtgaagaaaaattgtgaagctgtgatctttagttagttctctgttttaaaactttctttatatctcatatgagaaacaaacaaaaaatattagaaacaaataaacatgaagcaatcaatcaaatagtatccctaacaaatcattcactaaaccttccgttatccaaaaaaccaattatagccttaattaaaccccatttgctctgttttttttctcatttgtcacccaaaaaaagttctctttgaggcttttgagctcgtgttgcctcgatcttgaccgttagatgatctactatcggagccgtgggattatagtattgcaggtctagtggaattggagctgcgactggaacctgagtttatgaagacaggagtgtctctaggcgagtgtgatgtggagccgcgtaagctggtactgtttcccatgtcttttgtcttgtggagaagaaaagttcctgacaaaatggtcacaaagccacatagctcggtagcaatttgcaatccactttgagaagcccaatcctagacgataaacaaataatgatgctatgcttataaattaattggaaccttttagtttatgatcacttctcaaaaactgcattttaccttgaacatgatcatactagctaagatggtgaatgttgtaaacataacatagtacactggagatatgactgctgtgttgaaattatccagagcctccaaagatgaaaacaggatttgttagtcggaaaaaattgaaatgtgacaatcaaccaatatttgttattaccttgttcaagtagttgatttgcaaaatgcaacatatggtcactactatgatgaagatccatgcgtggaagtacttgaattggttcatcccggaaaaagtcagctttatggcgatcgccacagctttaacactcataacctaacacgcaagagatactgagacacttacttaagcaagtagagatatatactaagggatggctaaagaaaaagatgaaaacatactgtaagagagcccattagagagcaaatcccaacatatactatcatatgcgtcttcccataacgcggctcatagtaaaagatcaatgcaagcaccacaaccaagaccacagcagaatatgcaaggaaaccttgttaaaacattcaagcaatagagtatgtttcagtccaataagaatcttactttttgtcaaaaacatttattgttctatacctggttcggtagcaaggtgccatacttgcttgacggattcaatgccttgctcgtgaggagcatgtaaaacaatcgttgtagatccaacaacacagaggacacaaccaagtataccaaacatatgcaacttctcttccaaaataaaatgtgctagcactgcgctgcataacacggttttcgttttcaggaaactacgttaacgcagacacaacggaaagagataggcatagtggatacagatacctgaaaataatacttaaagctcccaaaggtgttactagaatagccggtgcaaatgcatatgctgcaaaattggctatctccccaacaatcactataagaattagtatgaatacaatattagttatcataaccaaagtttgatgtccattgattaaatccaatagaaacttggattccaaaacatgtcccaagcacacaaaacagcaaagtcatatcatctctagctagataacaaacatttaaaaagtgatttgcagcagaatttcccaaaaccattatagaggatattgatcagacttacttgttatcattccagcccaccaccaaggttcatataagtatccatatcctccttcacctgatcacagataaataacaagtagaagcaaaatcagtaaaaaaatatgtgattttgaagagcaagagactaagttatagctcaatgaaacagagaacctgctctggcgccgctaacaccggccttcttaagaccttttttcttgatgatgaagctagaaccgatgaatatactcgaagacacagctaaaatgactccatgtatattatcaggtgacatctcctccatctttgctaatatttatagtcttgcttatatacaagttaagataatttcaggttactaatgacgaaaatttccagaaagtttaggctgaagatagcttattgcgtctacaaaaaaaaaaaacacaaacaaataagaatcggacaaaatgtccattttctaatcaaaaaatcaacataaaacacataagtactatttaattttagcaattgcctcaccaatcatgttctgaaaacaaaaaaaatctgagttttcaaaaaattctttgtggcagaaaattcgataaccagacaaatggcgcacaagtagattacaccgagacagggagatagaagcaaaggaaaacgacaaatcttaacatataaacaaacaatgtcacaagaaacagctgcgactatacaaaatctaggatctttcgaattgtttctcaaaagattaacgaatcaaaagaaaaaaaattaagacccacaaaaaatttcactttttatacgttaccttgtccacaataataaaatcaaatcaccagtaaatgaaacaaaatcaaaaagaagaaaatatctggaagctagagaagtagcaatagaatattcgaatcgtatcaaacctttttcatctcttccatttttgtacaccaaaaaaaaatcaagaaatgtagaagacgtaataaatgatttttttccgtttttttttcttggtgatgaaacgtaatgtgaaattgatttagggttctttgttgtgatgatggaactgaatctgaaaaaaaaatgaaagcaaagaagagaagaggacagagagatacagtagtattgtaacgaaattataggaaactaatagaactaactcgaatgcataacacacttataatacaactcaaaacattagagttacacatatacacaaacatttaaatttagaccgtttcggttctactttattggtttcttttttttttgttcataaaattaatcctctgtaatacaacaatcctctgtaaccacttctaattcttaatcaaagtttcatgctataactattatacagtttttgtttctacatataaaacgttgcagaccaaattccttacgacgatattagaacattaatttaaaaggacaaggagatattttatctttcaaataagtgtaagaatgtagattgataatatgattttcaaacaagtcttgagaaagtttattgaatgcttacttaagtaaagaaggaaacaattctcatgaaccagtcacgtttgtgtgaaaccagaatgtggccgatggtgagtccacacacaacaccaggtacgtagcctattgcagctgctatccagctaaatacttgatcttcctcttccttgtcttcatcttgttcttgctttgttgcttcttcttctccaccacatttttttaggagaggagcaccgcaaagcccgggattctctgtgaaagaagaactatcttgggtttgaatctgagtggtttctggtattggaccttcaagcctgttgtgcgagaagttcatccactctagaaacgtgagttttccgagctctcctgggatactgccggataatctgttttgagaaagatccaatgattggagattgctcaagtttgatagagatggtggaatatggcctgtgaaagcgttgtttgacatgctgagcacaatcacttctttgagaagaccgatggactcggggatgtctccttcgagtctgtttcccgagacatcgatggttttgtagattgtgaaaccactcccaaccagctccatctttaatcctttgtttatgagagctacagacttatggtagaagtcccggtcaattcctgtaactgtatactgaattattctaccatcaatgtccacgactgatgacattacactccaaccaacaaagtaatctgacggcaaaactccagtgaagcgattttccgaaatatcaaagattcgcaacctggagaaacttaaagaatctccaggagaaaatattggcccatagaactcgttagaacgaaggacaagaatctgaagattgggcaacaattccaaccaggatggaaacgtgtcattgattctgttatcttccacgtttagaaactcgatatcactgcagttgatcaatgatttgggaagttctcctgagaaaagattgtgaccaacatcaaatgattgcaagtgatgactgatagcttcctctggaaaaataccagagaggttgttattccgaaggtgcaagacataaagatgtaaattctcaaaacaccgaggaatagaaccgctgaagttgttgtttgacaaaacaagtatccgaagattatccaattcgcatattgttttaggaatctctcccgagaatcgattattggagctgaacaagtaattcatagagactactggtaacaaaggaaatggatcctggaatatgtttgaacttatgtcaagcacaagtaattctcgacctccttgaataacatctgctggtccttcgaaaccattgaaagaattatgagaaatgttaacataccgcaactctggcagactccataaccactccggtacttggccttcaatttgattggcagagatgtctaaatactccaaactggtttggttacgtagaaatttgggaaactcggaaatattgcacgacaatagacccaagtattctatgggtgagggaagactgacggttgaactgatcttcaaattaatccctgaaacatccaaataaccaagtgacaagagaggtgagaaaatactcaaatcaacaatgtccggattgaaattgtttcttccaatgtttaatagttgaagattagatggtgaagagatattcccaatctcaaaaggaccgctgaagtcgtttcttcccaggtgaagtagaatcaacgaagggatcatgaagagagaagagggaatggttccagaaaatgaatttccactaatatcaaaagcctccagtttggagaggctactcatgttagatgggagcatacctttcaactggttatcaccaaggtcgatccaggtgaccgagctcaacttgagaagcatatcggttagtcggttaaggttccccattgaatctggtccttcactggtgaaatcattataggaaagatcaagatgagtgagataagaaagatttccgagtgaagaaggaatctttccaaaaagattgcaattaacaagaaccaaaaccttcaaacgtttgagattgcctatggaatccggtagaatacccgaaagatgattgctgccaagaactagcttctgaagatgttgtagtctaaacaggctactattagatctcaaaggaccattgagatgactatactggaggtctaactcaaccaccactcccgtcttgggatcacaagagacaccatcccaggaacagcaatcagtgttgttcctccacttctcagtcatcgcatatgaatgggggcttgggacattgaactcgttcttgaacccccaaagagaatccttctggtctggaagacacaagtgtttagcactaacaagtattgagtttgtaaggcagaagattaaacacaagctccattttactgttatcatcctcctcacactagaagaatgcatcatatttttttctatgattttttttttctttctgtgaaacgaattgatcaacgtattgtctcacatctgtggagtaaattagatcttgactttaaaagataagatttttccacaaacaccaattatcccagccgtgtggtgtgggttaaatcattcaaacactgcaaaaatcaaggtctcttagtgggttgagagagtgacagtgaaagtgacgatgaaccctcgtacacggaacaagtctttgcctttgcgaaatcaatttttttattcttccgttatatctttaaaattttcttaattaatcaactaatattaatagtatatttccttggtctccaaatctttgtctttaatatttcttcacttccaagttttcgttaagacttttcctctgcatgacctcctctgttttattctctgaaattaaacaaagcttctgtcttatttcttctaattcacgtagaaatgaaaacaacaaatacagctaaaggaatgatattagttctcctgaacatttggagtaacaattattatcaaacgccaactgaatcaatcaattaaacttttgttccctcgttaaaaaaacacacactcattatacaactcaaaacattagagtacacgcattataacaagggggcatcatcctcctaagaggtcatgcttttattaagcaaaatactgaaagcttttcatgaaccagtcacgtttatacgaagtgagaatgtgaccaatggtgagtccacacacaacaccaggtacgtagcctattgcagctgcgatccagctcaatacttgatctttttcttcatcttgctcttgctttgttgcttctttttcttcttcttcttctcccccgcaagtttcttggagaggaacaccgcagagcccgagattctctgcgaatgaagaactattctggctttgaatctgagtgccttgtggaattggaccttcaagcatgttgtaggagaagttcatttgtgctagaaacgtgagtttcccgagctctggtgggatttcaccggataatctgtttttagaaagatccaatgattcgagatcagtcaaattcaaccgttgtttgacatattgagcacaatcagttctttaagtaaaccgattgactcgggaatacgtccttcgaatctgtttccggagacatcgatggttttgtaaatcgtgaaaacactcccaaccaactctattatcgatcctttgaccgtcatagtcactgagttataatagtttcctgagtcacgtccagcatacctactcggcataatatctacgatgtctacggctgatgacattgcactccaacccgcaaagaaatctgatcgaaggactccattgaagcggttttccgaaatgtcaaagattcgcagcttggggaagctcaaagaatctccaagagaagatattggaccatgaaactcgttagaacgaaggacaaaaatctgaagtttgggcaacattctcaaccagaatggaaacttgtcattgattatgttgtcttccacgttcagaaactcgagacgagtgcagttgatcaaagacttgggaagttctcctgataaccggttgcgaccaacgtcaagtgatctcaagtgatcactgatagattcctctggaaactcaccggataagttgttattccgaagatgcaaaaccgaaagagtagtattaaacttctcgaaacaccgaggaatggagccgttgaagttgttgttggataaaacaagtgtatcaagagaaaccaatttgcatatagtcttaggaatctctcccgaaaaccgattatcagagcctaaaaagatcgttgtcgagtttggtaacaaaggaaacggatcttggaatgtgtttgaacttatgtcaagcataagtaattctccacatctttgaataacatctgctggtccttcaaagccactgaaagaattttgagaaatgttaacatactgcaactccggtagactccacaaccattgtggtacttggcctccaattttattggcagagatgtctaaataatacaaagtggtttggttttctagaaaattggggaactcaggaatattgcaagatgataaaatcaaggtgcccatgggtgagggaagacttagagttgaactgatcttcaaattaatcccggaaagatccaaataaccaagtgacaagagaggtgagaatatacttatgtcaaccatgcttcttgtattaatataagagaggtcaaggaacgtaagtgacttgagatgcaagaaagtgttgaaatcgaccatgcctctctttgtgttccataaagagaggtcaagataaaagagaccaactagtttcgatatagactccgggattggcccattgaaattgttttctagaagggacaaaactccaagattagatggtgaagagatattaccaaagtcaagaggaccgttgaagtcgtttcttcccaaaacaagagaggtcaatgaaggtagcatgaagagagacgatgggatagatccggaaaatgaatttctatcaatcccaaaatacaccaatttagagaggctactcatattagatgggagcatacctccgaactggttagaaccaaggtcgatcaacgtaagctcgctcaaattgagtagcatactaggaaagttcccactgagcttggccgatccaagatgcaactctgttagcttgtttaaatgtcccatcgaatccggtagctccccggtgaaatcattaacagaaagatcaagattagtgagataagtaagatttccaagtgaagaaggaatctttccaaagagattacaatcaccaagactcaaaaccctcaaatatttgaggctgcctatggaatccggtagaatacccgaaaaattattcgagccaagatccagattatgaagatgttgtagtctaaacaagctactatcatatctcaaaggaccattaagaaaactgttcatgaggtctaactctaccaccttacccgttttaggatcacaagagataccatcccaagaacagcaatcggtgttgttcctccacttctctgtcttcttaacaccaacaatcccattggagttgaactcatggacataaaactcgttcttaaactccaaaagagcattcttctggtcttgacgacataagtgcttaacatgagaagccaaaaccagttttgaattagaaagggacaagattaaacacaagctccatattgtcatcttcatctgacctcaacaatgcaataaactttttttctttgattttttttttctcagaaagtgaaatgaatgatgttcaatgtttataagtgatggctctagtaatagacccaaagactgtcttacattttgtggaaaaaagaaaaagcttgacttaacaagtctcttgtaaaaaaaatggcgtcatcttccacaaagatatatgaatttccaaatgaacgctccacaaagtcaattatgtctcctcttgcataaaagtattaaccctaaaaataattcaattacttgcggtgtggggttaccgcagtacaaaaagtagagcgtgtggggttacctcagctgtgtggtgagtgctacgcaattgcgcaaacgctctttaacggggcacgctcgtgactcgtgagagagtcagtcacacaccgtaaaagttaccgataaactctcaaaaagtcttttttggctttgccaaatttctaaaattcaatcaacattttctttcttcttttcgtttacatttttgtattaaaaaaaaaactctaatgggctcgtggaggtagctgaagcccaaaatatgggataagggctataaggattgtcgatcatatcttcttgcgccgtcaaaaagcttccagtcgcaaacgatgacaactttccattaaactaaaatgacataaatacccttcaaaatccacatattactctcaactgtttcatctacctccctccctctctccccattcccaaactacacattacacattaccaattctcatattaaaatccacaaaactcaaatccccaaaataaacaaaccctaaaattcaaaacaatgaaatgttacaaaagctcatcaattctctcaaccaatcaccacccattcttctacaaacaacaaccaatctcctctcttcaaccaacttcaatcccaacaactatctcttacccaacccgaacccgattctcctccacccggatccaatctcgattaacccacgacgatccagtaaaacaatcggaagacttatccttctacgatcttctcggcgtcaccgaatcagtcacactcccagaaatcaaacaagcttataaacaactagctcgaaaatatcaccccgatgtttctcctccggatcgtgtcgaagaatacacagatcggtttattcgtgttcaagaagcttacgaaactctctccgatcctcgccggagagttttatatgaccgtgatttgtctatggggttttctttttctttctccggtcgacgccagaaccgttacgatcaggtaattaattattaaatttaatttttttgcgataaccgaagtttttgttaggagagaaaaaatcagcaccatttgtttgggtttattatggttaagaaaatttaagagttagcaataattttagtgtatgtgttattgataaatttatcaagtgatgttgatgttattgatttggatatttttggttcatatgtggacaaatagtgtgtagtattatcctcaaaaattctatttttattctttttatttttcgaatttctagatttactcggtagattcaagaacctttatggtgtcgacagaattgaccttatctttaacatggtccaataaattgacccatgtgtcgattattaggtgacaaattagcagtggaatagagaataatgaactcattgatcctatttgctacaatcatgggtcttcttataattgatttgggttttggtgattgttgtgattgtaggaagtggtggaagagaagagtgagtggaaagcaaaatggcaaactcagctctcagggttaaggagaagaagcaatcagaaagataataacacgatgtcttgggctgcaagaatgcgtcgtcaacaacaagaatcttcttaacatacgacatcgagtctttagccttgttatgtatagtcttttaattgtttgtgtgtaatatagaaagcatagcatcaataccccagcaactttgtatatatgtaatgtatatactcttctatgtgcttatgccaatcggcggaagcacattactttagataaataccctgattactaaataagctttctttggttgtgcgttttatgttttgtgttttacgttttgagtggagaacgggattctaggtgtggcagcaacgtttgtaatggttattgagtgataattctgtttaaatacggcggttaaaagcttttttaagtggctctggagaaagtggttaaaagcggcaggagatggcagtatagcggttcaaaattatatacgattggtaatatttgtaggcaatgtggtgactgatgataataggtatacagtaatgaatatgagcaaaaactattgaacaaaatgaaaatatgaatcaccttaaactagaggtaattgttgataaactttttaagggtttcaatggtgatcttattatattttaggaaatattttaaaatatatgaaaataacaaaaatctaatcatattaaaataaacggttgtaaatgctctatttttataaccgtcatgtttcttttattcaccaccacttattttatccgtccgttacaactaattatttcatccgtccatcagactcttaaccaacgaggtagccttaatatatgtaactaatcaacttttaaagatgattgcttccaacaaattgcttaaggatttgacttgtgaccttgtttaatcaataaagattttctagattttgtggagaagagtataagaataatgtgaaaaattatggttaaaaatagtgttatgattaaaatagtgttataaaccaaacattgagtataatattttaccataaataaaattaacataaccaaaccaaactacacaaaacagataaacattgtaagccaaaattttgaaatatatgaaaattacataactccaaccgttttaaagtaaacggttacaagcactcttttccatacgtttcataaccgtcttgtgtcatctactcacatgttcgccactccaactatctatttcatccgtccatcggactcataaccaacaaggtagctgaacattcaataaccttaatttatgtaaccaatcaaattctaaaagtgattgctttcaaccacacttcttctaatcactttctccaaccacacttcttcatggtacctccctaaatggttttactcaaactgacaccaatcaaaccaccatgacagatacgaaaacaaatacttatatcagttatttaattttacaacaacgttacaaattacaatccaacaaaaacataaacatacataaaaccaacggaaactttactttttttttttttttttgcgaaactttacttgttttaaaacgataacataacacttcatcacttcacgtttacacttattatttgccgtttgatttctcatggcgcgatcaaaccaaacttcttaaattccaattttaccctctccatctcttcctccggcaacgtaaccgtcacaaccctctcctccgatttcgccgccgcgtaaacaaccaccaatccctcctcccctatcccctccacattacaataaaccgactccggcgacttccccatcactttcgcctcatacaaatcctcaccagtcagatccagaaacgtcaatttcgctccataaacaacaaaatccaaattcccatcgcaactctctccgatctcctcaattccacatctctcatccttcgcttcccccatagctttcactaattcctccaccgtcgcttccgccaccggaaaatccacgctcactgagctgatcacctgactgtttcgaatcgcattaagtttcagatcgttcggatcttttttaatgatcgtaaccgttacaggctttggctctaccctaactttagctatgcatttccatatgattccggcgagaatctcgaacaccggaatcgagtcatctcccttcgccggaaaatgtggtgatatctgatcggcgactgagagattgaaacagtaattcgccaatttcttgtcgtttggagtgacccagagatctccaacgggttcgacccgtttaattgaaaccggatctttaaccgtcgggtttgggctttggaaccttctctctcctatagagggtgttgttggggcataaatcttttctccggtaatggccttagcccataagttgaaggcatagaacagagagaatgcgtctcctattatattggcccagcttaggcccaaccctaatcctccgcatttaaaccgggtcatctgcggaaacaaatccgatattaaaagcagttttaaacaaattttgcaaaccgacaaaaaccctttctaagattgcaatccgagtaattgaaattgattaaactgccaaaatatattaaaaatatattttccaacttggttttttttaagataactaagagattataggcatatatatatatgccggtacatcactctgaagccgaagattagaacatttagcatagttccctagtgtcaccgtttgagatactttactagttactctattgagtattgacacatcacttttttaacttccacattttatatttttttcttgtttttttggatctgcatattgggatgtcactgatccatttggtaagatatttcaaacttgggtccaacaaatctgtcccaatctagttcgcaatacaacattgaaaagtccgaatgttttattaaattttggtacacctactcagaggcagtgtgttttcatgcaagttaatcgtacgaacaggatctttcgtgtattaaattttgatgtgactgaacatgcattaaatgtttaatatgttctttgtctttcttgattagggcatatggttcgaaagacaagtgaaacccaatatagatttctaacctagtttagctaataatttgccttttttccgactctataaatcagaccccatcaacatggtgtgtccttttttctgtcaaatatatattaaagattgaataattctctttttggtacagggttcaagattgaataatgcataccaataccatatcatgtatatataaccatttttagaacttttgtatattcaaatttgtctcagtaccaatattaaatttgtgtatgatatttagacagtgagcaatattatgcatgtgtgaactatataaggaatatagcaaactaaattaagaagataaaattggtgtagtcagattatacctgaacgtagatcaaaggagagaacgtcaattccggtccaataggatgatgataaaccagaaactcatcaactgaccggtccggtttactgagccactcctccacagtgagattgcattgaccttccacgaaacgtgtgccgcagtcgttgcacttgatgtacggacggcccgagtctctccttgagaacctgcctgtggtccaagcgatctggtcgaacaacatgaacatggcctccttcaggtgtctcacggttaagtcacgtgctgtctcggctgagtaaatgtatgccgccttgaggtagtggagcttcatggctaggtctaaaccggttggttcgtgggtcgtacccgtctctgtcggccgggtcgcacctacggtagatagccgaatgctgtgaaccggaccctgtccctgtccctgttcttgagatcgacccatgatggctcagtggagttaaactgattctttgaactaacaagtcgatcgatgtatgtaacactttaacaaaaaaaaagcaaatttaataacataaaattatatgaacctttgcttggacatttatctctctctctctctctctctgctttgtaggtgatgaatgaaatgtgatgaggctcttgtgttaaatagagaagattgatggtgttaacttgttaattatacgagtaggtgaaagagttttaattaatagcctttctttttccccgataaggtccatgaccaaaggatccaattcatcgttcagatacttttaatatttgtcacctactatttttttatgtctatttctgcatttaaaatagaagtgcaatacaaaaagaatagaatctatcaatatataatttacgtaaattatacattaattagttttctgaatggttgatatactgtatatttatcttgtgattaacttatacttatattttggatttgatattttgggattaataaatagatcgtatttttacgtttgattaaaatcttttgtttttgttgtatgtagatgacgatgattaagatgtcgtgttagtcggtgataggattgtcgtccggtaatccggttaatggtaactatttaagaatattagattctgattatggtattgggaacgaggatgattccattgaccctccaacaaactttaacaaaaaaatcctccaattaacaaaaatgtcgacattgaaatgtggaacaaacaatgacgtggatgtcaagttaaaagcaaaccagacacgttggttctacgggtcaaattattgtaagaaaactattgttctaggttcaatatacggtactgatagagaatatatctagttaccctgttcaagttaattattcccctacatttacaagtttcaattacggatgactatttgttgcctgattgatagaacaagttccaaaacaaagtttgcaagacaactcggccaaacaagccagaaacatacacgaaaacagaaagcaaacaaaacaattacacgtacgtatgacggaagatgggttctcaaaataaaattaaaaatagtacttgaaccaacatgtgatttcattctcaaatcattaactacactttgagctataataaaagttatcttgttagtagatggataatcaagttcagtaagctagctaactaatgtagatttacccaataattaaacaaatattttcgaagattagctaaattttcttaaacaatagacgtttgtaatgatttcatttgtttctacttctagtaaaaagagtgacacctttatataatttcaaggactagaatattggttggctgataatcgcatttaatgcattttctattcaattcaacagcagatttaaatttttgtaaatatatgaaccaattcacaacttcttacagctatatttatccaagaaaaacagttgatggtcaactcttattttacgtggcaatgtggcatgcagttggaaaagttggttttaatcataattcttgatgaatttttcgtaaatcctttctttttttttatggaagaagaaagttttaaacataattttcaataataactataaacttacgagaggaaaaggttgaacgtatttttattgatgtacttctgaatgtactgtcttcttaagtagatatattccaaattaatatattagtatagtataatactgatttacttctttttttcttttcctaattagagggtttgaatataactctaaggtataattaagtagggcttggtctatgcattttacactgaaacgagagttattagttgtatcttgcgtgaaatgtggttgaataaataaaagagttaaaagaacagttgaaatttggcaatataattacttcagtgaacatctgcagtggggcatttgtctctgccaatattttcgagcactgtttatatcatttattctctgactgttttttcttctgtaaatttatgaaattcttttaattgtatcatattatcatcatgtctattaattaaaactctaaaaactggccaccgtaattaaaagcaaatcagccagccaaatcctaacaataggcgccaatcaaagccttttaaagaaaatgcatgtaattttaaaacacgaaaaatacataaacgtaaaacttactttgaagtctgaacggataaatttgatcgatatataagatgacgcttactatatatgttttcggatacgtgacaccacttcgaaataattggagctaagttactcgatgaaagataattgttaatttgtccatgagagaacttgttctagatcatatgtcgattgatggatggtgcatactccaaaggcagtaaggcactaaggattgattgttgaaagttattccaagataatgaataagcaaagatgccaacggcgatctttcaaaagtcacagagttgtaattattttctatgtaaatattttggaggaaacacgcatttggtgatcttggatggttgatgaagatccggattcaattcaacttggactcttggacgacctttgcatgagtttttttatctgaagtgagcttgcggaaaactcatatggggtctacttacctccagattagttatcgggcttgacacggaaactagtaccatagaaaatatatatgcacttaacataacagaaaaaaaaaaaaaaaaacataacaaaacaaccattggtaaagtatgtgattttaagctaaggcaataattcaaatgtgttagtcatctcaacttattattttatcctattccttaactgaaaaaataataatcttatatagtatagtactttttcataatctataatattacattgttgttggtctctagtaatttatattcgatagactatccacacaaaaaaaagagtagttaatcatctcaaacattttaatatgttttgtcgccactttaaaatttgattatttccatcaacatcaatattttcaattgtacaaaatgaatcagagctttgataataatactattaggatggtttatgagataaaacagtattgaaatttaaattagcaacgatagaaaacggacacaacaacaaatcatgaattatttttcacaacaatttatttattgctaccgtaagaaattgtttgaagtaaacctcagaattaatccatgaccaaacatcaaaaaccaaaatgttaaaattcagaaatagaaaggattggtcgactttcactatctttcttcttcttcgcttgtgttactttgggatgatcttccagtattccataaacacttatttatttaaacgaatgaaaaataccattttagattctcccaagcaaactaaaccaaagctattaccaaactaatttaaaccagaacaaaccagctatatattctctaatagaaaccctatgcagtttcaaagttttttttttttccttttgtgtagctttcatgtagcaaggttaatgtttactagtcatgaattgaaatgagtattgagaataaagaaatatatcaagaaataattatatagaaactgaaaaggatgtaacatatatataaagagatgccacatgaattgaaattggtggaacattaatctataaccgtgaataaggttgctatattcaagacattaaaaatcaatcaggaccactacacatggatgttaagacgaacttaagaagattgtgactatatttgagttttacatgaatatatacaacgatccatcattttttcagaagcagttagcaaaaatgaaaataaattcatcactaactagaaaaacaataatgatatatatataattattgccacaaacatttcgtagacgattttaactgttagaggatgcataatctttttcttcctaacatgttatttctatgtgaacacaagtctataggttgggagagttgagaaaatttaagtttttaggtttatcaaacaaaaaaacgatcaacttatgattttgagcaaacaataacaagtacgaaagatttttgttaggaagcagattgaaaacttttattatcatgttcaatattaaaatcataaggtaacctatatgttaaaaataaaaatttagtcttagtgaattatatctcactacttattacgaaattcataaaatgtagtctagttttagtgaatcatacaattttgtttgtttttgtttctgaaaattcatttcttttcaatgaatggcccatcaacgacaattatccgtttaacatggattttgaagcccagcaatcaatatgggtttccaagcccaatacaaaaagtcttatttttagcaatataaatcagataaaatagggcgaggaaaactaaaataccaaattggataaatcagaaaaaaactagttcctctacgccgactacatcgtacactcaaaaagattggtaccacaagaactgatttacacagactctgctacgtgtacaactattttaccctttagtacacagtaaaaatatacacgtacacacaccagattaaattatttagcgagaaaaaaaatcctgaaaagaaaatgagatattttttagtgagctttgtatataaagccccttaaaccctactccttggcttcattctacatttcctctgcctctttctcagatcacaaaaccctaatttcgaatctttattcttcaggtaccatttcttcaccatcttcgatctcctaagctttactatgtttctgttttgtttaatttcatggtgaattcgtttctagtgtgtctctgttttgtgttctcgtttcaatttgactgtaagggatttagagcttaaaattactcttatgtatactttgaatatagatctacttgttttggatcagcccatctcgttgaattgatgatttagtcttaaagttagggtttttattagtattgatttataacagttgatctgatctgattctgtgtgtttttggaactttgtagaatggctttctgtaacaaactcggtggtctattgagacagaacatttcttctaacggaaatgttccggttacgtctatgctcggatctctccggttgatgtctaccaagcttttcatcggaggtaaaatcttattgtttttgagtcagattgaagagttacttcactttagtgttgcttgaattagtactgagacttttttatatattgattgctttaggtctctcatggggaaccgatgacgcatccttaagggatgcttttgctcacttcggtgacgttgttgatggtaagctacacttgtttttggtataattgagtaagagtttgtggagatgaactaaagttttgttttttgaaaaattgtgcagctaaagttatcgttgatagagagacaggaagatcaagggggtttggatttgtcaacttcaatgatgagggtgctgcaactgctgccatatcagagatggacggaaaggtttgtattgaatgtatcagttagtttatagctgtaatggtaattgtatctgtttaatggtttacttaataatgtttatgggttttggaatttcaggaactgaatggtcgtcacatccgagtgaatcctgctaatgatagaccaagtgctccacgggcttatggaggtggtggtggatacagtggtggaggtggaggctacggaggaggtggtggtgggtacggaggaggaggtggtggctatggaggaggtggtgatggtggtggtggtttctaaacagaggaggtgcttgtgaagaagaagagttaatggttctgtttagttggtttcttctattgaatcttatgttagtacaaaacctgaatgggatttgctgaaaactctttactctttttttggttaccaatcaattcggtttaatattttattgcccccattaggtgcattctaatacgtcttaccatttctttcattcacttgtgcttatataccatttcactcctgtcctatacataacttcgattcaagtttcatcttttgtgtcgtgattcacgtttaaaccatttgaggtggaaaacttttatacaaagtcaaagccgatacacatcatgaaagcagagagcgacaacatttgattcgctattaatgattctataattccacatgatttattcgctatattaaaatactatcgtccacctaaacttgttttccatggctccattctctattcctccaaaactcctaattttgtgtctacttaaacctaactttgacatacatctgtctttgttcaagatcagcttaaaacatggctaccagggtttacgtcggaagtaattatttctttcttttagtagatgttcatttttcaaatttgttttctcaagttttatttatttatttgaaagctttgttacgattgcttcagatctctcaccgaccactaccgatgatatgttgagggaagccttttccggctacggaaacgtagtagatggtaaaagccttttggatcgccctccaattaatatttccgagtttcttgtttatgttgttgagtgtggtttaagtttctcagttgtcactacaccaaaattattattgtttgtgcagcaattgtaatgagagacagatacacagataggtccaggggttttggatttgtcacatacagcagtcactccgaagctgaagcagccgtgtctgggatggatggaaaggtttggatggctctatttgtggtataatagttgtgtgtctgtctatatgtggtcagacttagtattgctttcgttttaaatttccaggaactgaatggtcgtagagtgagcgtgaaactctttggtattggtgatattgatgatgaatgacgatgatggtgctgacttgaaaggtggaacacatctctatccaaaaataaaaaaacattcttgtaatgtattgtgtgctttcatgtgtttgcagtgtctgtttttgtctcctttcaagggtttgtttccaggtctgctttgatttgattcccgtgtatgatgacttaataaagacgtttccttatcctttatcaaatctttacatctgtattcaaagttagaatcaacgatctaagaagaagagcttaccatgaacccactagtttctggacggttaaagggaccagaactagatacaatattcacaagaattgcatctacttgactagattaggtgtatcatatcatttgatgctaactcttggggttataggctaacctttaagcttcctccttcacgttatgagccactgacagcatcaggaaggtccttaagaacctaagcaaatgtaataatgttctccattagcttcttactcaccgaagataacctccaggttttcgacaagtaacagtattataattagaacgatgtgagatttttgcttcaaggtcgttgagtgtgagaagatggtttttcgttgttgttaccttgtaaagatgccatgaagcataagcatccgttgctgcgtattgtaactgctgctttgacagaggataaaactcccagttcccaagcctgattctgtttggcttcaggagctgcaaagtaacagtcagattttcaaagcgaaatagatcaatattctcacttttgatacagcagaacagaagagagttgtactgctatttctaggaagactggaaatatgataaatccagttctcactactgttatcaaaacttaaatcaagcttttgaaatcaaccagacaaggtgaataacagatacctctttgcaaacaagtgtctcagttagtgaggcaaggccccattttttatctccaccaattttttggttggctaaatctgaaagatcctcaacatctttgatactaactccatagtcatggaaaagcttcacagagtcaccatcaattccaatacctacctatatatatgtatcagaactacgttaattgagcatccatggcaaacaacaagaacttcgaccacttcaaaaaaaaaaataacaaacctttacaagtgttgaatcttcaataagatgttggagactttgagggataccagaatgaaaaatatgcataacatcacaataattactatctacacatatctggacagtcgcaaccttccccgggagaacacctgaaaataacacaaagtttcacaaaatattattagttaagatcacaaaaacctcacaaaggttcatgaatgtgtcaaaaagcattatcaagcaactatcattacaacacatatgagtagactagtctaagagatattattagtagaacaaagcttgcagcaatgagattctagactacacaaaactgcaatagtaggcatctacactttcctccgaacattcagaaaggaaacaacgaccataaagctctattcgatataaagcaagagcatcatcattctatcatcaagatatataaagagaaattagaaaagacaacatatgatccatagagataaaatacagttcgagatgcatatcacattgcatactttaagaaatgcaatcgaaaaagacaaaacttgcaatcagacacaaaacggaaaacagaagggttaacaaaagcaccttttctaaaacttggtctccactcaatatccaagccaacaaaagctattccagattcatctctcttggtatcaagaactttaataagctgcattgctcgcttatcaacctcagtagcagtcttgctatacaaaatcctaccaccaaacctcattgctggaaaattcctagctgcaacaaagtatacacattattaagttgctccgcccacataattcaaacaacacactattacgaaaaaaatcttaatcctataaattacggcatgaacagattaatacattgtaaagaacttggaattcgaatcaaatggtgagacaactaatgaattgacattttcaaagcaaaaagaagttgaaattggaaaatagaacagaaagatctctgggatttgaagaagtttcatacctcggcaacgggagagaggaaatcgtttataagatgtagaagaagtgatggaacgaggcaattggcgacggatattattggggatttgatttggatcctcctcgtggccatggacggaggttgtagcttgtacggtcggagcagcagaggaagaagaagaagaagaacgggagaaattgtaggaagcttcgatggcgtcgatagcgagaagctcttcctctgtaaaagcgtcgtcgatccaatttgacgatgacatttcttttactgaaacaaaaaaataaaaattaatgctttggacgagtctcgtcggcccctttaaatgtttgtattgtttgtttttaattttaaacgttcccacactgtacaatatagttgtgtgttttaaattgcccgagacacgctttatacaatttttgtatgattttgattattcatcacgtaaccataacctttgcttcacattagaattgtcccatgttagggatattggcataacgatgtatcagatcatgtcgatgagaaaccaaattcaatctttcagaaacttaaacccatcccatacaaacaaccacacttttgttgacaaatggagcaaccaattcctcttattttcattcaacagtagacactctttcattttcaacaaaaaaacactcctttgactaagtagaaactgtcgatggccacacgcgaaaaatgatgatgaattcttataacactcctccacagatgtagtaagtgtcatccaaggatctagcaattaagagtcagatattcaattttctgtggaagcaattatccttcccaggagacttgtcaagtcaagcaacgatcaattcgtttcacagaagaaataaaacaaggatgcattcttgtagtgagaggaggatgatgacagtaatatggagcttgtgtttaatcttctgcctctctaactcaatacttgccattgctaaagacttgtgtcttcccgaccagagggatgctcttttagagttcaaaaacgagttctacgtccaagagttcgatccccatatgaagtgtgaaaaggcaacagagacgtggaggaacaagactgattgctgttcttggaatcgtgtctcttgtgatcctaagacaggcaaggtcgtcgagttagatctcatgagcagttgtctcaatggccctttgagatctaatagtagcctgtttagactacaacatctccagagcttagaacttagctccaataatatttccggtatcctaccagattccatcggcaacctcaaatatttgaggtctttaagttttcgtacttgccatctctttggaaagattccatcttcactcggaagtctttcttatctcactcatcttgatctttcttataacgatttcaccagtgaaggaccagattcgggtggcaacctaaaccgacttacagatttgcaacttgtgctactcaacttgagctcggtcacctggatcgaccttggttctaaccagttgaaaggtatgctcccatctaacatgagtagcctctccaaactggtgtcttttgatattagtgaaaattcattttctggatccattccctcttctctcttcatgatcccttcgttgagtacttgacttgcgaagaaaagacttcagcggtcctcttgagattgggaatatctcttcacattccgaacttggatacttgtacatgggagaaaacaatttcaatggaccaattccgggatctttatcaaaactagtcgggctcagggatcttagcctctctttctggaacacaggaaggggcattgttgatttcagcatcttcttgcatctcaagtcactttgttcacttgacctctcctatctgaatacaagaagcatggttgatttgagttttttttcacatctcatgtcacttgatgagctggatctttcagggattaatttgaagatcagttcaactctcagctttccctcagccacgggcaccttgattttagcatcctgcaatattgttgagttccccaagtttctagaaaaccaaaccagtttgttttatctagacatctctgcaaatcacattgaaggccaagtaccggagtggttgtggagactgccaacgttgtcgtttgtaaacattgctcagaattccttcagtggagaactacctatgttaccaaactctatctatagctttatagcctctgataatcagttttcgggagagattcctagaacagtatgcgaattggttagtcttaatacacttgttttatctaacaacaaattcagcggttctattccccggtgttttgagaatttcaaaactatttcaatcttgcatcttcggaataacagcctctcgggtgtttttccaaaggaaattatcagtgaaaccttgacatcacttgatgttggtcacaattggctatcaggacaacttcccaagtctctgatcaaatgcactgacctcgagtttctgaacgtggaagataacagaatcaatgacaaatttccattttggttgagatcgttgtccaatctacagattcttgtccttcgttctaatgagttctatgggccaatattttctcttgaagattctttgagtttccccaagttgcgaatctttgatatttcggaaaatcacttcactggagtcttgccatcagattactttgcaggttggagtgcaatgtcatcagtcgtagacatttttgatactacgcctcaggttcacattttaggagttttccagggatactatcataactctgtggttctgacgaacaaaggattaaatatggagctggttgggagtggtttcacaatctacaaaaccattgatgtctccggaaacagactcgaaggagatattccagaatcgattggtatactcaaggaactgattgtgctcaacatgtcaaacaacgctttcacaggccatattccaccatctctatcaaacttgagcaatctccaatcattggatctatctcaaaacagattatccggcagtatcccgccagagctcgggaaacttacgtttctggagtggatgaacttctcgtacaacaggcttgaaggtccaataccacaagccactcagattcaaagccagaatagttcttctttcgcagagaatcccgggctttgcggtgctcctttcctaaacaaatgtggtggagaagaagaagaagaagaagaagcaacaaagcaagaagaagatgaagatgaagaaaaggaagagaaaaatcaagtatttagctggatagcagctgcaataggatatgtacctggtgtgttctgtggactcaccatcgcccacattctcacttcataggctaagagttgcttattttttcttctccgtcaagccgataaaatgaaaagtaagtatcttatttagagaatctgtatttttgttgagttaattttatctttatatattttgtattgctgaacttaccatgaagcacactagtttctggaagattaaatggaccgcaactaaatactgtgttcaatatctttgtaaatcccataagaattgcatctacttgactagattaggtgtatcatatcatttgatgctaactcttggggttataggctaacctttaagcttcctcctttacgttatgagccactgacagcatcaggaaggtccttaagaacctaaccaaatgtaacaatggtcgccattagcttctaactcaccgaagataagctccaggttttcgacaagttacaagtagtataatttgaacgacgtgtgacttttgtttcaagatagttaagtataagaagctggtttttcttagttgttacctggtgaagatgccatgaagcataagcatccgttgctgcgtattgtaactgctgctttgatagaggatgaacctcccagttcccaagcctgattctgtttggcttcaagagctgcaaagtaacagacaaattttcaaagcgaaatagaatcaagattcccacttttgaaacagcagagcagaatagtgttgtactgctatttctaggaagactggaaatatgataaatccagttctcactactgttatcaaaacttaaatcaagcttttgaaatcaaccagacaaggtgaataacagatacctctttgcaaacaagtgtctcagttagtgaggcaaggccccattttttatctccaccaattttttggttggctaaatctgaaagatcctcaacatctttgatttgatactaactccatagtcatggaaaagcttcacagagtcaccatcaattccaatacctacctatatatatgtatcagaactatgttaattgatcacaacaaaaactttgacaacttcataaaatataaacaaacctttacaagtgttgaatcctcaataagatgttggagtctacacatatctggacagttgcaaccttccccaggagaacacctaaacaactcccaagagcagcctataagagctcggtatgtcttgacatcaagtactaaagcccgaatcaatcaccgttctaaaaaccctaaactcatcatcttctaccaaacccatatcgaaaacaacaagatatatcccaattacattcatcactagcataaaccaaaactctgaacacatcttcttcttccttagatgtcgaatcaatcaactcacacagaaattgcatagctaaagtaaacttcttggacgaaggaagaatgtgaagcaacaaacagtagttaccaacatcgcggaacggtcgaagaagaagaaacgagcttcttcataaattgagcgaaaacaggaacagagaaagagacagaggcttcaagttaaggaataaagtatttgtcccacatcggttcttcgaacatccggttaaggctttccaacattcgggtggctctaaccaatttgttttgggcttttttagcctatttgtttactctattgggccaatttccaactcgattttcttatttgtatatctcagtatgaggtatattgatccacatttttgaatttagcataacgaaaacctaaatttatttattttaatttattttatgaaccctatcggttgatcggtcagttttggtaaaaggcaccgaagtgtttcagaatggacttctcctcgaaggaccaccacactatatttcccgagtttgaaatgctttccgactaatgtcagggagacaaactctactccaactaatggcagaaagtactcaggccgtctgtatttctaactatcagataaaccaattggaccaaggtccaactgacagactttccaaacgaaaatgatttttgttttcaaggaggatcgtattcggatatgagagtttcacccttgatcaccaaaacttcttctaccactagaccacaaatgcttgggcaacctcaattttattgttggcaacaactaaaaaatcaaaacatttgtatagcttataatgactgattttaagctcttcagttgtatccattacctgaatcaattaatacacaaaaacacaatatagtttatattagcatatatattgtgtgaatatttttgaagacaaaccctataaggcactaacatcatcgacagttattttagtcttcacaaccatactcagcaactttaccatcaatttgggagtctataggttttctaaactccacgggggcaccacgtactccgctctgaacagattcattatgatacaccaaagaactgatcacgccgtgtatacttaccaaaccaagtgcatgatgatttcactcttatacgtaggcttgaaatgaataagtatggattaccaaaccaatgctccgggattcctctaattaattacaatttcttttcaaaccattcttttgaagatcataatcgagaatgtaacacatatttctatccgaaacgtacaactaaaaaaacagagaggttatcttggcattttatgccttccaccaatttgacgacaacaaacgcagaatctcgtagggcctcttggatagaccgaattactaaatcgaaccgagaaagaaatattcgaattaaacccgaatcaaatgttagtttagttattcaacttaaaatgagtttttttaatataaaaaaagacagtaaaacttaaaatggtttattgcacttttaacatatccaaaatataaaatttgaatccacagaccagaaaatttctaagctacaaataatttttaaaatttaagatatatacgattacaaaacgaatcctaactgaaatcatgtggttatactgaaaccttaaccgtattaatccgaataatacgagtcaacccagaaactatatcagaagcgactaaaataaaaaaaatgccccaattcaataaaaaaaataatgtacattaataaaacaaaaaatttgctataaaacattttccttccatttttgtccacaagataattagccaaactttcaaaatcaacgtttctaataattctctttcgatagataagctagccaagtcactcaagacttgaaacacttctttcaacaaatcaatgtggccaaatcaatggattgttgaagctcaatatttacttcgtattaacacattattttcaccataagtctcatataaatatatttctatctctattaagagtaaatatatggccctaaatgttttcccaaaatttgatgccctatttggttttctccattgtggcacggctctgtatttattcgttaaatatagtaaatttgctgttactattaagaaatccaacgaaataaaatagtcaagaagaaaaaataactgaagcttattagttttttattgtttgcttgcttaacatacaaaaacacaaataacagaagattactattgggtagagagtgagagatctctaatcgttccttgactcagagatgaaaaatccaggcatatcaaaatcgtacgtgaactcctcaacgtcagcctttatctcatcgatctccttgttgttcaccaaacccttgttgaagtccttcatcaccttaccgtactgctcctggatgtccaacgtgattgtcacggcacggtgcaggaactctcctatcttctcaaagtccttctccaccaatcctctcgatgtcatcgccggtgtaccttcaaaatttatagagattcaaacaatgaaattcagttggtcgttgttaagaacaattcacaactccctcataccgattcttacacctccgggagcaagaaaactagtgtctccgaataccgcattcctgttcaaagtaatgtagcacaattcacaaaccttctcaaccttgttacctagcagaagcagaaacagaatttaacatcaggaaattagttcagtataaaatatggtctcaaaggttagtgattattcacttaccggtcaatccaagagggcgaagatcccaaagaataaggtggttatcagttccatcggttacaagagtatatcccttatttattaggtagcttgcaaggcaagcagcattagctttcacctgttttgcataaactttgaagctaggagccataacctgcttcaacgcaacagctagagcaccaatcttgttattgtgaggaccactttgaagcgcagggaataccgcagagttgatttttgcgtcgaaatcgtagacttcaccctcgggttggcccttcttggctggttttggtccctttctataaaagatcataccagcccttggacctctcaagctcttgtgagttgacgttgtcacaacgtcacagtactcgaacgggtctgcggcttcctgagcagcaacgagggcactgttatgagccatatcacagagcaaaaaagctccaaccttgtcggcgacagccctgaatctcgcgtaatcccattccctagggtaagaagtgcctccacagataattaacttaggcctaaaatccatagctttctcctcaagtttgtcgtaatcaatgtaaccagtcttggaatccaccttgtagggaaggttttcaaagtagatcgaggtcgcggagatgttcttcccaccagagctatagtaaccatgcgttatatgaccacctgatggcaaatcaagccccatgatacgatcatgaggctggagcaaggcggtgtaggctgcgaaattcgcaggggaaccagagtaaggctgaacgttaacgccccatttctctggattgcaatggaaggcttcgagagagcgtgagcggcagagactctctatctcatcgatgaactcggtacctccgtagtaacgattaccaggcataccttccgagtatttgttggttaagcaacttccgagagcttccatgacggccacggaagtgaaattctcggctgctatgagttcgattcctcgacattgacgatgtttctccttctcgattaggtcgtagatctccggatcgacgaagtcaagatgcgtgtttccccaagaatagactggttccatctctaagattgttggaaggatagagagacttttggcgggtctttatataatgtgtgtacccacaaaactaaccatttgacttttctgaatttttagaattaagtatgactttttgatgcctttagcaagttattccaagtcaagtctgtcttttaaacagagcaaaagacataaacatttttgtactccaatgtgttcacctaggaaactaatttagtattgccatgacaactaatagtcatgacaattttattcttaattgcaatttgcaagatatatatagcaattgcccttaagatataccttaacgcaaacattattcatttttaagataaccatatgcactaatagataacgtgttgtattcctttttccccatacttcataactctttaatcattctctgcttgttttagttcagacgtttccctcatacagagtggcatgtcttagttacaagacacaatttatactgattttgtatgattgataattctttaactatctttgatacattactctaccattttcgtatgattattgtcttcgttaaaaggttgagtatttaatagaaacggcatatttataatttatgtatgcttagtcagaaccacgtctatgggacttgaatatgctatgttctcatgataagagatttttatattgagcaatcttcctttgatcagaaaatatattaagatccattctcactccatctttatgtgtcaaattaagcttgaaatcaatcaatctaaatctgtctgtttaggattcacgttacgtggctaacaagttttacgtaggatttatttcttttatgagatcttgattttgaaaatttgctgaagcggttacgatatgcagcaaccgatagttatgcttttatagcatctttaccactttttacgtgctcacaaggtaacgtttggtatatttgactgcttcagatctctacggacgattgcttgagtatagcctttggattagtcaccaaaagaaattatgttgttcagtgtggtttaagtttctcattaaagaaaagagttttttttttttttttttgtgcagcaatcgtgattagagacaaagacacaggaaggtccagaggttttggattagtcaccttctccagtgaatctgaagcctaatctttcataacagagatgaatgatcaggtttatatgactccatttgtggtagttgttctgtttatatgatgatggctttggttttgagttttcagatgatggatggtcgtaaaactgaaagtgaaatcttgctgtacagaaacatacaatgtagcatttgaaagtgaattgcatcatttaataccattacacagactttctcttgatgtcattatagtctactctaacctttaaccttccttataagcaagggacggtatcagcatatgtagcaatgcttctcaattagattcttactcaccaaagactagcttagggcagccagttccacgtaaaaaatggggtttgtttgtttctattcaagcttttaaaagaggaatagaaccaagattctaaaacaataaaacatgttccgatatttctaggaagagcggaaaatgatcaatccaaagggattgagtgattaacccccaccgtacggtcgagatattgcgtttgtggttttgaataatcaaaggaatcttcagcaattattaacccacaccacacggctggaagaattggcgtttgtggaaattatatagtttttgtggagaaatacctcatattgctgtcttcaaaggagacgtgtaagacaagctttaatctcctccacaaatgtaattaagagtcactccaatcatatagagtcaggtactcgattttctgtggaagcaactagtcttcacaggagactttttaagtcaagctttaatggtttcccacaaattttatatgagacaatccaatcatcaaatcgtttcacgtacagaaaaacagaaacaaaacaaatcaaacaaaaaatatgatgtattcttgtagagagaggaggatgataacagtaaaatggagcttgtgtttaatcttctgcctttcaaactcaatacttgtttttgctaaacacttgtgtcttccagaccagagggattctctttgggggttcaagaacgaattccatgtcccaagcgagaagtggaggaacaacactgattgctgttcttgggatggtgtttcttgtgatcctaagacgggcaatgtcgttgggttagatctagcgggcagtgatctcaatggccctttgagatctaatagcagcctgtttagactacaacatcttcagaagctgtatcttggttgtaatacttcattcggaagtctttcttataatgatggtttgaagggtggtgagctactggattccatcggcaacctcaaatatttgaaggttttgagtcttcgtggttgcaatctctttggaaagattccttcttcactcggaaatctttcttatctcactcatcttgatctttcttttaatgatttcaccggtgtgataccagattcgatgggcaatctcaactatttgagggttttgaatcttggtaaatgcaatttctatggaaaggttccttcttcactcggaaatctttcttatctcgctcaacttgatctttcctataatgatttcacccgtgaaggaccagattcaatggggaaccttaaccgactaaccgatatgcttctcaagttgaactcgctcaccgatatcgaccttggttctaaccagttgaaaggtatgctcccatctaacatgagtagcctctccaaactggagtatttttatattggtggaaattcattttctggatccattccctcttctctcttcatgatcccttcgttggttgaacttgacctgcaaagaaaccacttcagcgctcttgagattgggaatatctcttcacaatctaaacttcaagtattaattcttggaggaaataatttcaatccggacattgttgatttgagtattttctcacctctcttgtcacttggttatttggatgtttcagggattaatttgaagatcagttcaaccgtcagtcttccctcacccatagaatacttggttttatcgtcgtgtaatatttccgagtttcccaaatttctacgtaaccaaaccaagttgtattctttagacatctctgccaatcaaattgaaggccaagtaccggagtggttatggagtctgccagagttgcagtctattaacatctctcataattctttcaatggtttcgaaggaccagcagatgttattcaaggaggtggagaactatatatgcttgacataagttcaaacatattccaggatccatttcctttgttaccagtagactctatgaatttcttgttcagctccaataatcgattttcgggagagattcctaaaacaatatgcgaattggataatcttgtgatgcttgttttgtcaaacaacaacttcagcggttctattcctcggtgttttgagaatttacatctttatgtcttgcatcttcggaataacaacctctctggtatttttccagaggaagctatcagtgatcgcttgcaatcacttgatgttggtcacaatcttttctcaggagaacttcccaaatcattgatcaactgcagtgcactcgagtttctatacgtggaagataaccgaatcagtgacacgtttccatcctggttggaattgttgcccaattttcagattcttgtccttcgttctaacgagttctatgggccaatattttctcctggagattctttgagtttccccaggttgcgaatctttgatatttcggaaaatcgcttcactggagtcttgccatcagattactttgcgccttggagtgcaatgtcgtcagtcgtggatagaataattcagcattttttccagggatactatcataactctgtggttctgacgaacaaaggattaaatatggagctggttgggagtggtttcacaatctacaaaaccattgatgtctccggaaacagactcgaaggagacatccccgagtccatcagtcttctcaaggaactgattgtgctcaacatgtcaaacaacgctttcacaggccatattccaccatctctatcaaacttgagcaatctccaatcattggatctatctcaaaacagattatccggcagtatcccaggagagctcggggaactcacatttctagcgcggatgaacttctcttacaacaggcttgaaggtccaataccacaaaccactcagattcaaacccaggatagttcttctttcacagagaatcctggactctgtggtcttcctctaaaaaaaaactgcggcggaaaagaagaagcaacaaagcaagagcaagatgaggaaaaggaagaagaagaacaagtatttagctggatcgcagctgcaataggctacgtacctggtgttgtgtgtggactcaccatcggccacattctggtttcacacaaacgtgactggttcatgagaattgtttccctctttacttaagtaagcattcaataaactttctcaagacttgtttgaaaatcatattatcaatctacattctacacttatttgaaagataaaatatctccttgtccttttaaattaatgttctaatatcgtcgtaacgaatttggtctgcaacgttttatatgtagaaacaaaaactgtataatagttatagcatgaaactttgattaagaattagtagtggttacagaggattgttgtattacagaggattaattttatgaacaaaacaaaaagaaaccaatacagtagaaccgaaacggtctaaatttaaatgtttgtgtatatgtgtaactctaatgttttgagttgtattataagtgtgttatgcattcgagttagttctattagtttcctataatttcgttacaatactactgtatctctctgtcctcttctcttctttgctttcatttttttttcagattcagttccatcatcacaacaaagaaccctaaatcaatttcacattacgtttcatcaccaagaaaaaaaaacggaaaaaaatcatttattacgtcttctacatttcttgattttgttttggtgtacaaaaatggaagagatgaaaaaggtttgatacgattcgaatattctattgctacttctctagcttccagatattttcttctttttgattttgtttcatttactggtgatttgattttattattgtggacaaggtaacgtataaaaagtgaaatttttgtgggtctttttctttgattcgctaatcttttgagaaacatgagtagcctttccaaactggaggcttttgatatagatggaaattcattttctggaactattccctcttctctcttcatgatcccttcgttggacagacttaacctgggaagaaaccacttcagcggtccacttgagattgggaatatatcttcacaatctaatcttcaaattttatacattggagaaaacaatttcgatggaccaatcccaagatctatatcgaagctagtcgggctctcagaacttagcctttctttctggaacacaaggaggagcatcgttgatttcagcatcttcttgcatctcaagtcactagagtcacttgacctctcctatctgaatacaagaagcatggttgagttcagtcttttctcacctctcatgtcacttggttatttggatctttcggggattagtttgaagttcagttcaactctccatcttccctcctcactcatagaatacttgattttaacgtcctgcaatatttccgagtttcccacgtttctacaaaaccaaaccagtttggagtatttagacatctctgccaatcaaattgaaggccaggtaccagagtggttatggagactaccagagttggggtttgtaaacatttctcagaatttcttcagtggagaagtacctatgttaccaaagtctatcattcattttataggctctgataatcagttttcaggagagattcctagagcaatatgcgaattggatagtcttgatatacttgttttatccaacaacaacttcagcggttctattccaaggtgttttgggaatttaccactttctgtcttgcatctttggaataacagcctctctggtatatttccagaggaatctatcagtgctagcttaagatcacttgatgttggtcacaattggctattgtggatgtcggattcggcccatttcggcccaatccgcattcaatgggcttcgaggtgaattgggcccaattcatagcccagcgtaagcttggccgtttaaagaacgatccgacattaatacagaaacggaaggatcacgacttaaacagcgcattaaagtcccgagttgaagattcgtaacgaacgacattaataacgcgagatccgcggcgtgaagtcagcgagtaatttaatacgtttgatccgatgtattgagtataaatacgagtcgatgacatttgtaaaggggacgaaaaagaatacactaatactatacacaaaattcaaaaacactcattcctcttttcgattcgatcattgtttgtttaacaagactaaagatccccgtaaaaacaaccacaagattctaattgcggattccgacatccacagctatcaggacaacttcccaagtctctgatcaaatgcactgacctcgagtttctgaacgtggaagataacagaatcaatgacaaatttccattttggttgagatcgttgtccaatctacagattcttgtccttcgttctaatgagttctatgggccaatattttctcctggagattctttgagtttccccaagttgcgaatctttgatatttcggaaaatcgcttcactggagtcttgccatcagattactttgttggttggagtgcaatgttatcggtcgtaagcatttatgatagtacacgtgggtatgcggttctaggagctatccgagaagcctaccataaatctgtggttctgacgaacaaaggattaaatatggagctggttgggagtggtttcacaatctacaaaaccattgatgtctccggaaacagactcgaaggagatattccagaatcgattggtatactcaaggaactgattgtgctcaacatgtcaaacaacgctttcacaggccatattccaccatctctatcaaacttgagcaatctccaatcattggatctatctcaaaacagattatccggcagtatcccaggagagctcggggaactcacatttctagcgcggatgaacttctcttacaacaggcttgaaggtccaataccacaaaccactcagattcaaacccaggatagttcttcatttacagggaatcccagtctatgtggtgctcctctcgaagaaccctgcggccgagaagaagatgaagaagcaacgaagcaagaacaagatgaagacaaggaagaggaagatcaagtatttagctggatagcagctgaaataggctatgtacctggtttgttttgtggactcgccatcggccacattctcacttcatataaacttgactggttcatgagaatcttttcctgcttttcttctccgctgataaaatgatcaataataagtgtctcctacttttctcattacctatatctattgtgtcgctgaaaccttcaagatcttgtttctattatatatactccttattttccttctagtatctaccacctcatcttccatctcttgagagatattcttacgtactctacgcttattaggctccatttatggtaactattcggtctatgtggttaaaacttatgattgctttgcttttgactgaggctgactggctgagactctgagagttagtcatactatacttagtagtcatgtcagaaaatattcctctggtgtggcgaacctaaagtcgaaaacatctctattcaaaagtcgaaaacattctacactagtgctttaatgtgttttcagtttcagtttttttgtttccttgttgtgatctaagtcctttctttcaagtgttttgttcctgatttgctttgattcgagcctcttgtgtggagaagtttcctctatttatcagtgtattgtgctttgtgtttctaagatttgttcatgaaagagtttgaaaagagttttctcaagtcttttacatcggtattccaagtttaaatcaacgtactaagaagagcttaccatggagcccattaggttccacagagacttataagccgagagtgagtactgattaaatggactagcaatagcaactagatacaatgttcatatctattttgcaaatcctctaagagatgcatctagtatactagatttatatcatcattttaattactaactcttggggttataggctaatctctaagcttcctccttcacgttattagccactgacagcatcagaaaggttctctagaactctagaacctaagcaaatgtcacaatgctctcgattatcttattactcaccaaagataagctccagttttttgaactagttaaatgtattataattagaacgatgtgagacttttgcttcaaggtcgttgagtgtgagaaatggttttctttgatgttacctggtaaagatgccatgaagcataagcatccgttgttgtttatgctcctttgacctcccaattcaagcctaattctgtttggcttcaggagctgcaaagtaacagtttttaaagcgaaatataaccacattcccaaagttctaaatagaaagaaaaaaacaagctttgaaatcaacaagataaggtggataatgggtacctctttgcaatcaagtgtctcagttagcgaggcacggccccatttttctgaatcaaggtttttgtgggctaaacgtaaaagatcttcgacatctttgatggatacaccattgtcatggaaaagcttaacaaagtcacagtcaattcaaacaccacatataagaactaagttaagtatgagcatatccatacttaactacagaataatattgtccaacatgaactttgatcacttcaaaaccttaacaagtcaatagtcaatgtatagatttcttagctacagaatcagtagctaagtatggatatgctcatatactaggttgttgtatcagaattgtaaaatttcttggcctggtttataaagtggtatgtgtttaaaagaaaaataaaagaagtaaaatgttatattcaagattcatggggcacattgtgaccagtaaaggactcgataaactcaacaattttgagggctttgggtgtggtcaaccgagtgaaactgtgcaaggaagcacgctcatgcaacttgaagttttaatgtatgtcttgttcgttttgtaattttaaatctctgttggctgcggtgtggtgtgtctccgtttagatgcagttttggttccggtgtgtcatgatgtagtgctaacctttaaccttctttataatcaggatatgtagcaatgctcctccattagctctaactcaccaaagacaaactttgtgcagccagttccacgtaaaaagtggggtttgtttgtattattacctgatgatatataatcggttgctgcttatttaacagaggatgcatgggcctcctagtttccgaacctgatgatgttcggtttcaagagctgaaattgaattgtaacagaatgatcaatatagttagaccagttgtcactattgttctgtagactcactatcggccacatatatacaaaggactagattctaagcatcactataaaaaaaccaataaactttcagagggtttctaataaactaaaagatttcaccataacagtggcggctggtgccacagctcacacgcctgtcttcatcaactcaggttccagtttcattctcacacggcatttcaatctctagaacgagggaacacatgcaacaaaagcctcaaagattaacctccaccacacggcaagagaactgcgatgaatagtcaaaggaatattcgattttctgtggaagcgattagtctttacagaagaattttcaagtcaagctttaatttatttcgaaaatatggagacaatccaatgatcaattcgtttcacagaaaataaataaaaaccaatcacagaaaaaacattctacagcaagatgataacaataatatggagcttgtgtttaatcttctgcctttcaaactcaatacttgttattgctaaagacttgtgtcttccagaccagagggatgctcttttggagttcaagaacgagttctctatcccaagccccgattctgatttgatgctgattcttcagacgacagcgaagtggaggaacaacactgattgctgttcttggggtggtatctcttgtgatcctaagacgggagtggtggttgagttagacctcggaaacagtgatctcaatggccgtctgagatctaatagcagcctgtttagactacaacatcttcagagcctagatctttcctacaatgatctttcgtgtaccctaccagattccagcggcaacttcaaatatttgagagttttgaacctccttggttgcaatctctttggagagattcctacatcacttagaagtctttcttacctcactgatcttgatctttcttataatgatgatctcaccggtgagatactggattcgatgggcaatctcaaacatttgagggttttgagtcttactagttgcaaattcaccggaaagattccttcttcactcggaaatcttacttatctcactgatcttgatctttcttggaattatttcaccggtgagttaccagattcgatgggcaatctcaaatctttgagggttttgaatcttcatcgttgcaatttctttggaaagattcctacttcactcggaagtctttctaatctcactgatcttgatatttctaaaaatgagttcaccagtgaaggaccagattcgatgagcagcctaaaccgactaacagattttcaacttatgctactcaacttgagctcactcaccaatgtcgaccttagttctaaccagttcaaagctatgctcccatctaacatgagtagcctttccaaactggaggcttttgatattagtggaaattcattttctggaaccatcccctcttctctcttcatgctcccttcgttgattaaacttgacctgggaacaaacgacttcagcggtccacttaagattgggaatatctcttcaccatctaaccttcaagaattatacattggagaaaacaatatcaatgggccaattccaagatctatattgaaactagtcgggctttcggctcttagcctctctttctgggacacaggaggcattgttgatttcagcatcttcttgcagctcaagtctcttaggtcacttgatctttcagggattaatttgaatatcagttcatcgcaccatcttccctcacatatgatgcacttgattttatcatcctgcaatatttctcagtttcctaagtttctggaaaaccaaaccagtttgtatcatttagacatctctgccaatcaaattgaaggccaagtaccagaatggttatggagactaccaacgttgaggtatgtaaacattgctcagaatgccttcagtggagaactaactatgttaccaaatcctatctatagctttatagcctctgataataagttttcaggagagattcctagagcagtatgcgaaattgggacacttgttttgtccaacaacaacttcagcggttctattcccccgtgttttgagatttccaataaaactctttcgatcttgcatcttcgaaataacagtctctctggtgttattccagaggaatctctgcatggttacttgagatcactagatgttggtagcaaccggttatcaggacaatttcccaagtcactgatcaactgcagttatctccagtttctgaacgtggaagagaaccgaatcaatgacacatttccatcctggttgaaatcattgcccaatctacagctgcttgtccttcgttctaacgagttccatgggccaatattttctcctggagattctttaagtttctccaaactacgattttttgacatttcagaaaatcgcttcagtggagtcttgccatcagattactttgttggttggagtgtaatgtcatcgtttgtagacattattgataatacgcctggatttacggttgtaggagatgaccaagaatcctttcataaatctgtggttctgacgatcaaaggattgaatatggaactggtagggagtggtttcgaaatctacaagaccatcgatgtctccggaaacagacttgaaggagatattccagaatccatcggtatactcaaggaactgattgtgctcaacatgtcaaacaacgcattcacaggccatattccaccatctctatcaaacttgagcaatctccaatcattggatctatctcaaaacagattatccggcagtatcccaggagagctcggggaactcacatttctagcgcggatgaacttctcttacaacatgcttgaaggtccaataccacaaggcactcagattcaaagccagaacagttcttctttcgcagagaatcccgggctttgcggtgctcctctccaaaaaaaatgcggtggagaagaagaagaagataaagaaaaggaagagaaagataaaggattaagctgggtagcagctgcaataggctatgtacctggtttgttttgtggacttgccatcggccacattctcacttcatataaacgtgactggttcatgagaatcttttcctgcttttcttctccgctgaaaaaatgatcaataataagtgtcttctcttttatagtattgtttgggtctctcatcttgagaatctgtctttctgttgagttacttttatctattgtgtcgctgaacaactgcaactttccccgggagaacacctgaacatcccaaattttcacgaattatcatttagatcacactggaacttctctaaaggataatgcatatgaaaagctgcagcaatgagattcgagactatacaaaactggacaagtgagacatctaaactttcttccgaccatttacaaaggagacaacaagcatattaagctcttccgtatctaaagacaacatatccatagagatgaaaaaaaatcacaccatcagatgaatttgattgcacattgcatacttaaagaccgcaatcgaaatagatgaaacttgcaaacagaccgagataagaccctaatagcatgaactgagaggtgctttcaaagtaagacattgatgttaaacataatacctttttaaaaaacttggtcttcactcaatatcatctctattggtatcaagaaccttaagaagctgcatttctcacttatcaacctcactagctagatttagctgcaacaaacaagtcaataaccaacggatagattgcttagctacagaatcatatttgcacacaagtggagaacgttaacatcatcattgtagtgacaaaaaccttaataaatggattggggtatgaacaattgagaaaataacaactttggaaatcgaatcagatggggaaaaagttgataaaacaaatgaattgagatcaccaagaacccagaaatttctaagcgataagaaattcgaaaataatagctaaagatctctagggagactgatgaatccacttttccatctttacctcgacaatcggttataagctgcagaagaagtgatgtaatgatgcatctggcgagggaaattggggatttcaattggatgttcgtgttcatggccggagctcgtatcacgtacggtcggagtagcgtaacaagaagaatgggagagataggaagcttcgctggcgtcgatagcgagaagctcttcctctgtataaatcttcgtcgtcgtcgtcccaacttacgatatttctttctttacttttcgtaaaactttcttttttttttgcatttacaagaattc
